United States Patent Application Publication US 2015/0376612 A1 - sequence listing, part 43

SEQ ID NO: 102399 - DNA, 1212 bp, Homo sapiens
attcctggcctagtggccaaccatggtgaatgggtgcagttagatgtaaatagtctggtcttgggacaaaaatcattttgttctgatgcctttttttaacttttcctgtttaggttttgttgatttctcctcttaaccatattctgtctttagggacatagaaataagagaggagaaagttgggtcctattgaggcttacattggtagtatgaatgaatacctatattacgtaaatgttggttcctcttagcatttaatccaaagaatgtaaggtattcaaataattttctgtaactcttacttggaacattgattcattactccaaatttgaataacagtacgttaaatttagagttaggaaatactactactaatcagtgccagaataaaatgttaatagtgaatattttaatgttttgatgataaaattactctcagtttaagaaatatgatatacttctatttagtcattctctgtgaaccaattatctttgtattttgttaaatactgtttcctttgttcatatgtttggccagaaacctcaagccgaagaggttaaaatctcagacaaaaataattcctgagttggtaggttctcctacccagtctacctcaagtaggacagcttatcttggaacccacaagacaagtgctggtatctcttcaggtgttacttctggtgactcttcagattcagcagaatcatcagaaaggaggaaaagaaatagacctataacaaatggttctacattatctggtgagaagtgaaatactatgttatttctttgctgagcacccaaatgtgtaacactggccgttactagagatttagaggaaaatataaagatgtggccttgacactgaaagaacttacagtttaatggaagagataaacataataaacatggaacaattcggttatcttctgtaagtgccatgctttgtgaatggtacatttatattgaattgtcaattacatgatacatagattcttcacacttggtgtgcagcatttgaagtttttgtatctttttaatttaaaaattaagaagtactaagaatcaatgaagttcaaagctgatgacgtagtaaattctaaactgttcatgttgttgccatctggtagcataactgtagctgatgctaactttgttaacattgtacaaatgaggctgtggtgtgtatctatttctgtactgctctgagtgg

SEQ ID NO: 102400 - DNA, 1090 bp, Homo sapiens
gtaagaaattcgtatatctcacatactttttaaaaaagttttctggtattggagtgtcttcgccatccactgccatgcacaagaattatatttaagttttgagcattagacttttgcacttattttcaggaaaagtcgtggaggaggatagagtagttctgtacatacatagctgtatccaaaagtatttaagatttgatgttatttaattgtaaacattgttaaaacaaatctttcatatgcattaacgttctaggttatactttctgctactggatgcaaggtatttttgtttcatttttagaattaggtggcattgaaaacagattgcagacagagatgggtatataaaagtgcttttgttcccttgccccaaagaaagacagcgcttttgtagcctaaatagcagccttaaaaccattcaacttcccatctaactttgggagaagggtatattttggggtttgtacatacagatgttagaataggcaaaaacagttgagattcactgacatatagacacaagtcctgaatatagatgcttgacttcaaactactttcttatcatctgagaggtatgtatttgatacttcttacttccagatgtcattaagggaagggggttggaaacagaagaagtgggtgacagccattacctataagcagtgatataatacattgcaagggatctcaatgattacaattatttcttaagtacttttaaggctattttgtaattctactttgtttttatatccttgcagatttatagtatgaccttgagattatctgccttatttgaagaaaaaatgaagaaaatctcttctgattttaaaattggtcaaaaattcaatgaaaaacttcgaagaagccagaggttcaagcaacggcaaaattgtaaaggtgacagtcagcctaacaaaagtatcaggtaaactggttatggcaagcttgctttatttatttatttaattttggagagagtctcactgtgtcacccaggctggagtgcagtggcatgatctctgcctcccgggttcaagtgattttcctgcctcagcctcccaagtagctgggactacaggcgcac

SEQ ID NO: 102401 - DNA, 4609 bp, Homo sapiens
agtaactgattcttgtcagctttcttggtttgattctgtcctaagtcttggagactcatacgtaagttacctcctccccagaatcaccttcttgttcttacttcaggaaaattatctacccatttttgtctcctttatgcttagatatccatatttcagcattctttttttctcctgtgtgtacagtaagatactatttgctttaatttcaattcctttttcccttatatatatatgtatatatatatattttttttaccttaaatcaactgttttcctggtacttattgtgtgaatactgctattgatgatacttagaaaaactcatccatgtattcatccaattgaggccatacatatattatttttggattacctgcttaatttggatacatacttaacggaaaacaagaaaaaccttcaagattctaaattaggatttaagatggctagttacgtttacaaagggttgggggaaaacctgatattcctctgtttgaaattaggcacgtataggttggtgaactgtttatattttaatgtataatttgaatccttgccaacaagtcactacatctgcatactattaaagtgaaaatttgttttttaggaatcaacactgtacaaatatctcagaactttctaacacatctgaaaatgatgagcaaaatgctgaggatttggtatgaagtttgttgattttataatggtttttgttaatttcaaatggtatttttaaagtgaagaaaatgttggctttgtagtaccaactcttgtagtagtccaatgaacaaatagggcatttgataaaattatatttttgaattttctagatgatttatgaggtaatttgttttagctaatatcaaaatatatctaagtgaataactttaggtgtggaatatattctctttctatattttagctagtgaaaggtgtattatataaagtaccttggaggctgggcacagtggctcacacctgtaattccagtgctttagcaggctgagatgggaagattgcttgagccaggagtttgagaccctgtctctacaataaataaaaaagttagatgggggtggtagtgcatgcctgtactatagaacacaaaatgcagaaactataggaatctgtatgtttctggggatttgtggatagaggtaaaacacaagttttctatttaggaaatgcatgaagcgtctttttatagctgtaatttcaaattttagaattagttcatgttcttagggaatgaaaaaggattattaagaatgatttttttttttcaagcctgggtgccacaaagatcatctggtagtctttctttggagattttgataataacatgttataactctggtaataccaaatgtctttgatatgttatttattaagattatgttattattttctaatgagactctaaatacttaaggtgctctgattttattcctaggatgatagtgatcttcctaaaacatcttctggaaggaggagagtaagttactctgcatggttgacttttgtagtttctttttctttgttttaaaatcaattcaggattttagtttttgtctttgaaaagttatatcagtgtagatactgaatattttattagcaaaatgggagaaattactggaaagatttagtgggagagttggaatttgtactgtattatcagagtgagatggagtaagaagaggccattcaaaaaatagaggctaccacaggaaagacaaaaaaagtagagaaatatggcatggcatgtccatagactgttaagggaactacacctgactggtgtagaggttggatgttgaagtgatcaaagtggctgtgtctggctgttatgattggggtagattatggtgatattgaaatccaaggatttcatttaaagtagagaatcaattgaacagccaaaatagataatacaatttgaaggataagaagatgtgtattaaaggagatgaattaggagtttattccaagaatatagggtgaaggacgggtacctagtcaaggatatttgcttggaatggagaggaaaggaaaattatgacacctttttagggaaaactaactaggatttggtgactgaactttttttaacaatggagatatgttgggatgatgaggttgaggggtaaggagaagggtctatggaactaagtttatgaaagtgggtaatcataatggagtatcggcaggctttgaagttcaaatatagagtaattaaaattaaaggttattaatatgaaaatgcttaagacattttagcccagatcattttaaatttcctccaaatgctccttaaatttaagctttttatgaaatattaatttataccatgtgcttgccttccagaacactgaaaagttatacctaaaatactctaatttgattagtcattttcgtttaattttatttctagactcccaagtgtttagtatttgtatttatttgctatgtctgctgcagcaaatgacaaatttagttgcttaaataataaaaatgtattacctgatagttctgtagattagaagttttcatgggtctctaggtcagaatcatggtcttggtgtggccagaagctccagggagagttatgtgcattttccagcttctagtgggtgtcctcaccttggctccaggtcaccttgttccatctttcaagccaacaatgtagcatttttcagtctctctctgactctgacctttctgcctccctcttataataacttttgtggctatactgggtccaagcaatcaattcaagataatctttcatctcaaggtctatacccttaatgcaaaataccttttctcatgtaaggcaacatagtcataggttatgaggattatgatgtggacatctttggtggggccattattctgcctatcatattatcagatgtgcttcatattctgcgaaaacaaatattataaacctgggaggtgagaggtcatggaatagcctttcactagataatgtgctcttgttagagtatgcttttcatagctaactttgtaatatttctgaaattggttaagttatatgaaaataacttacgtttcatgcatagtttaaaaatttcatttctggaaaaatgtgttgagagcaacatatatgacattattgtatttttatagaagacagtagatcagttacatttttaccacagtcttacaccaatagtgtgatttttcttaagactgtgaatgtatttttaggtccatgatgggaaaaaaagcatcagagctacgaactatgttgaaagcaactggaagaaacagtgtaaggaactagtgaacttaatttttcagtgtgaagattctgaaccatttagacaacctgttgatttggttgaatatccagtaagtttccattgtttaaatgtttggggcttttcttgttttgcagtgaggaaactggggtagagttattaaactttaaagagaaagatacccaggctttatgttaacttttttgctcctatcactaagttagtggtagaagtattgtttttacatagttttcttcaatttatagacacccttgtgagctcatttaagaatttagacttagataatcagtattacataacagtgggatggatctacttagatttctatctaagtaggcccagcactaggagaactgtgaattggataaacgtgtctgtttgcactctttaaaaagggaaattgaaagatgactttataaaaaaagttggattataacagcacagagtgactgtaggatgcttggagtacatacagcaggaaataaaaccatcccatgtgtcactaacaataaatagacattaacattttggtatatttctatcttttctttgtttttatacctctttttaaacattactaatgaattttaagagtcctctaaccttttcctctcttccatcatttcacattttttagagatctgatgcatttacatttctaaaagcaagaaatgaatctatgaattaaatattgtgtttaaaacctaggactacagagatattatagataccccaatggattttggaacagtaagggaaactctagatgcgggaaattatgacagccctttggagttttgcaaagacatccggctgatatttagcaatgcaaaagcgtatacaccaaacaaaagatcaaaggtaattttttatgtggtttattgaaaaaaactgcctgatctgtgtagataattttccaatgtaatagtaattttttccagtgtaattttccactgtgtaatagaggttagaacattaaagataagtgaataaattaagactattataaagaaaagagcttctgctactgctcatatagcttcagtttttgcctttcatcagttgatgtttatcataatctcctcaaattttataagcaagtggggattaatgggagtaggcatcaatagaaagtgaacaaatttgatacacagagtaagagtctctgtgttttgtatgtataaggatcttaagtggattggaaacatagatcgagactgtaagaatattaaaagtaaaaaggaaaatctgattgtgagactgctgacagcataagaacatttggatttgaagaaggaaca

SEQ ID NO: 102402 - DNA, 1067 bp, Homo sapiens
gccctgtcctcccaaagtgctgggattacaggtgtaatcccagcttgctgggccagcttttagggttgatgatatttaacatattttctttattgagattcaacaattttaaaaggtacctatatgcagtatgaaaagggagggtagttttgttggttttctgtatgtgattaagtaatttgttaagatttttgtcctcttcagttcaatataattgcttcggtgtccaatgtattgcctatgactatgatcaagttgagagcattagaaggttattcattataactttgcacttatggtttaattattatttcacagttgtttaattcacatgctgcattttttcacttggtttctatcttctcattttctaagccctaaattgtctactttattttgaaggaggctgtctgcgttagtttgggaagtcagatatatagaacataatgccagaacatttaacgaacctgagagtgtaattgcaagatcagctaaaaagataactgaccaacttttaaaatttatcaagtaagtaatttcatagatgttgtgtaaaagtgactgcatattgtgctattaacaatcatctagttttgccgggcgtggtggctcatgcctgttaatcccagcactttgggaagtgaaggccgtcagatcacttgcggtcaggcatttgagaccagcgtaccaacatggtgaaaccccggctctactaaaaaaaatacaaaaattagccgggcgtggtggcgggtggctgaggtgggagaattgcttgaacccaggaggtggtggttacagtgagcccaatcgtgtgtggatcgtgccattgcactccagcctgagtaacaagagcaaaactctgtctccagaaaaaaaaaaaaaaaggaaaaaaaaatcatctagttttgttttttactcagaactatacttttttaatgctttactttagatgacatttctttacatacataatttaagtaaaagtctgagaaactgaataattcagtttttcaactttttaaaattttgaaataattttatactccagaaagttgccatttgccttt

SEQ ID NO: 102403 - DNA, 1105 bp, Homo sapiens
tgttacactttgttctgtcacacaattaagctagtcggaaacaattttatctttttaagatatggtagatgggtttggagcagtgctcagcctagaactgatttacttttgacttctaaggcaaggcccttttatgcagtgtatccactgctctatgtatcatgcagctttttcagtctggctgagggaacaggcgtgggtgctggcctttttgtgcatcaggcctttgttatcacagaactttcatttggttcttttcctggcttcctgtcatttcttcacacgtgtgggttgatcagtattcaccagaatacctgaggagaccagcccaggcaacatagtgagaccccctttctccccattaaaacagacacacccacacacccacccacccacaccccttgcccaaagtcatagtttttaggtggtatagatgtgatttgaacttagatcccggctttgataaaccagtgttttttaaagcactttatgttgcctgcctgtacagcgtctttcctcttccttttgatgagataaaatactgaaagcataactctgaattacagtataaaaatacacattttggcttattagggcagtgggatgtctctgccctcttcccccacatttcttttatgttcatgcagaaaataaaatggaaatcctttttctttttgcaagaacatgaattataagcttataggaatcatttatcatccatgtttaaaaaattcccatctctcagctaaaagactacatcatatgacttaattctaataggtcaactctactgaagttaagagcattcccaaagaatgctctatataaaacttgtgtgtatgtttgcaggaatcttaatggatatgtttctagaggaaatgctcccatgagcattctctccatcatttagcagctgttaaaatgatgctcttcccaatgcccttgttccctcattgtaaacgtgctctgagttaacctggtagccagtacacagtacacagtaaatgacatttcttatctgtatgttagaactactattcaataagctaaaatattttgagcttcctcagattttctcctttttttttttttgagacagagtctt

SEQ ID NO: 102404 - DNA, 1119 bp, Homo sapiens
gagacctgtctctacaaataataaaaaattagcttggtgtggtggcatgttgtacctgtagtcagtcccaggtactcgggaagctgatgtgggaggattgattgagctcaggagtttgagattgcagtgagccatgattgtgctactgccctccagcctaggcaacatggtgagatcctgtttccaaaacaaagccagaaggaaatatgttagatttttaacagtgattgtcgttagatattgcgctaatccgagatttgtgttttcaatcttacacttttgtaatgtattttctaaaggatgttctttgtattagaaactgtattaaatatgtggagattaactttagcaaaattgaatgtaattaatggtattaattaaacttgtctgcgggtttggaagcctaaattatgagtttacttaatataacagtatgtggagaattatagtattaaggaattgcttttattttaaccattaaaaaatatgtctgttaaaggatcaagaattggttaaaatagttggaatacgatatgaagttgggccccctacactctgttgcctaaaactagcatttatagatccagcaactggaaaacttatggacaaatctttctctattaggtatgtattattttttaaaatggaattacttaaatttaaatttgccattttgctgattgaatgattagcatgcccttcccatttaactccagggtaactggtagagcactgtggatagcctaagatgtggctcgagcttctgatggctaggaaacccatccctgaccctgaagtcatagtaggcatgtcacagttatagttaagtgtgggcagtctgttttatatggttttcatgctgcttatgtgggtggggaattctgacatacgggccaaattttttctgccctttgtttttgaaaaaattcagaataaataatttcctacacctgtgctgtctaataaggttaccactagtcacatgtggctactgctcacttgaaatatggatggtttgattgaatgtcttaatatgtgacttggcagagtatgaggcataaacatttttttttaaagaaatgaatgtgttgtgaatgtacacactgcattttgaagagt

SEQ ID NO: 102405 - DNA, 1920 bp, Homo sapiens
ttgaccagggtggtctcgaacttctgacctcaagtgatccacctgcctcagcctcccagagtgctgggattacaggcgtgagccatggcgcccggccaagctactttattattaacacttctccatctccactgttctgagtagtgggcttgacagttaaacctttccaaatctgaaacttaaagagaaagctctattttgctcagaatctcacggcaacacttattttctcctgtcaatttcaacactagtagtagacttcaaggaattttaaggtgctttttttttgtgtgtgtgtgttattgctacgtttaccattttcattttacatgtctgtcttcatacttgtctcttcatttaataacatccctatttatttgtgtacactgtgctgatttcaagcaggtagtcattgtttaaagatgttaagtctttgtatttatctattgctgtatataacaaaccaccctaaaatttaggtgtttacatggcaaacgttgcatatttcatgtattggttgatcaggaactgggagctgatttgactgggtgattttggctcatgaggttacaacatgttgactggggctgcagtcatctgaggacttgatgagggttggatgatattctttccgagcttattcatatggcttttggcctcagttccttgccacacaggtctctccttagctggctgcttgagtgttgattttcaactcaagctggctgcttgagttatgattttcctcagagtgaatgatttaacagtagccagggataagcccccatttatgacctagtcttagaagttgcacatagtctcatcggctttattatatttggtagaagtgagtcattaagtgtagtccacacttaagaggaggagacttccacttcttgaaaaggagagaactattggggaatttgtaggcatattttgaaatcaccggtcttacaacctaaaatcaagaggagactccttgtgatgattagcctgtggccaaactcagagtggagtcttggcagaacaggctatgggtaaaagaggatttaggctgggtattagccccctaaaatgggatgtaaaatagcatgaagaatctatcagaaatttaggagatgatgctaggaaaatgttaggtagatttacaatgcttttttaagtgatatattcctgtgtaaaggaactaaatatatatgctgtgtgaaaactaatcattagatggacatggcaaaaatagtcattctgaatggtgaaagtttcttttatttttcattcagacagtgcatgctgcccctttctaatctaagaaactttgttctcttccccttggtagaatttgcggaggatgactccagcagagcttgcaaatatggagcatttatatgaatttcaccctccagtttggattactgacaccacacttagaaaatctccttttgttcctcaaatgggtgatgaggtgagagtaatacaaatttaaaaacacgaatatggaacataaagtttatattgctcttaatttttaaatgcatatttcccttttgtaggtaatatattttcgacagggtcatgaagcttatattgaggctgtaagaagaaataatatttatgaactgaaccctaataaggagccatggagaaaaatggatcttagggtaggatgatggcattattaaatcattaaacattttagcacatacatagttaaattacttacaaatctatttaaaaacctgttggaaacatattttattactttctttcctacttgataacatttctgctgtaaccaaaccttaagatcctgtgggaatggcttgtttgtcagtgggcaaaatttgtatgttgctgattggtgtgtaaaatgttaaatgcaacaacctagagtttcagaaaggcagcttggcaatatatata

SEQ ID NO: 102406 - DNA, 1011 bp, Homo sapiens
ccaaagaagataaacagatgacaaataaccatatgaaaagctaccaaaatatgtcacagggaattgaaaactagaacaacaattagatacatctattagaatagctaaagtccaaaatggaaaacatttacattgactttttattaactttactcagaatggcctgttgtatcactttctttgctaatggtggtagtgttaaatcttacggatgttctctttttgtcttatgctttgataagaaagggatgtagtgaagaagtttgctttttaagtttatctgattatatatttactgattactgttcatttttcttagatgatttaatcttactggggaggattgtgtacagcttttttctggacatgtgttgtttaacttcagggatcaagatttttttccccccttcacaaattaggagacttcctgtgatcagagtgaaggttctggttcttcagaagaggatgaatggagaagtgacagaaaaagtgagagttacagcgaaagttcaaggtatctgtttttattgttgtggtcttttaagcattttagtcatagtcttggatggaatcatacttgaattttattcaagaggcaagaatttgcaactgtggaacagtttttaatacacttaaaaggagaccaaaactagatccaacagctgttcctataggagtatttcaggagtttttttttttttttttttgactttaagcagttgacccagcactgttgaacatgcatactgaaaatataaatttaatcttggttgcacttaaaaagactagtatctaaagtatgtgtggtaaaaccacagtatattcattattattgcatgtgttgaatttttgttagttttgagatccagatttcctgggtccaaaatgtcagcctctggttcttggtgcacgtcaccttcatctcaacagatcctcaatccagaaaactggaccttaatctctcttgtccacctatccgtaacatggctagaaaattctccttcctatcac

SEQ ID NO: 102407 - DNA, 1051 bp, Homo sapiens
tcatttattaatatgcatttacatttcctacatgccttctcatggcttgatttttttgtttgtttgtttgttttttttagcacagaataatatttcattgtctggatataccatagttttatcagtttacctactgaaggatgtgttggttgcttccaagatttggccattataaagttggtataaacatctgggtgtaggtttttgtgcggacataatttttcacctcatttgggtaaacatcaagtgtgattgctggatcttattatgtttagttttataagaaactgctaaactgtcttccaaagtagctgtaccattttgcattcctatcagtaatgaatgagagttcctgctgatccacacccttgttaaaaaattctttccagcatcatctgtagattcacaatcccaaacaaaatcccagcaaattaattttactgacaaactgatttttcgagtttatatagagaggaagaagatccagtatagccagcacaacactgaagaagaataaaactgaaagactgacactctacttggcattaagacttactgtaaatctgcagttttcaagacagtgatgctggtgaaagaacagatcaatggaacaacataaagagcccagaaacagactgacacaaatatattcaaacgatctttggcaaaggagcaaagagaacttggtggacaaatttatcattttcagccagtggtagaataactggacattcacatacaaaataaatcctagacaccagtctttcacaaaaattaactcaaaatgaatcataagcttaatgtaaatgtaaaacaaaaaaaccataaaacttctagaagataacaaagggcaaaatctatgtgtccatgagtgtggcattgacctttttagatacaatatcaaaagcacaatcatgaaagaaaaaatataaaaaatttggactacactgaaatgaaaactgctttgggaaagacactattaaaagaatgaaaagataagccacaaaccaggataaaatattagtaaaacttatatctgataaatgactta

SEQ ID NO: 102408 - DNA, 1028 bp, Homo sapiens
actagtgtgagatggtatctcattgtggttttgatttgcatttctctaatgattagtatgttgaacattttttctttacacctatgtatagagatagtgagaaattccttgagaagttgcttactgcatcataatgtacgaatatgtatttttcatttctgagatgtatacttttaaggtgacatccttttcagattattgttattttccctcattcgtggtaaaccagttaacttacagcatagtttggaaaatgcccatctaatgtgcattttctcatgttttctaaggaccttaaaagtaaaactactaagcttgagttaaaactgtatggcaaaaatgctaccttctttttaagcctttttttctttttgctttaaatccttctggaaacttgacggaatgcccattttgttgatattgtccttatttaggtgttgattttcattcgcatgtttttctgtgtttcagtcggattcagtggttttggtatcacagtctagacaaaggacatgtaggcgtaaatatccaaattatggtagaagaaatcgtagctggcgtgagttatcttctggaaatgagtcttcaagctctgtaagacatgtgagtggaaaactttaaaatgttataagataatcttaaatgaatttggcttaattctttactttgaatgaatataccccaaatttatatgaaaacacagcattctgcagagattaatatgaaatttcacattttgaatgttaacaaaaacttttaatggctaagatagtcacatactgtatacttgtgcaatccagtggttttacatgttgagcatcccaactcagaattttgaaatgcaccaaaatctgaaactttctgtatataaacatgatgttctagtgtgcatttcagattttggatttttggatttggcatgctcaacctgtaagtgcaaatgcaaattttccaaaatctggaaaaatacgaaatctgaaacaattctattccccagcgttctggataaggggtatataacctgtagt

SEQ ID NO: 102409 - DNA, 1009 bp, Homo sapiens
agtctgctttagaaatccccgctggataaaataatgttctactgtaatcttgagtgtgggctgtctggcgtacttagagaaaaatgcagtgttcttaaaaatcagtttttatccttacagcatttactcttacactctgttgagtgtctagttataccttggaacatggccaagatttcagtataaatctttttcctttgagatgttaaagtaaacaaaaacataaaagccacgtgtttttaataatgttccagttggagaaaagggacagtcagtcttttccagagaagaaaaatgatttttagtaccttcttcttggtggcaggtcctttgctttgaaattggtcacaataacataatctttttgttgtatcatgtgagtgaaatataggtgattagaaaaaccagtaacattgctattcttgttttctataaattatcaaacatagcttgaataaatgtggagaaggcagactctgcttattttttctttagagaaaggaattgcaatcttggaaaatcatgaagacgttttgaaaagctattatgggagattctgtttgaattggtcctgatagtaccaatcagaaaacgaatgaatatttttgcctctgatatgaaaaataggtttaactgcctctgagattttatttatattcatataaatttttaacatgttttaacttcagagattttgtgtatttttaaagtacataaacttatgatttatagaatcacactggtttttattctttatatcctttagttatccatcagttcagtagttaatataactgggtatttaaatttgtaggaagctggaagacttccgattagagaaaggtgaagaggaaagaaatctttatataataggaagaaaaagaaagactcttcagctctcacataaggtaacctaaattctgttttcttagcaaattagaaattacattgaaatatagagttttctttttgatttataaaactatcagtaactttcatctgaagtgga

SEQ ID NO: 102410 - DNA, 1048 bp, Homo sapiens
atctcttgagaatcatgagaatcatgattactgttgcaagagctcttgtaaaaccactttgatttcaggtatctgtcttcagtgcaaatttttcaaaaagactttttttagtgtgcaatttttaagaaggcacagtttttaggaatgcatatataatgtaatgtgaaatgtacattttataatttcagaaagtctagtaaaaattgaaattgaggtttaatagttaatgtttgttccgtattctacattttgatcttagtcatgttaagattctgtcaggctgggtgcagtggctcatgcctataatcccagcactttgggaagccgtggttaagaggattgcttgaggccaggcatttgcgactagcccgggcaacatagcaagaccttgtctgtacagaaaataaattttaaaaagatttttctcacaaagttttttcagtagatactatcttctcttagttctttatttttggtgcgcatcttaggtgaacgtgtgcttgttacatgctaaatgtatattagtttaaaagtgtattggaatcacttccccatcatattttcctaggttttagaaggctgagcttagacattcagtcccctccaaatattggtctgcgtcgtagtggacaagttgaaggtgttcgtcagatgcatcaaaacgctccacgcagtcagattgctacagaacgtgacctgcaggcttggaaacgaagagtggttgtaccagaggtaccactaggcatatttaggtttgttttaggatatctatttataatgtttctatctgtgaaaatatatttatatggttatttacacattctgtattccattaattgtgtaaataattgtataaatatattagtaatgagtgggaatcttactatcttaattgtggtaggaaaatgtcagaattattctctaatgtttttactacattaaaggttttcagagccagtcttgcttcttttctttttttttttcgagacggagtttcgctctcgttgcgcaggctggagtgcggtggcatgatctcggctcactgcaa

SEQ ID NO: 102411 - DNA, 1162 bp, Homo sapiens
ggggcagagggagagctaaagtcttgttgaaggcttaaaaaaggtcttacctcccttttttcccctttcttaagacatagagaagaaattaaatctcagggatttttctccacattggaaatgacccatagttgctctgttccagttagagactctggggaataagattttagtgaaatatatcgagtatggtgaggggcattagtgtgaaacagcgtaataaagttttacagaaatatgtttccatgcttccacttgcaggaatttcagaggctgctttcaggtttttgtggtatttagtcctctacaggaagacttttgttggctttgaatcttttctctgacttcttggtgaatatgtagagtatctttttaaactggttatttttcaaaaatgggaaattctgaccattgttaatgtattttaatttgtaccctaacgaaatttttttttgttttctgcttttatatgattatatattaaataattgaatttgtaggtgatggagaggtgattgaacaaattataagcctgcaaaccaatgataatgatgaacgcagcccagaatcgagtattcttgatggaatgataagacagttgcagcagcagcaagatcagagaatgggagcagatcaggatactattccaagaggactttcaaatggtgaagaaacaccccggagaggtaataaatagtgataaatgttttacctgaatatggctgcattgaaattaaagagtaaacgaagtctttgtcaggtacatgtaatgtgagaaacttaagtaaacaatgtatttttacaacttaattagtagtctgaaggtagctttatgaggtgtgagataatgtagtaacaaatgggtctttgaatttcaagtactgctgaagccttttgtactctaaaaatacagtatttacaaaattgtattaaataggagcgaataacagattggtttttaaaataaaaccatagttctagcttttctttgctttaacattggtaatttttgaaaaactgtattgggtagagtatgatttttcttattgaatcagaaagtttgaaaacttagtgagttttcagtgttgagtccttaaaagtacagtgtagaagtaaatacataacaatcaccagtctcccctcagttagttccactatttac

SEQ ID NO: 102412 - DNA, 1362 bp, Homo sapiens
ttatttttttggaatagtgattgatgtatatgcttaatgaaacatttgtttttatttttattttacagagtctcactctgtcacccaggcttgagtgcagtggagtacagtggtgcagtcttggctcactgcaacccctgcctccccggttcaaacgattctcgtgtctcagcttcctgagtagctgggactacagacgcacactgccacgcccggctaattttttgtatttttagtagagacagggtttcaccatgttgcccagggtggtcttgaactcctgtgctcaggcagtccacctgcttccacctcataaagtgctaggattacaggtatgagccaccatgcctggctgaaactttttttttttttttcagaagggatatattgtcacaggttatccacattaaaaaagtttacatagcaaatcacttgcatagaattggtcctaacttttttccttttgtgtttcctagattgaaggacaaggacatggagctgtgtttgactgtaagttttcacaggatggacagcattttgcctgtacagattctcatgggcaccttctgatatttggttttggatgcagcaaaccatatgaaaaggtcatttttaatactttgttgtagcatgcaagtaatagttatcagctgtgttttggaaataagtagttatgagctatgttttggaaacagtttagctgagtgatttgatttccttgtttttctagttttaattaactgtttaatatttgtttcctttaaaatgtgtgaaccttaaaatgtcatcctgtgaacttcatttttctagattcctgatcagatgttcttccatactgactatcgaccacttattagagattctaataattatgtcttagatgagcaaactcagcaggctcctcatcttatgcctccaccattcttggtagatgtagatggaaatcctcatccaaccaagtatcagagattagtaccaggccgagaaaattctgcagatgaacatttgattccacagctgggctatgtggcaacaagtaagtgcagtctttttttttttttttttttaaagttgtacttgaatattttaaagtataatataaataatttccttacctttagatccccaattattaatattttgcaatatttgttttattattttttttctgtgtattgttttgaaccatttaacttctggacctcatgtaccatttacctctaaataagaacgacattctcttacataactatagacacttatgacaattaggacgttttacactcagataatactattatcaaatctatagtgtgtaaccaaaaatttccagttattctagtaatgttcgtttatagcttc

SEQ ID NO: 102413 - DNA, 1012 bp, Homo sapiens
aagttgtatgaagagatgagaatagtcccatttacagttcagattgaacatctgtgtgtcagttatttttctaaacattggggatatgaatatgaattaccttatttttgtgttcctaaaatttttttgtcttctatggagagaaacagttgaaagtaagtgttagcaataggtttgtattcagaagaaggaaataataggaaagaagtagggagaaaaagcattgctttcataagcagtaatggtgtcctaaaatctgcccttattcagtctctgtactgtttctaaattatccctcccttcttcaggttttgccctcacctgtttctagacagtctgttctgggtcagctgtgatgaactcactgtagggttgataagataggcacatgggttggatttctttatttttgtattgatgagagattgtatacattgtatagccagccatctaaataagtttacatgttgtgtatttttttgttagggacttatcttccgaagaggaaaggtttatgaaacctaaagtaacaatgatagcttggaatcaaaatgatagcattgttgtcacagctgtgaatgatcatgtcctcaaagtgtggaattcttacactggacaactgcttcataacttaatggtaggtaatttctggtacagtgtaacaaatgagattttttgaaatatgattgtaattttgaagctataaaaataatatattgaacaagttgtttctctcatgtaaactatgaaatgattagaaatttttataattataaattattgtcgaatacatttctaaaagtatatgctgtaacagtatgtatttttaaattttcaatttgtaacttgtaaaccctccttaatgttatgactttgttaaataaagggacatgctgatgaagtatttgttctggagacacatccctttgattccagaattatgttatctgcaggacatgatggcagcatatttatatgggatattacaaaaggtaccaagatgaaacattat

SEQ ID NO: 102414 - DNA, 1147 bp, Homo sapiens
taggctggagtgcagtggtgcagcctcggctcactgcactgcaacctccccctcctgggttcaagcgattctcctgtcttagcctcctgagtagctgcgattacaggcatgtgccaccacgcctggctaatttttgtatttttagtagagacggggtttcaccatgttggtcagactgatctcgaactcctgaccttgtgatccacccaccttggcctcccaaagtgctgggattacagacatgagccactgcaggttgcctcttctcagcattcttatacattgtattttcaaaacttaatctgtttgaaaagctattgattgagtttgaggtgtgttttatttcatagggccgggcaaatcatagcaaaccaaattttttttcccatccagatacgctctaaataccttgtcttttgaattaacacctgtggattgtcctgttgttaggacagcttcattacattctttttttgcatgtgattttaattgtagcccttgttggaaagtgtgtgaatatagtaagatcctgttctgaatgttttaaggttcctaagtggtagcagagatggaacagcacggatttggagatttgagcagttagaatggaggagcattttattggatatggctaccagaatctcagggtaagttgagattgttagaagtaggtgcatcataggtgttcgatctgtctctctctctctctctctctcgctctctgtgtctctcagtggttattttgttgaggggattatagctaccttctattacgaagagctgtggtataagtgaatagctgcgtactgcatatcaggtgaacagagacatccaggtaaatttatccttacgttgtatagcaaagaataacatgtactttttctatggttcaaagcattgacctccttcttagatgttgcatttaaaagcttctacaagtaaaaaagataaaattaactcaagtacattaagagtggaaattatacttttctgtggataggatttttgaaaaaatttaaaagtagcttagagccaaggctgggaaatagggtaagcaaacatactttattattaaggttaaaaaagaaaattgagctccagcctgggtgacagagcgagactctctaaaaataaaagtcatagattt

SEQ ID NO: 102415 - DNA, 1032 bp, Homo sapiens
ttaaagcagcatcttcttcttttaaagcccacgtcccctgaagttcactgaaaagcctaggccaggcgttcaaatgctttgttcttcttttagtgttggtaagaacttcttcacatttttttcttagttttttttttttaaacatctattaaatgaccacttggttgctaagaacttttattagctacatggtaaatgacttctggtgtttatttcattaggttcaatttatgatgtttattttgttagccttgttcttccagtcctccagtctgcctttctctgatttctggtagtaatcagtgatataagagatggctggtaaaagggaggcttgaggtgtccacacaagtgattcctatgccagtactatgtgtatgataatctaaatttgtgattttctttgaataggctaaactgtgtatgtttgatagtttaaatttatttcccacacataatatcttgatgaaattattctttttcagtttttgtacagtgaacttgtgtggtaacctttctcttttttcggataggtcaaagacttttccctcataaaatctgaaaacttgaacaagctagggttaggtatgtagaattgtttagaaagcagaacttcttttcttaaaaatatttttagagcgctggtgcttaattggcattatattgccacccttaataatacagatggggaggccaggcacagtgactcaatgcctgtaatcccagtcctttgggaggccgagatgggaggattgcttcagcccaggaattcgagcccagccctggcaacatagggagaacccatctctaaaaaaaaacaaaacaaaaattatctgggcatggtgcacacctgtagtcccagctactcaggagactaggtgggagtattgcttgtgtccaggaggttgaggctgcagtgagccatggtcacaccactgcactccagcctgggcgacagactgagaccatgttccccgccccaccagctggctcacgcctgtaatcccaacactttaggaggctgaggcgggt

SEQ ID NO: 102416 - DNA, 1034 bp, Homo sapiens
agattcctttttaaaaaaactgcaacaccattatcacactatttattgatgttcaagtttccagttgtctcataatggtattttatttaggttgtttgaatcaggagcaaaacgaagcctgcatgttacaattggttgctgtagaataaaagaaacttaaaatataaatttcacctatctatgcagtttaaaaaaaattcgcttgcagtttcttcgttgaaggacctaggttatctatagtttccccacagtttggatgttgcccattgtatcctgttggagtagtttaatatgttcctctgtatttctgttaagttggttattggatgtagagcagtggttctctttaatgtgcatgagaatcacctggagggcttgattaaaacattgttaggcactactcccaaagtttctgatttcaaaacgtctggggcgagggtatgagtatttcatcactgatagagaattgatcatcttgggatgtaagttcttccatcagaaggcacaaaatgtctagtgttttttgtattactcactgatgatcattgccttacatccgttagttattagggacagaaaatgttactcttactagtgcacggttcttggctgtcagtgtaacagaaattaataggaggctaggcagacttcccagacaagatttattaagacttatgctgagatttattaagacttgtgcctagcgatggctcatgcctataatcccagcactttagggaggctgaggtgggaggatcacttgagctcacaggtttgagacccggcctgggcaacttagtgagacccccccccccacccccacccaccccccacaaaaaatagtttggcaaggtagcacacgcctgtagtctcggtactcctgaggttgagggaggattgcttgagccaggaggttgaggctgcagtgagccgttatcgcaccagtgcattccagcctgggtgacaaagtgagactgcctcaaaaaataaaaataaaaaaagagacttatgcctgaaacattgggaataagtga

SEQ ID NO: 102417 - DNA, 1055 bp, Homo sapiens
ccttgtgatccgcccacctgggcctcccaaagtgttgggattacaggcgtgagccactgtgcctggcctagactaacatttaaccattgttagttgatataagagagccgtgaactttgagttggacttactactttgcagagaacttgggggaaaatagtattggtaatggagtctgacccgtagaaatgataactcggcagtatctttatgtagactgtctttgccttaaagaaaaatactattattccataggtgttctgaccatagtcataatttattacataaataagagagtattctatagttggaaagagttaaagttaatttggatggcatataaaaggtattcttttaatatttaaaagatttgctgtactaacattaatttttggatatattttttcttagggttcagatgactgtttggtaaagatttggtcaacacataatggccgcttgttatctacattaagaggtcattctgcagaaatttcagatatggcagtaaactatgagaatacaatgattgctgcggggagctgtgataaaattattagagtgtggtgcttgagaacttgtgccccagttgctgtgctccaaggacacacaggatcaattacatctttacaggtaaacttgtagcttagtgggcacattcctatatgtattttcacctttttctttaaaacagtttctttggaattgagaaatagtaagatgtgtattagttatgttttaagtaagagaagtgataatcattcatacaaatcatacaaatcatggaaggctgatgaaatgaagatctaatgcatatttacatgaaggcttattgatattttggggtttatggttgaactggatgagtgtcaattagaaactggtgatagattaattatttttcaactttaaaacttgtggattttgctaagttgatttttttttttttttgagactgagtcttgttctgttgcccaggctggagtgcagtggtgtgatctcagctcgctgcaacctctgcctcctgggttcaagcgattcttgtgcctcagcct

SEQ ID NO: 102418 - DNA, 3649 bp, Homo sapiens
tgaagttttgagtgttacaggtttgaatctgtagctcaaatctgtagatcagcttattgtttatttaagtcgtctttaatttctctcagcatgttttacagttttcagtgtatgtttttcacattttgccagacttatccctaagtatttaatagtttttgatattattaagctgttgtcattaaaacttgctctccaactaggtcttgtccaataagcatgtggctcctgatcatcttttgcaaatctgccagcgcatcggtcctatgttggataaagaaattccacccagtatttcaagagtcacttctttacttggtgcaggaaggcagtctttgctacgtacagcaaaaggtaccttaatttgaagaagtgttctgctttgtattaatagcctaataattattataattgtgaagtaatgtaagcattgtggaagaaaggtgataatgtaactataaatcatgctgtggactataaaattctctgcatttagcatagaacattgaattttattacataagtgtttaatgggtccttctgcattaaaaagttgataaagatatagatgttaagctaaaaagcttgaatttattctgagatgttgtttgaggttttatcaatgtgagttcttaattttccattttgtagctcactcataacttcattgaatgtaattgtatgtgtctaataaactctttaaatgctagaggtatttcatttgatatttagcttctgaaagccctttgttataaagggaagtgattttctaaatttggtagcagcttgaaaacaagcaccacaaatgtaaaactgcatggttctttttttactaatttaatttttttgccaagttatgtgctagcaaaatgtttgaaattgctattctttttctgttagcttggtatatatgacttagactaagtatatgtatgtgatataatatatgtgtacatgtggctaaactgctaatgggcaaagattgttggttcttctgatgctgagtatacatcaagttcatcccatgattattttttattacgagctattgctgatgtgatgctactcttagctgcaccaccagtataaagcttaactgagaaagaacacccctccctcttagttccgtgccagactggtttgttagctttagttgtttcttagtgctctagccatgtcaccctgtggcactaatcaggacactgtttatattcttcctcttctgtgtccctattcactttgtaattattctattttagctggttatatggtagttaattggtagcctgttttcctttgttttctttacttgtgtcaagctccatgtcgttgttttgtgatgagcagtgatttagaactggccagaccttagaagagtcttcagcaagctgccctagggtaggggcgtattctctgtttgttttgtactggtaccccaggaggatgccttgtaactgctctttggtcatgatagtggtaatgaatccattcatgtaaaatgcaatatgtctgttagtttggggcacccgaggctcagtagaggtttagtatgatgccttccctttcttctttgagttatgaagaaactaatttctggcacagtgtgactgcttcaaacctatgttctgctgctatctcctatagaggagggcagacttttttttcttagtgcatttgctggtaggtcaaggagggatggactttgaattagtgttcagagtcacagatcctacgtatgtgctcttcagtagaggattttctgtgatcctacaatgaagggaaagctatataatttattggtacttcctaaagatagagactaaagtcatggtagtattggccaaattaattttaaaactgaacaagtcatgaattttcatataaatcaaagaactttttccttataaaagcttccatttttgaaaagttggatcagttgtaagacctttcatctttagtattgtatgatataattctacattgaaaaataaacacttggcattaaatgggacttggagtcaaaagatctggttttatggtccatcttttaccaatcatttgctgtggatctctttaaaggtcctggaacctttgagcctcagttacctcacttgtaaattggcaaaaatacctacctcacagggttgttgtgaggattcaatgagctaatgtatgttgaaagcactttgtgaattgtaaagtgctacacaaatgttagttgttgttgctgctgtatctgagatgtcttaattttctttttcttcagaaatagtctaataaacctccagggcttttctgttaaagtatactagttggtaaaatgttgaataaacagtttattacaatatacgtaagtattctataaaatctttcttggggttaactttcaagattttatgtgtatctaaaattcattttaaagactgcaggcacacagtttggaagggctctgcctttgctgctcttcatagaggaagacctcctgaaatgccagtgaattatggttccccaccaaatcttggtaagtaaggttggcctttgagatgcctgaaataattgtttttaaatttctcaacaacctttataaatgctgtattaaaatttaaaaggaaatactggttgaaatgttgttttaatagtaataagtatcaaatgtcaaattattgttaaaataattactaaaaataaaattaataaaaaatctttttatagtaagaagtctatgttactgaatacagaagaatagaattgggaagaaattgtgtcattagggcttcttgaacatagatttttgtgaccctctagaaattgttatttgagtttttcttagatttttccttattggctctcccttaaccattttcattgtttttatttcctagtggagatacatcgaggaaaacaactcacagggtgttccacttttagtacagcatttccaggaactatgtatcagcatataaaaatgcacagaaggattctcggacatctatctgctgtttactgtgtagcatttgataggacaggacatagaatctttacagtgagtaaaaattttaaacttgatttgatgtcatctagagtactttagtgtgcttcagaatcatctaggaaatcttagtttctgtttcccatcctcagagattttgactcagtaggtatggtgtgggtctcacgaatttgtatttttaataagtgcttcagctgaagataggactctgtgctgttttgaaagacagtgatttagagtagtcgttcttaaatgtgatatttaaggatgcttaaaaatagacatacctggccgggcgcggtggctcacgcctgtaatcccagcactttgggcggccgagacaggcggatcacgaggtcaggagatcgagaccatcctggctaacacggtgaaaccccatctctactaaaaatacagaaaaattagccgggtgtggtggtgggcgcctgtagtcccagctactcgggaggctgaggtaggagaatggcgtgaacctgggaggtggagcttgcagtgtgcagaaatcgccccactgctctccagcctgggcgacagagcgagattccgtctcaaaaaaaaaaaaaaaaaaaaaaaaaaaaacatagacatacctaacactttccctctagcacattctag

SEQ ID NO: 102419 - DNA, 1173 bp, Homo sapiens
ggcaacgagcacaacaggagctacgaggagttggtgagcattgggcacgtttgctccccgggttttccgtgcaccgccccccgcccccgccccttcccctcgcggggaccccggcccgtggggtgcaaagtgtgacccgcactggggggcggcccggggatagctgcgttcccggctgaagattttgttttgtttttgaggcggccaggtttgttttggcaggaaacagtcattgggggcggcgcggggcggagcggtgggggcgactcgcggaggtcctgcggcaggggtggggctccaggtgcggccgcctctgcgggggtgtggcgtgcgcagccagccattcaactgggcggtttcattcgcttccccgctccaccgcgcttgtaactcgcgctctgattggcctcgctgctcttgccccgcccgggtctgtccccccacttgttccctaggaatagaatcattggtctctgaaggtggagaaatgttcttgtgttgagctttttattttttgttttgtcagcagcgtcataaaaatcttgcagctgtatgaatatgccactgtagtgcttgtgctcctttctactgtacaatatttgttgaacgcagtagttgattgatgagtttcacactgatcttgtagataacacaataaagtgctttaaataggcacttttcttttgagctcggttaatcttgcattacagtctcatttcttttgtgaacttggttaatgtttctatataacttgcttttatctatagttacagcagttgcagggattcgtttgtttttactggagacatttttcaggaatatatttttgccgtttcgttattaggataaaggaattcattaattgccaggccatattcagcatcttgtataaggaaaacaattgagaaagaaaagagcttctgagtgatcttttaccacagttggaagacctgtaacacttgagtggtagagtatggtggcaagtgaaaagaagaaaaaaaagtggtagaagattactggttttgaattagacaacagaagagaccagaggatgtgttatttccatgaacagttaacacttgaagcctggtgcaagtaataaataattttaatatttgctttcttagattttgaagtaaacactttaacagtggatgttttcaagggaatgag

SEQ ID NO: 102420 - DNA, 1053 bp, Homo sapiens
cccctgcggtcccgcgtagaggacccaggtcccacggggggcggcggtgaatcgccccctcttgtggccgcgcttccgcccccggcacccgcccgctgctgggccacccggcgtcgcgctgccgcctcacaaagcccgggcagccgcctcattgcgcgcagggattcggaccacgcgccctcccctcccccactcgctgctgcggcgcccaggtctttgcctccgcgtcactttctcctcatcgagtccccggaggcagagagctgagcgaggttcgcctccccgggcgggacacgagctccggtcctctcttggcgcaaacccccgccccccgcggagggactacttttcgtctcccgcggaggaactacttcctcccccgcggaggcgtcggtccaggcggcgcgcacggtatggcggcggcggcggcggcggcggcgcgcgcctgagaagaggggacgccagcccggtcaggcctcggcgcggcctacacgctccgctcgctcgctcgctcccgcctcccgccccgcgcccggccatggcggagccgtcgtccgcccgacgcccggtgcctctcatcgagtcgggtaagacgcgaggccgtgccacccccgccctggcgctcccggctgcttcggcttccccggctccccgggctcccccggctcccctggccccgtccccctcccctccccgccggggcttgacctgactccttgtcttcccgcagagctgtacttccttatcgcccggtacctatcggcgggcccgtgtcggagagcggcccaggtgagtgcgggcccgcgggcggctgcggacttggcgtccccagtgtccccgccgccgggggtcgcgggtggtgggcgggggtgaaacgggagcgccccgggcccgaccccacccctgaccgcgcgtctctcggccgcaggtgctggtgcaggagctggagcagtaccaggtctgtgcgcgcccgtccccgcgctccctcgggttcctcctgccgaccttgccctgagggatgctcgcccgcgccccccgcccgccgcccgccgc

SEQ ID NO: 102421 - DNA, 1064 bp, Homo sapiens
cccaagcactttgggaggccgaggcaggcggatcacgaggtcaggaaatcaagaccatcctggccaacatagtgaaacccccgtctctactaaaaataaaaaaattagccaggtgtggcagtgcgcgcctctagtcccagctacttgagaggctgaggcaggagaatcgcttgaaccccggaggcggaggctgcagtgaaccgagatcgcgccactgcactccagcctgggcgacaaggcgagactccgtctccaaaaaaaaaaagctatttgtgaggtaacaatctaaatatgtttgagctagtgcaacagtaagttaactccttacatctgttaattcagcaagcactaacaagtgatggagattaaaaaaaaaaaaggaatgagccacagctttgccatcaaagacttcagcgtctcttaggggaaacagatgtaagcaaataatgacacgatttagggcagagatatatcagaagatcagcttgcctgtgcgtgggggaaatgttagggaagtttgggttatccaggctacaatgtgtggaaagggatttcgcacatacaaacaacagagggccaagacatgaatatgatttctagtttaaggaaccagaagtttagtatgactacttggggtgactttggagaggatgggaccatgatgtcagaagttgaaattgggagcaattgaaagattctaagccaggaaggaatcattttctattttaggatggatttgagaaagttaagaccaagaggcacttaacatacccctgaaatagaaaagaaatgatgcatgagggcgttggtcataaggatagagaagagacaagatcagaagtatgtaggacagtaaatctgcaagatgaagttggggtgaaataaaaaccacaaaaatctcgtttggggctttccaaggttgtgccaacaaataaggtagggcatacaggctggtagctagattgttaagatgagtaactgcttgcaacaacttgattatttgaagttacagtgcatagatgactgtgggacagtgatctgatgctgcaagattaccagtgtta

SEQ ID NO: 102422 - DNA, 1506 bp, Homo sapiens
ttagagctgaaacaagaagacagagtgacctcagcttggagtgtacatgtgatgcaactcaacattttttcctgctctgtagatgcatgcacatgaccatggaagggctgcaagtattgatttggggtgagggggtggttaacaaaagttttttaacaagagtaggtaggtgactttacaaataacaaaggttattgacttttttaaagacctgatagttgcatataaataaaacgacaacgtgttaaatgctaaagatctcaatttcctttcttttgcagagtccagcctctgatgaagcaggagagaaagaagccaagtctgattaataaccatataccatgtcttatcagtggtccctgtctcccttcttgtacaatccagaggaatatttttatcaactattttgtaaatgcaagttttttagtagctctagaaacatttttaagaaggagggaatcccacctcatcccattttttaagtgtaaatgcttttttttaagaggtgaaatcatttgctggttgtttattttttggtacaaccagaaaatagtgtgggatattgaattatgggaggctctgactgtctcgggtgtcagcttaacattccacagatggggggttagtttttatatcctataatacaaagcatattaaatggcaatatggagtcagtcctgcatttaatgtcttgaacattttaaattacttctattaccatgttgttttttagtagaattgtttcctaaagaaaaccactctttgatcatggctctctctgccagaattgtgtgcactctgtaacatctttgtggtagtcctgttttcctaataactttgttactgtgctgtgaaagattacagatttgaacatgtagtgtacgtgctgttgagttgtgaactggtgggccgtatgtaacagctgaccaacgtgaagatactggtacttgatagcctcttaaggaaaatttgcttccaaattttaagctggaaagtcactggaataactttaaaaaagaattacaatacatggctttttagaatttcgttacgtatgttaagatttgtgtacaaattgaaatgtctgtactgatcctcaaccaataaaatctcagttatgaaaatattttgaagcacatggattaaattctggtttaaattttatttacagaatttccacatttgagcctggccaacatggtgaaaccctgtccctactaaaaatgcaaaaaaaaattagccaggtgtggtggcaggtgcctgtaatcccagctactcgggaggctgagccaggagaatcgcttgaacctgggaggtggaggttgcagcgcacccagatcgcactactgcactccagcctgggcaacagagtgagaccctgtctcaaaaaaaaaaattccatatttgatcttccaaagttgttttttttaagtgaaatgtttgaatttttgtttaatacagtcatgggtcaccactgactggatacagtctaagaaacacattgtt

SEQ ID NO: 102423 - DNA, 1032 bp, Homo sapiens
aaaatttaaaccagaatttaatccatgtgcttcaaaatattttcataactgagattttattggttgaggatcagtacagacatttcaatttgtacacaaatcttaacatacgtaacgaaattctaaaaagccatgtattgtaattcttttttaaagttattccagtgactttccagcttaaaatttggaagcaaattttccttaagaggctatcaagtaccagtatcttcacgttggtcagctgttacatacggcccaccagttcacaactcaacagcacgtacactacatgttcaaatctgtaatctttcacagcacagtaacaaagttattaggaaaacaggactaccacaaagatgttacagagtgcacacaattctggcagagagagccatgatcaaagagtggttttctttaggaaacaattctactaaaaaacaacatggtaatagaagtaatttaaaatgttcaagacattaaatgcaggactgactccatattgccatttaatatgctttgtattataggatataaaaactaaccccccatctgtggaatgttaagctgacacccgagacagtcagagcctcccataattcaatatcccacactattttctggttgtaccaaaaaataaacaaccagcaaatgatttcacctcttaaaaaaaagcatttacacttaaaaaatgggatgaggtgggattccctccttcttaaaaatgtttctagagctactaaaaaacttgcatttacaaaatagttgataaaaatattcctctggattgtacaagaagggagacagggaccactgataagacatggtatatggttattaatcagacttggcttctttctctcctgcttcatcagaggctggactctgcaaaagaaaggaaattgagatctttagcatttaacacgttgtcgttttatttatatgcaactatcaggtctttaaaaaagtcaataacctttgttatttgtaaagtcacctacctactcttgttaaaaaacttttgttaaccacccc

SEQ ID NO: 102424 - DNA, 1088 bp, Homo sapiens
cttctcagtattgatggatggtatctaaaagtatttttatgtttctttaacatggcttaaattttgaacttaatgtatcaagttagtatggtcatattaatacctgtgcttttcagattcttcaaacacctaaatgaaagtgataaattcaaaactgatccttttagttcctcattatatgatatgaagggattaactgtagcaggatagtcaacctgaccgtacggcatggtgctttttttcaggtgattggtcttaatgtgagggttaaggtcttgtgaggacagtattgttgaagttcacaacaaatttggggatgggtgggaatacggtcgacgagactcctccggtattcaacttcatgacattgtcctgtcatgtggaactgtagggaatagtggatgatggcgacagtggtgaaatatagctcgggctttaggatttgtcatatgtctaatgaggcttgacatgcaagtactattaaaatctccttagcatacattgttttcctgattactgggggggaccttaagttgtctcatgtaataggtgtatcaactgatgtgtgatagacattaatatgacagctgttatggatacagtctatacaaaatgagatcctttcataagcttgaagattggggtttcacgctcatgtgtgagatgtccctctctcaaaccttactatgaagtcagcaccactgggcacattacttgtctgacatgaaggggaaaaagtaaaacaaaatgtaaataaggagtaaagcatgtacttaaaatatattcttattctatcataggataaatcttcagacaaaaaagtgcaaacaaaagggaaaaggggagcaaagggaaaacaggccgaagtggctaaccaagaaactaaagaagacttacctgcggaaaacggggaaacgaagactgaggaggtcagaagtgtgtgtgtgtgtgtgtgtgtgtgtgtgattgctttgactctgaacagtagatactaaattgtacattttttgtagcagataacagtattcattataatattgaacaaagttttgtacggtatcccaaagtgattggacaaatggttttct

SEQ ID NO: 102425 - DNA, 1050 bp, Homo sapiens
tacctgctactataaaaacggtagttttctatttatggaagagtttttcttaaacttatctagaattaaaagttaatttaaagaaagtactaattatgacaaaagcagggagtcgttagcacttgaaaccagagtttggtactatgagaaggtttttaattttaaaaagaaggaaaaaaagaaacacggacgtcagaaaactggttcagtagggatgggtgctagaaggctacggaaccgccgaaggcccaggagaaacccggaacgtgttaaccgctccaactggagccggacgaaaaaacggccccgcctcccgcgagggcgacgcagttcgcaggcgcgtcggcgcgcctgttctggggcgcttggcttcaccgcgcaggcgcggtcgccgctgttgttgtggtccccatggagctgccgtagcggacccagcacagccaggagcgtccgggatgagctcagccgcggccgaccactgggcgtggttgctggtgctcagcttcgtgtttggatgcaatgttcttaggatcctcctcccgtccttctcatccttcgtaagtggctgcctggcctcccaagggccggtggggatgccgccccagtcccccggcgggtctggcgtaggtacaggggtctcaactgggcgactgaaggccgtagtagcgtcttggttggtccgtaagcttttttgagatagttgttagcgtctaaaaggtacgacgctttaccccaaaatcagactttctgggttctagggggttgggagaaacaccgggcaaccctggactcttctggctgtgggtggcggcggcgaacctcacactgggagttcctagtgccccgctgtcagcctcgtttccgttaatcctggttcctagaggcattcgagcagccctcggccagggtttcccagaggcctggcgggcgaagtcagctgttccaggtcccggagagatggatcctcgcgtccaggagcccacattcttggggtgggtagggtgggagacaggtgtagagagaatctcagtacagcgtgatgccttcagt

SEQ ID NO: 102426 - DNA, 1028 bp, Homo sapiens
tacaagagctgcggcagtcccgggacagccagtgagagaaagggacatttacctagggctgtctgccacccgggggttggggtatggagtgtatgtgggagtttaaggactttgtcatggtggggctagtttgtaggtgtttctcagcaggatgaatctcccagtgttctccagcaacagcctttgctctttatcagtcctgggaacgttcacggccgcagtttgcattcagtcctgcagggacgcacacaactggctgggtcacagagtggtcagggcatagacagaaagtagcgggggactggggaaccctcctgtgacccgtgttggaaggtgctgatccccgttgtccgccctgccagatgtccagggtgctgcagaaggacgcggagcaggagtcacagatgagagcggagatccaggacatgaagcaggagctctccacagtcaacatgatggacgagtttgccagatatgccaggctggaaagaaagatcaacaagatgacggataagctcaaaacccatggtactgtgtcccttgcagcctggaggcttcatgagagcggatgaatagagaagtctgtatgtgaagattagtagaatacatactttgcttcttggatgttctgaatattgatggaaacttaagttatctggaggaaactcagtaataagtattactttcctcttatttgctggtgaacctttgctttctaagcacagaaatatctaagatcctctcagattttcctcagagccaactctttaaaattttaagctaactcttaaaaattgtaggttttcatttttaaattcatcacttttctgagagaagcccagaaaaaaagtctcacagtggattcccagaggcttttgttccactctctagaaaaatgcccagcagtgtcctcttctgagtgtcacctcccgggtccagtgtcctgtgatgaagagcgctttctcagggcagcccgtgtgctgagggaccccggtcacagtgtgtgcacagtcagagagctgtctctg

SEQ ID NO: 102427 - DNA, 1885 bp, Homo sapiens
agtgagccgagatcgcaccattgcactccagcctgggggacagagcgagactccgtctcaaaaaaaaaaaaaaaaaaagaaagtgacaaatttgaacctatgaaacataaacttcacttcagcccagcactgctcaaaaagaatggaaatactctctttgctgtgagttaaagacagcagagacagatgggggcagcactgctggtatgcgctctcatggtgaatgtctttgttttcaggtggtgttggaattacctgttggattttagtctgtaacaaagttgtcgctattgtgcttcatccgttcagctgaacaggaggatggatacagccgcgaggctaaaaaacggatttcctcttcctagcttaaaatctgatttacactgttttgttttttaagaaacaaaagtgcatagtttagattttttttttgttgaatatgtttgttcttggactttatgagagagtcttataagaatcacgattttctacacctgtcattgagccaagaaagtccagtttatgacacgtatgtactagtgaacaccgtcctcgatctgtacgaaatgtgaaatgtttagggacatctccatgctgtcacttgtgatttgccctcttatgtattttggtcatattgccaactggaaagtcaaaattttctaacaactttaagtaagttctttgaagacttagtgctgtttttaatccagtttagaaagtaacttaattttaataccactactaaaaattcgaaaatttcttctttaatcacattcaatatggttaaaagaacaacactaattgacattgcgtgggctttttctccctttgtttaaaatgtcatttgttgagcaagagttgtatagtattatctacttacttgaggctgttaatttttcattacagtgttttgtaaatgtatccacgagaccatgatgcattgttttgtgctcaacttgtgttttgtatttaaagcattttgaatgaagtgtattttataagcatttaatatttatgctctttagaatggaacacagaaaacaaaccttataagtcctgattaatctgaaccaataacctgtgtggcctacaaagtataattctattaaatgttccttaaaacacttttttctaattaaaatctttgcaaatgcttgtgtaacttcctgccttacagctacttgtttgctgtgagccacccgcaactgacaagtggctgttaactgagtcaccatatcccagtaaagctgaattttctcactagtttctgcaagttcatatttgtactcttttgtttcctaatgatctaataagtagtttgttgttattttagctgattggactgtgagaagacaaagtgctgtggtcctttatttattgtcatgctgaaggccaccacagcagcttttgggttccacttactcaaacacacatgcacgcaggcttacccagcaccaagtttacttagctttaagaaaggacagagcagggaacgcagccacagcctggtggaggaactggacaccagcttccagtgtccgtcaccacacgggatacattttgcccacaaaggatgagaagccaacctggggaggagatgagagtagcacacggaagctgcaggaactagtccttcagacgaaatatagcaccaagggggcacgtgcctaactcccgttttagtaagctgcaggcagaaatgatggtggacagtcaacagtgcaccggccatgtagagcgtgcccagggaactgctgggatcactcatccgcatacagtgtccatgatgatacccgtatctcttaaagatattctcattcagttgttacaagaattttgacaaatctcactgaggctagaggtaaaaatttctggttcacagcta

SEQ ID NO: 102428 - DNA, 1035 bp, Homo sapiens
atgaatacaatattacctaaaaggcccaataatatcactttggtatacaagagtgaaaattgaggttgctcattattttctgtagatcacatattaatttcatgtgaaaaaaatttattggaaaatagggaattttaacaacagaagaaataactgagattaaaacgtggaggaaacgaacctgatatttacttacttcaagatcatagaaaatactcgtgtttcagcatcaaatattacagaattaaatcctaaattaattccatttatgtttatgtctatacagactcaaactagctaatgtaagatatgcaggagaattcttaatatgatatcaatgccttctcccaagtcatcccttataatgtaatccccaggcttttgacaaccaagtgctgttgaggaaaatcaatccagtcatctctttaattattttaattccttttccttccctactacccaggaacattatctgggaaaagctgctattttgaaaataactacaaatgtctgtgtggtaattcctggccaaaatggtgagggagaatacaaaggccctgaacggatgcactgagtaggtttttagggaagtagccttttaatcaacagtttaaggtagagggttgacttcaaagagaggtttcacgtaacacaatgcaatcttttcagcacagggaaaaagtcccttagcactgtagctgtgctctcttagagaatggtcatttccagataaaccagtccagccacagagtgaactcttgtgcactgcaacagatgaacatttctagtttgagctgcttctgtttttccttcaaaccactccctttctgtgccctctattagacaacataattatttagtgcagcacgccaagtgaagcagttagtaatgctttgttacagagggggcgcatccatgattaattcacaccctctctctattaactttggaatcttaaactgtctgggcccctgaaatacagacctgtatttttttgtcatttgcgtccatttttgttgtgataatagataattt

SEQ ID NO: 102429 - DNA, 1051 bp, Homo sapiens
cttttcctgggatttcctaagtagttgccttaaattttttacttcattctgatgtttagccataatttgaggtagattattttgtgaattctcatattttcctatagctttcaaatgcctaagctgaagttgtttcaaaaattggttttctgtaaggatggcttccaatttatgatgcatatcagctaattcattttttagtcctttaattttatgaagccttgctgagagtattcgatgagccatagcatctcttctttgggcaatcatatggatttgagaattaaagagtgatgcattccaggtgtgctttttttcaactgatatttccttctggcctgtgtaagcagaaaatccagtttattactagtaaaatatacagatatgcaaatatgcacatatgcataatctctctcccatgcccccatgcacacacaccacacacatacacacaagcgtaagtgtaactagaaggggacaaaactatcatttaatgaatacccatgctttaggctaggtactttatatataactacctcatttaatacaattctttaagatcagttgtaatatattttatagctggagattttacatcatttgtccaagattacatagccacgaagtgacacagaatggattgaaaaccaggtcttctttgactctaaaatctgtacttagatttctattataacagctagactaaaagctgtgataataggccaggtgcagtggctcatgtctgtaatctctacactttgggaggctgcagtgggaggactgcttgaggacaagagtttgagaccagcctgatcaacagagttaagatcccatctctaaaaaacaatttttttaaatgtttatttttatttttttttgagatggagtctccctccattgcccaggctggagtgtagtggtgcaaccttggctcactgcaacctctgcatcccgggttcaagcgattctcctgcctcagcctcccgagtagctgggattacacgtgtctgccactatgccctgctaatttttgtatttttagtagagacgg

SEQ ID NO: 102430 - DNA, 1082 bp, Homo sapiens
cttacaaaagtatattcatgaagaagagggctttgtttccagaaagtaggtaaaaatgattatttttatttgtatgctcagattttaaaaggagactcaaaaattctgaaggatatgcaggctcaaaataatgttagtctagatagtcaatgtctctttctacatgattaaaatgtatataactattatttaagtggtctccctggcttctgaagattcttggtcagtcatatgccatgcctgatgatggcagcaggtggaaggagaccccagaggcaagcagtagatttcattgggcagtgaggggattggacatcaagggtagtcctcagtgccttcctgcccctgccagtttgaacttctgctactctatgcagagcaaatgaagatattatcctgagagccagggcagacaactgttagattgagaaaggagacaccacactggaagccaggcacagttgaggccaggctccccgcctgacagaggaatgtgaactggaaagagcagacacatctcttgatgacaagttggcatctgtgcattttagcccaggtaagggccggagtgcctgcctgggaccaagatagcctgggcctgactgaacacaaacaaagaagacctagatcgttcagcacagaggtgcccatttagcagaggtatgagtgtctccgggtactcagggctgtaaggaaacacaggatgcaaacccagttagggtggggagagggcttctcaacatatcgatgttactgaacaaactatgttatgttcctaaaatttattctgaaatatgccgtatgtgataagaaatacataatttaaaaaggagtgatacagtgagcaaccattgtatgcactatccagtttaagaaggacagtatactattaccagaaatgtggaagccctctgtgtgcctctctccctgatcccatcccttcccctctgcaccagtgatagtcattggaaagaaagggtcttgctttgtcacccaggctggagtgcagtggcacgatcatggctcactgcagcctcaacctcctgtactcgatcgatcctcttgcctcagcctcctgaata

SEQ ID NO: 102431 - DNA, 1007 bp, Homo sapiens
atgaaacggcatggcaatttctgctgagggctcacttactcaagtttcatttttctggtgcctttcctttattttgctcgagattctcatgcagcagtttcttgaataaatttcattttgaagaaatatctcttgaagcatggtttacctgagtgttttgccagggaaaatcaagaaccctgctttgctgaacaagttgtgtcccttttgctttttcagttcctgcgatgataacatcctatccaaatactaccctggccacgcaggggcagaaaaaggagatgagctgcacggcgcatggtgagaagcccattatagtccgctgggagaaggaggaccgaatcattaaccctgagatggcccgttatcttgtgtccaccaaggaggtgggagaagaggtgatttctactctgcaggtaaaagcatggcaaatacaacacaatggaatgaactttattggaagaataagtctttcctttcacagaagcgggtgcagataagtagcagataatctttcggaatttatttacgaagcactatttctctcccctttcacacagcgagattagtgaagtagccttcaaaaatagtgcttcagcctaagtgttattaagaatagggttattatgaacgcagcagggaacccaaatgtagtaaaaaaaaaaaaaaaaagtgagaaataaggtttttaaatgacagttaatccttcaggaatgatggcctatgctgtgtgcatgttttaacttcctgcaaaaagaaaaatgagatgggctttgggacaaaaatattatcataaaaactatcttgcttctttggaaaaatccacaataaaaaaaaaatctgtcgttaaaagaggatcacaaaagctagagaaaaggactgtgagcagtgaactggtttgtgctgttgtcatgcggttggaggatgatactgtagcacacacagggtggggaggtggggaagccctgtgtttgaaatgcttatattggctctcagacaagggtcca

SEQ ID NO: 102432 - DNA, 1025 bp, Homo sapiens
ggtccatttcactttttctttttcttgcagtttgaaaggcacttgaactagcccactaatgttgctttttactccttttacattttaaaaggagtcgtaccctggtttatttgcttttattgcctgtgaaaatggcctgagtaattagaccaacagagaattgcatcttaagggctaattattgatatattccttgtgtcagctcaaaagtaacctctggggatagaagattaggcagagtatgcctgcccatgaatatacactgttcatgcctctctaggcttcaacacacacaaggtcatgtaaggcaaccttacctaccccattagggtccagaaagatatccacctaggagagagtgtaaatatcacacccatcaactcactcttatgcccagtggctcatcctttcaaacatgcaaaactttctataatggggaatctgaaatactttaacaagtttaaaaatctttattgagcacagattttgatttttaaaaaatatttttgatagacatactatggttcaagtcccatacttgcattaaagggttaaggtggaacaatgcttcatgcacagttagcatttcatattttttgtccagtgaagaaaagaaaacattctcaactttgatctcctttagtttaaaatgagataagataagatacactccagcatcatgctcttacttaaactgagctgattctcttgatttctatttcttgctttcctcgccattggcctgaaatgagtaggcatgacaatttttgtccatatgttgtatgtaattaaactccagcctttacattgccaccatcaaagacagcgaggaagagacattttattattgcaattcactgtcttaaggtggaagcttctgcaacggtgacacagaagcgtgatggagaaggcacaaaaatgatccatcttgctcttttaagagaggagaacataccggacttgtgcagacagaacttttttttttttttctattgaagcatcttctagtgcatttaagctttttt

SEQ ID NO: 102433 - DNA, 1052 bp, Homo sapiens
gatgtggagatacataaaacaccatcctggaaaaaaacaataacaccggctttatatttgggtttcccttcacaagcctgttgtgaatttcctcccgattagggaggccagcagtaagagagcccagccttccgtttctgtttcttctgataaaattgtgagaatctcaccaggggtttagctacattaacatcaaagacacagcccaggggtaaccggatttggaaaatggaaaaagcaaacattttactattcccagagaaactgcctccctctttagcagtggcccaattttctgctgtaatatttcctatctgaatacctctattagtgatgattcaaggagaattttacctcttaggatcattgagttcaggtcgaaggatgattatcttctttctgtattttggctaaacgtgaacaattttctgcccacatgaaatatcaaaggacataaaccaaccactttacatgaaacattggctgtaattcttcactgccacaactgggtctgggcatcatagatcacgcaagacttgggctttaagaagcactccctccccaggcccctgcagagatggtttctgctgttgagatgcttggggagattcctgcactgtccctcttggggtgttaagtgctgcagtaggcgcttagggcctgaggctgtagctacacacacggttttgcctggggaagtagagaaggtttcagaaaggaggttgtgatttaagaaaacctttgcattttagagaggggaaaagagattataggtacagccaaccaaattagacaaggctgcccttaagcacgtttcagcaaaccagaactaagagcagattggatgccgtattctcatgtggggagggagggagagctagcacagctgtcggggggacctgagggtcatgctgtggggggcctctgctttgtgcactcttgactatagaagttaaccttccctttctgtggcacttctattgtgattttattgctcctcactgagcattttccagacatctgctatgctgtggctgctatcttgcggagac

SEQ ID NO: 102434 - DNA, 1071 bp, Homo sapiens
taggcttcattgaatatttgtatagaaatctgggtagaaaaatgtggacctcgaggtgatctaggtatttgttttgggcaaggaactctcatcagtggttggtttatttgtgtcttgggggatctcacatcatcagcctttattaatcacaggcacgaggggccccacactctcccccatacctctaccgccccattgctgaggatgggagagtaagaatatagaatatgctgtaggcttctgtgggattagatgcttggaggcagcggaggcaaatgttcatgggaacactgaatatggaggaagaggctgtgccagccccatagccacacatcccctccacccttacatcaggataagaggtagaccacagtctgttgacacttcaagctgaacattagttagtatccttctatgtgggccttcccaggtaaggatcgaggacactggttctcaacaccccggtgttctgggtcagggagaacagagaaaggagatatggaagtttcctgaaatgcatttcctctcattagcctcctgttggaaattctgatgccagcgttgtggggaatgggctgtagtttggaaagctccccaggtgtttctaatcccatgtgactttgtcttgtttttcccaccaccactggggtctcccaagttatggtttccatgtttgttatgtcgtcttccagctctgataccagagagtctgattctgtagccttggtgtatgcacgacctgtgaatttgcattattaacgcatgcctttgcctgttctgatccacatgaaccataattcacctttgcaaaacacacacttgcaaagaagctacccaaacagtagctaggaagttgatccagtaaagttccaagtacatctcgatgaactgttggagaactctgtattgggtagtaatttattgggaatgtctgtatacagggttaggtcttcactgaccaccataagaatttgggcatctttcgggataattggtgctggggtttagtaacaagaaagattctgagtagaggggtatgtagatcctgccagaggcactcccaatgtggat

SEQ ID NO: 102435 - DNA, 1011 bp, Homo sapiens
ttacatcatctgaaatgttgacaaattaaaaaaaaaaaaacacctgtatagttgtaaaaatgaaatcagtgaatattgtaaatagcatacatttcctcatgcccagccaatattatattttgaaatgatttcttcctgggtatttagaaagctattgctcttgactgagtcagacccaattagtaagtgtgactgcaccttaggctgcctgtcaccgcataaatatgaacttacatgtatgaatggcttcctctcttgtgggaaccagaggaaattgtcatcatttgacatcgcctgggagtagctacggcttaaattcccatttcaaattttggaacacacatctgcataaaatgtataacctactgacagttgaaattaaaccattaagcagaatcccctagccagaagagaggagagagagagagagaaagagaggagggagagagagcgagacagacacagagacagagagagagagagagagagagagagagaggagaagaagagaaggtaaaagaagagaagagaggaaatctggcccttgtgagaaaatacgagaagcaaaggggaggctctaagattttcctggaagacacacagggaagctctgtgtgttggctgcaaggcagtgcattttctttgcctacctagacagtgcctaaagaatcagcataccaacaggccagaagaaatgcatgagcattgtcaattttttaaaaaaacggtgactaagaaaaggtagagttgaaagaaggtactatcaaaatgaacatgaaaatgatactttgctctccagtataacctaaagcaaagtgtttgaaactttcattttgagatttcctagcaggaaagaattgcaacaagttctgacaagacacccatctttcccagagggcaccatacctgtcctgtgtcctcctgggaatttcccttcagggacagatgtgcttagggaacatgcggagatgtgtcggggaagtcagccctttctgctcttctgctaatgcg

SEQ ID NO: 102436 - DNA, 1044 bp, Homo sapiens
ataattttctgacttaaacatggctttcctgctcatccctgtggattatctgatggatatgacaatcctcgccatcagatatagaagcccctaaaagagaaaggaaagaagctgagttacggggcctgaaagcaagcctgtgcaggtccccaggccccgggatgggggtccggcccatctgtggctcaagcctcctgggaagctctgaccctcagccagggctagaaacctgccttagatacaccagggcgcggcccagagggctgttccaggaaacgtgctgtttcactcacgttgggtaacctggtatttacggacttcttacctactttcctgtgactcaggaatttgtgtcttgagggaaactgtatttatttattttttactgtagtccaaaattgaagacattagagcagaacaagagagagaaggtgagaagctgatccgcctccacttccagatggaacagattgtctactgccaggaccaggtatacaggggtgcattgcagaaggtcagagagaaggagctggaagaagaaaagaagaagaaatcctgggattttggggctttccagtccagctcggcaacagactcttccatggaggagatctttcagcacctgatggcctatcaccaggtacgtcttcgcgtggttcaggatgccagcttccattctttccttttcttctgaacgcctctctctttagtcttgctctctctgtaggtgacgttggtcagctctgtcgtttacctccttgttagcctcctgtattagtccattttcatgctgctgataaagacatacctgagactgggcaatttacaaaagaaagaggtttaacggacttacagttccacatggctggggaggccttctaccatcacggcagaaggcaatgggcacttcttacctggcggcggtggcaagagagagaatgagagccaagtgaaaggggtttccccttatcaaaccatcagatctcatgagagttactcactaccatgagaacagtattggagaaactgcccccatgattcagt

SEQ ID NO: 102437 - DNA, 1132 bp, Homo sapiens
gcaggcaaatcacttgagcctaggagttcaagaccaccctggcaaacagcaaaatcccatctttactaaaaatacaaaaaattagctgagtgtggcacacctgtaatcccagctaccctggaggctgaggcatgagactcacttgaacctgggaggtagaggttgcagtgagctaggatcatgccactgcactccagcctgggcaacagagcgagactctgtttcaaaaaagaaaaacaaacaaaaaaacagattttccagccccaacctggaatgcattctcaaggagtgaggcctgggaaccagcattccagccagcttcctgggtgctttctaccatgtctgtgtttggggctgctgatctcgatcctgcatggccagcgtgcgtccgtgggattcagcctcttactctgaacgcattctgagacttttgacccatgatgccaatacagaccattgcactgggattctagtctgtgaaaacacaggctgcaccagggaagtgaccttagaccagaggttggtcagctttctccacgaaggcctagagaggcaacattttaggctttgcaggccgcagggcctctgttgcaaggactcctctcccctttgaagtgcaaaagcagccacagccagtgtttaaatgaatgagtgagactttcttccagtaaaagtttatttatacaaacaaggtggtggcacgctgtgggcaaccatttggcagtttctcaaaatgtgacacatagactgtgaccaagcaattctgctcctaggtatgtatcgaaaagaattgaaagccacgactccaggcgtttgtcccccaatgtgtgcagatgtgcagcattatccacgagagccaaaaggtggaaatggcctgcacccacgaacagatgaacaaaacgcagtacattcgtgcagcagaatattattcagccatgaaaaggaagttttgatatatgttacagtgtgaatagaccctgaaaacatgcttaatgaaataagccagacacagaagggcaaattttatatgcttatgcttatatgaatttgcctagaatgtagaaaagaggttactgaggatggggatgagggaaggagttattggttaatgggtgcagaatttttgttgagg

SEQ ID NO: 102438 - DNA, 1178 bp, Homo sapiens
cccctggcacccaccattctactttctgtctctgtggatttgatgactctagagatgtcttataagtggaatcagacaggatttgtccttatgtgactggcttattctaccccggctcatccatgtgtagcctgtgtcagaatttccttcaacactgagtaatataccatcatgcatatgccccatattttgtgtttccatgcatccattgatggacagttgggttgcttctagctttcgtgacgctgctgtggtaaaatactttgctatttgaatttcagtaaatataacagcttgccctgtgttttagttacgattcttgggtcatttttaccatggagttgagtaagttggtggtcacttctttttggcccttttcggatcacctcttatagttggcaaaagtaatatcagaaatgatgttacctgtttatttatttatactttatcttattgcccagaagagttcaggtggcttaccatcaaaaatacatttaacagggaaaagaagttttgaaaatcaggttcagataatatgtaaaacagagaagagttaagacagagtgacaggagcagaaaacaggtgtggttattctaattgaggcacaaattgacctccaggctttctggtggccagagttagaacagagtcaggtgtgtggctgttgcagctaaagctgcctaatgtcattatatattcaaggtgtccctttcagatgccctggaagctgggagtgacgcccgggcgcattccctcctttctcgcatacaggctcgggattagctgggaagttttggaaggaggccgttttcatgctgcttgtaacctggaacttttttcccacctgtcttttcccaacttattgacgtccctgggcaggttcacccatcatcagaataacaccatcacgctcaagaggagcttaattctctcaagcagacacggcatccggcgcaagctcatcaaacagctcggggagcacaagcgggtttaccagtgcaatatctgcagcaagatcttccagaacagcagcaacctgagcaggcacgtgcgctcgcatggtgagtccgcgaggcccggctggcgcccggggccagggccaggactggggctgggggtgggaggacagcacggagtctcccctccttgggtcgtctcccacgagctgcgccagtga

SEQ ID NO: 102439 - DNA, 1069 bp, Homo sapiens
tgtggctccttctcctggattgctgaacagtgcttggtccatcacctgtgggtgggcactgagttgctcccaggacctgtctagggctcatcctttgattgtgcagtatcctcagttgggtttgaagaggcatttgaccctcttccagggtgtgtggtctctgtaaggctcttgtccctgtggtcctcacacagcccccatccaagccacctgcagcacacgcctcgtgggcctcacagtgaggatgagatctgatgctcagccactggccccttcacatttgttactgacactgggcagtttttctttttactgtctgggatacaccaggatttcttttatgagagtgaaaaggagtccttattgcttctattaattagagacaattgggaagagcagccattgtggaatattctgagcctccccttttctgctgtgggtctgcagcttctaggctgtgcactgttgggcgctgatttaggagcgcctgaaagccccctggccagtttccccaggtctctgtgaataggcagagaagatgggggcgggggaaagcgtgtcaggtagatatttcactaattcttacttgtgttgagaagacatttagtaggcaaagtggtagaaaccagtggttgaatttttttgtgtaatcttcccctatttcatttatcttgggtttctggccagggtctccagtattggcgatgatgtgatctttaactcttatacaaaatggttagctaaaatggttttactaatgttggcacatttaattagaaacattaacatttctaaaactctgtcagaattgatgtagtaagttcgaagtttctgctatatatccaaaatgtttttggttggtatgaagagggattgaagtaatgttatgatgttgtggtttttaaaaagaataacaaattataacttcagtttaggctaagaaaaacattttgcttttctgtttgtactagtaaatgtgtggatcccaaaatattgacagttttttttttcccctctgtaaacctcaacatttgtgcctaccattctggcctggctgtggttcccatgg

SEQ ID NO: 102440 - DNA, 1046 bp, Homo sapiens
ctaggagaagcttaggagaggggagagctctcttcctgcagggaggaagagaccatgacatcagaaaataaggaacaaaaccctcctatagtcatgtggttgatttgaacttcaaaatatgtaagtttttctccctgctgcctgcctgcatttaatccataaagcaatagtgctgtttgatagatggggaggcagctcataaagcctgaggagcccagcaccctgtggcggagctgggagtagaactgtgtcccagttcccagtgggccatctggagagccttaggtgtccccgtgacacgtggactgggagtgaagctcaggtagctcaaagcccacctggaccaggactagaactttggtgtccccatgcccactagaacctgattagaacttgagttccgcacctgggccgtgagtaacactcaggtatcccaatgacacatagaccgctggctgtgtctgctgcttccttttgcctgtgactaacctgacccgtccaaaccacatggtctacctgtgaccctcctcactattgtaaacacctcaacatcccgtacaggagcccttatggcctctgacgtggcactgtctagatgggttcctcagcacctgccccccacacgctgatacacagatgggtaatcagccatttccccggcttctccatgggccgactcaccttcaggtgttccagaaggacgggcaccccgtgtgcttcgacacctccaacgaggatgactgcaactggatgatgctggtgcggccagcggcggaggccgagcaccagaacctgacggcctaccagcacggcagcgacgtgtacttcaccacctccagagacatccccccgggtaccgagctgcgcgtgtggtatgcggccttctatgccaagaagatggacaagcccatgctgaagcaggccggctctggcgtccacggtatgtggcggcccccgatccggagcccaccttcccttgtgcctcgccgaaggggttatggtcccttggctctgtgctgaccccacactgatgagatgggttgggc

SEQ ID NO: 102441 - DNA, 1049 bp, Homo sapiens
tcgttatcccccgccctcgggtacagcccatgcgggtcgcacgggggggtccctggacccccaaccccgcgtttagagaagctgagtcctggtgatggggtctcccagaccccctgcgccttattttcgtaagccttttggtggcagagagaaggtagcgaggtggatggacaggtgacgcgtgcctacccggggtgggtggccgttcggggacggggcgtgcccggccgctcaggtgaggcccgcctcgcgtggacaggtggggacgggggccacgcgcagcgtcctgctagaggggaggtgttcacgcaggggttagccttgagaaaatagaaatgaaaactcatggaaataaacactcctatctggtggttagagttatcacccatttacctttcttaaccccctaatgtagtggatggttttttcccccacaaatgctcagaaattgcccctcacccccaagtccccaaagggagtttaaaacggtagaaacaagtgtgtgatcagagacacgtggacctgtgtgtgtatttaaagctaccaacactcgttttaaaaaaaccacattggcttaagccagactcaagtgaatttggagaacctagcttggttcctgaagggtggtgacatgtgaaggagccactggctttgtgatgtaccttaaaaggtagcagtgacagttctccttggagaatgcaatgatgtcaacactcgataagggtggtgatcccaccccggtgcacacaccactaccgtattttgtttcaagctcggacattttcacgtgttccacgttttcactgcttcactccttccccagatttcctgacatcgctgcctcacggtgaacgattaagaaatagtagctctataatttagactttcaagagcaaaaacaccattttttttatagtttgtttttcttctatctgtgattcatactttttgccgcaaagtagccagcaaagaacaagctaaatgttccattttggaagcaggcgggacggttatttctccagaagacaaataaataaatttaaaaatca

SEQ ID NO: 102442 - DNA, 1025 bp, Homo sapiens
aatcactgggtcctgaaccacttctaactccaaacaagaggcactgccatcaccaccttgtggtgcccaggaaatggagcagaaaacctggaacccagctgggaagcatcgggctccctctaagggtctacacggtgtctagcgagcgggcgggacagctgagaggaggggtgggcagtgtggggacaggaggctgggcctgtccagtagctttctccaggacaccagctctccacgtgctctgctgtctgggcaccgcagggggaatgaagactgagggagaccacgggaactgatgactagaaagaaggcacgatgcctgcatggggcccgcaggacacgtctgtgacccgactcgaccgcctccctcccagaaccaccgtgagccccaggcaagtgccgacgctgttccacctgtggctgagccaggtacctgtcccctctgcatgcacccgggccacccaccggggtggggaatggacagtgaagtccaaggatgacctgatgaaaggggcgctcagagaagaccctgggacttccaggacagaacaggactcgggaaaaacaactcagtgtagtgttctgtgtgcacatttatttctttcaaagattgtttgtgttccagccacatcttctccaaaggaacccacccaagcccgtgtgcaggcttgctgcagggctgtcttcggcgtttaaagtgctactgaggaatacaatcattgtcacgtaagttcatcaccgcactccagcgtcaggccaaacctttccgtggacctggaaaacctgccactttcttctctttttacaatgcagtttcgacataacattggtagagtaaacaacaaaccacaagcctaaatgatgaatggtgcgctgctgcccagctgctaactgagagaacgaggcagtgtattgtgtttcgaatgcaaacggtcatggacccaagttaacctgagtttgctctgcaggattccgcgggggccttgccctgtgcaggctgctttggtcttcgtgtctaggccggt

SEQ ID NO: 102443 - DNA, 1037 bp, Homo sapiens
ttaattactttattcagtaaagttttttaagaatgtttatctcagccagtaggcaaatacttggtgtaaaacaagttggtcttaaattgttgcaactcattagctagtgaagatattcatgtaaatatattttaggattgtaattaattttgaaaatgtagaaagctctttattccatgtaagtatgcaggatgcctgcttttttatgcagttgtggaaagaatgtaaaatgttttaatatattctttgttaatctgagaacttgatactgaatcgtttatgtgggagaaggaaggagtaacataaaacatgtttttatcactcaaagtaagcaatggaggtaacaaatattgtgcattttaacagtaatatttgaagatttgtagaatattcacctttaaaactagttagtatgcatttataattttaccagaatatacaactaacaattcaacagtgatgttctttgcatttgtggggagatgtgtgatgttcttggttttctggtttggaatggaacgtttatagccttgcctgtaaaaatgtgccccagcacttaatgagtgaccgtttgaatccatatgtagtcccattggtgctaatgagagtagctgctgtgaaacaggaataaaatgtgtctgttcacggaggtgcggtgtggatgcacctacaaggccaactctctgatcagggtgagggagagatggaagaattaacagatctaaagttggcctttgttgtctcaaattgggtttgtacacacatgcatgcatgtgtgtatacaactgtaatctggaacttcaggaagtaaaattatttgaagtttcttagtaaaaagtaattaggtataattccaaatagatttctgtataaattgtatctaactggattacaagtcagtttgacaatttacgatgtctcagtgatgtttctgcaataattgtgaaatgcattattgatttaaataatgctgacacgtactctttaaaagtgttctttaacactgactactaaactttaagttttaaaaaataggt

SEQ ID NO: 102444 - DNA, 1597 bp, Homo sapiens
tttgtcacgtgtgcaacaaagcttttcgcactaattttcgactctggagtcacttccaatcgcacatgtctcaggcttcagaggaatcggcacataaggaatctgaggtgtgccctgttcccacaaactctccctctccaccacctctgccaccgccaccaccactgcccaagatccagcctctggagcctgacagccccacaggcctgtccgaaaacccaactccagccacagaaaaactgtttgtgccccaagaatcagacacccttttttaccatgccccacccctttcagcaatcacatttaaaagacagtttatgtgtaaactttgccacaggacattcaagactgcatttagtctttggagtcacgaacaaacacacaattgaaagaccaacactttttacctatgggaggcagtccccagatttcaacctgaattgtgaaatgtgtcataagaaacaaaatattttttaaacaagaataataaaggttggagattgttacgcttgaaattaagttggaggcaaattgataattacttagtaatgtccttaactttagaaatacagcttttaaaatattgtggttctggaccttacaagaacaagatggtttgatttcattaatgttgaaattggattagtcttgattgtgtgcatggttcctcattccatggtgtcagtataatcatttaattgaggtttttggttttttattgattagtggaatactgtcgaagtattccttcttttaattattttagacacttgagttctagttaaatcttaaccatgttcttaagtccaaaataggaagaagtggagtagtttgcagtattgatttatatcttagactactttagcaataaaagataaatctcaactttaataagttatcctgacacttgataaaaataaatatttggtattttgtggtcatgtaaaacttctttttgtatgaaaattgtgagaaatttaaatcagcaatagtaacacttagatttttataaactaacaaaaacttgctctcagtcaatataataaatgatagttaaactctaaggaagacctgggaaatgaaaacaatttatggaagtcccctacagtcagtttataagggcttcagtagtgatagacattgttataaaaacttgtaccatgttacatgtacactgcaccacagtctaaattcagaccagcatttgaaggactgcacatatttcatttcctctgatttatgctgtcacaaattgaaaatctgagtgtagttaggacaaaaaacaaagctaaccatatggcactaattttgattttaacattagtgtaacaaataaggtcgggacatatatttacatagatcccagacactcaagaattagcacagctgatgtaaaattctaaattaccatttacttccagatagagcagaggagaaacacctcactgcagtttcaacatgctttccaagaacaatatatacgacatatacattttcctgcctctctcttgtgacaatttctgttagaatttgttgggggtctgatggttaaaatcatgggcaaggccattctctacatcattgcttaatatttcaa

SEQ ID NO: 102445 - DNA, 1011 bp, Homo sapiens
ggcccacttgttaagagtctcctcagacggtcattgtcgatggatagccaggttcctgtctattcaccttccatagatttgaaatcttcccagggatcatcttcggtgtccagtgatgcaccagggaatgtgttgtgtgctttatctcagaagtcatctttaaaagattgtagtgaaaaaacagccctagatgacaggcctcaagtgctacaaccgcatcgcctcaggtcctttagtgcttctcagtcaacagacagggagggagcttcccctgtgactgaggtgcgcataaagactgagcccagcagcccgctgtcggacccctcggacatcatccgcgtcactgtgggagatgcggcaacaacagcagctgcctcatcttcgtcggtcacaagagacctgtctctgaaaacagaagatgaccaaaaagacatgagcagactcccagcaaaaaggaggttccaagcggaccgaagattgccgtttaagaagttaaaggtgaatgagcacgggtctcctgtgtcagaagataattttgaggaaggctcaagccctactctccttgatgcagattttccagattctgatttgaataaagacgaatttggtgagttggaggggacgagaccaaacaaaaaatttaaatgcaaacattgccttaagatctttagatcaacagcaggtcttcaccgtcatgttaacatgtaccataacccagaaaagccctacgcttgtgacatctgtcacaagaggtttcacaccaacttcaaagtgtggacacactgtcagacccaacacggcatagtgaagaacccatcaccagcctctagttcacatgctgttttggatgaaaaattccaaagaaagctgattgacatagtgagagagagagaaattaagaaggccctgatcattaagttaaggcgcggcaagcctggttttcagggacagagtagctcccaagcacagcaagtcatcaagaggaacttgagatctcgagccaaaggagct

SEQ ID NO: 102446 - DNA, 1001 bp, Homo sapiens
gatatacaaatgcctatattatagttcctgcaattcttctattttaatgaggacctacttaaaccacgagacttattttacattttcaccattatttaaataagattgttcattcatagagcttctgttagcctacggtctgctaaatattggtacctatgcaaagacagctgatgttccctgctcttgaggagccaggggaacttttcactgcaatatctgtagtaattttacattttgtcttttagataaactcaagccatggagggattactgcattacatcaaccctgcacacgccatttctctcctaagtgccctgaatgaggagcgtctcaaaggacagctgtgtgatgtgctgctgattgttggagaccaaaagttccgagctcataaaaacgtcttggctgccagcagcgaatactttcagagtttattcacaaataaggaaaatgagtcacaaactgtatttcagcttgacttctgtgagccagatgcttttgataatgttttaaactacatttattcttcctctctatttgttgagaagagcagccttgctgctgtgcaagaacttggctatagtcttgggatttcctttctgactaacatcgtttctaaaacacctcaagccccctttccaacgtgtcctaatagaaaaaaagtgtttgtagaagatgatgaaaacagttctcaaaagagaagtgtcattgtttgtcaaagtagaaacgaagcgcaaggaaaaactgttagtcaaaatcaacccgatgtaagccatacttcccggccctctcctagcattgcagtcaaggccaataccaataagccacatgtcccaaaaccaatagaaccacttcataatttgtcattaactgaaaagagttggccgaaagatagttctgtggtatatgcaaagtctcttgagcattctggatctttggatgatcctaatagaatcagtttggtgaaaagaaatgcagtgttgccttcaaagcctctgca

SEQ ID NO: 102447 - DNA, 1995 bp, Homo sapiens
ttttcaggcaggtgtgatggctctaaatggaggttataggaaagttaagttttaaatccccaataattttcagggacagtgagtatttctcttacaacttaactttgaatgactttattattgtcccctagtccatagatgttttcatccaaagaagatagaggtctgtgatccaagaaatttgaagcagtgacttagagcagaaatagggatcatgatactttgaataatgcataaagaaggaaacctttctaaacaaaagggacacaaatgttgcttttttggcaacgggatgcatacggtctgtggaataccatttgcttcaggtccagggatgtagaaaactccccttggtttagtcttcacactaaagggccaggacaagcccttggaagggaggttttagtgtgaagtggttagccgttacctgtgcttcgagttctgtttgtgtcttagtttggattcccccaaaagtagaccccaagacaaggattcagaggtagacgtttatttgggaactgatcccaggaagcacaagaaaggaagtagggacagtaaggcggagatggaggctcataaagggtacattgatgaacaggttgctgctcacgtgtaggatatcaaaactgaattctttaaaaaatctgaactcctggtttttctgtcaaaccccatctctcctaaggatgcccttccagttattttggcagaatacttaactccacaccttctgttttctcctgcagtctgtccactagaaattctaatgactctgcctttacctccgttgctaccaccctggtcccagccaccatcctctctcatctgggtcattacagtggactgcaagctggcccgcagcttcccccataacctaccctctgttgtctaatctcaacaacagagccagagcaatcctttggaaatgtaattcaggtctttgtcattcctctgctcagaatcttcaatggctgtccatttcatccatagtaaaaaataaagttcttctggaggtctcccagccctagacggtcttacttcttattgcctctcagatgtcatcttacatggctcccagcacacactgctccatccctcctgttgccttagcttctccctttgttgtgatgttcttcctccatttatctccatggctcatccctcgcctccttcacaccttctttgatcccattttgatgaatgaatgacatgagaagtttctggtatagtttgtagtgtaggttcctgtacagttaggtgctatataaatggtagcgactattattatcttatttaattcccacaatagcattatgtggtagctgctagtattatccttattttatggcgaggtaaactgaggctcaaagaggttggttagcctagaacagtggctctcaaaatattttgactgacccacaggaaggaatacattttacatctcaatccagtccatgcttgcttatgtgggtatgtacatatatataatagaaacaaaagtttctcaagctcataattagccttatgacatttgatgcattctgatattttctactctgtcctagtcatttattttttaattgctagttttaaaccaccaagttgagtttaagaaccccttttgacaaagactatccaagcctttaaatctgtacctttaattctgtgttacagcttttccctgtggcaacatctgaactagctttgtcaaaaattattagtgctaaaaactcctcagtacccagctgagtcaatacgtgtaacattataagcttatgtctttttctgctgatctctgtaaaagatggtaagggtttcttcatacaaatagatgtaaagaaagtatagtaggattaaggaaaatttaaatgactaagagaagaaaaaggaagggaaattatcaagtagtcacaaatagaataattttttaaaaaaatagaggaattaaaatttaccatttactttgaaaggatggtaggcgggagtggacagaaa

SEQ ID NO: 102448 - DNA, 2352 bp, Homo sapiens
ccacatgggaagtgctgaacgtactggggctttcaaacatgttgcctcttctgtccttcataaaaatcctatgtggtgggtagtgttagccatgtttaacaggtaaggaaactagtcagaaaggttgagtcatctttagaaggttccatgcctaataggtggcggagccaggatttgagacaaatagactgattcgaaaggcttttccatggaactgtaaggtcttctgtgaattgttaaccataaagattctctcattttgaaatttcagaagacatgaagtagaaacaatccaggaaggctttgggaagctatttgtgtgcgaggatcaaagtggtaagcaagccggccctattttagaaactggttttcctggggggttttcctcttagttttttctgttgctcgtaaatagaccttttctccaaatttcacccactggtcttttaagagctccaaggtttttccaccatgactgaagtggcagaagttctgccgtgatgagtcaggtggagatgagccgtggaaaggaggggcgtagacggtggtggcagcagtgcgtgtttatgtgtaagatgcactgcttctgtaagtcggaggccctgattactcataatgaaaacctgcatggaaatttggagtgatgtgccagcaaacttatcggtctagatctgaaaaatacactgaggagaaagtacacccggcaacaaagctcgccttatctgacagcagaagagcagagaaatcaaaagtttttgaggattcggtgtacacagccaccagccacaaacagtcttgctggattatctcgtgatcgtcagcagttgtgattttccccctttttacttacattcttgatggatggagcattttatatttttaggtaattgttaaactcaaatatactgactgtcattaaaacacaaaaattcaatatgttaattgtctgtctgcagccagactaggaaagggtacattgttttcaaaacttaataattgaattaaaatgtaaaaaaaacaagggccttaatgtgaaggtgagggatctgcatctcctagctacccctgtctcctatctagacatctagagtctctagatcctggggtactggggagaatggacaatgttgctttcctgtgcaagatcctcagatgacatattttagcccccagggcgctcatgcctccatcttcctccagcctcatgggcatttcctcccctatgtgtacctttacctttcaccaggcaaagccacctgtggttcccttggattcctcctgctctgtcttgtctctgtagtgttgcatgtactgcagcccagccagctgatgtgaatcttgccctgctacttattatctgtctgacattgagcatgttacttaaccctctgtgcctcggttttctcatctgtagaatggagataataatagtacctaactcctagggttgatgtcaatattgagttaatacattaaaagtgttttcttttgtgtgtgtggcagaataagcacccaaattatagctgttattgagtacctagttactgttctactgaaaggaatggaaaataaatactcgtccctcgaaatgtccttcatccttcctatctcttcccagcattccctataaaactttcttcgtagaacgcccttcctggcctccatctcacctggctctgatgcctgtcatctatactgcgtctctacctctgcaaacatcctgtctgctgctcagcatactggactaggctgatgaattgacctgttctcttcctgcacaagaccttaagctccatgaggcagggccatacttgttaaattgatatcttccatgtctagaagggttctagcacacactagacagatgctagccataagtctataattgtctgggtgaccttaggcaaatgacttgacctctcaatgcctcagttttctcatttgtttgtaaaaaggattgatgacactgtctagttcagaagatgatacgagaattggaagaggaaactagaggcagtgtcgtgtaggggttaagagcttagcctctggatccaagccagctgatgtgaatcctgctctgctacttatctctatgacgttgagcatgttacttgaccgtctgtgcctcagttttctcatctgtaaaatggggataataatagtacctacctcctatggttgatgtaaatattgagttaatacataaaaataacttctttatttttgtgtatgtgacagaataaacacccaaattttagctgttattaagtacctagttactgttctactgaatggaatggaaaataaatactctataaagttattctgcacttgtgtatcaggaatttggac

SEQ ID NO: 102449 - DNA, 1015 bp, Homo sapiens
agcggctcctgcttttccatcccagcacaccgctgggggctcgcactctgcccccggttgctatgcggtcccagccacgagggctctgcggttcgggagaattccgcaagagcgcgcgttcggaggcggggtgtttttagacaggtgccccggtgggattgcctgaccgagaggacggggaaagttagacttcacacggcctggggtttttcctttcgtgcaagcgctcacagccctggcaccgagcctccgagggcacgcgtgtgttacaaaatagtccagcgattgttcacacgatgaccctgagtcctcaattaagcagcttacattacggtcctcataccttgtttaagaagacaagaaagtgggttaatccattttagaaagatttctcatggaaaattatcttttaaagctttcctcgtgtacttggagtaaatgatgatctctaaggactagtagtcattaagtttaaatttaagcacccctaaatattgatgttaaaaagaaagtcaaaatttgaagtgctggtttacttaaaagtaactttttgtttatttttcctttttaacactttattgaaagtataatgtgcttcattctgttgaaatagaagttgaagaagatataacccctgccctcgaggaacttacactgttgaatattagatgtgtacactctgaaggaaaaattgtaaataacaaaattggggttaagttaagaaggtctctcgatggaaatgagataattaaagggacaattttttcttttcttttctttttttcttttttttttttttttttttttgacagagtttcactcttgttgccccaggctggagtacaatggcgtgatcttggctcactgcaacctccgcctccctggttttgcaacctccgcctccctggttcaagcgattctcctgcctcagcctcctgagtagccgggattacaggcttccgccacatcgcccagctaattttttttttttttttttttttttttgtagagacgg

SEQ ID NO: 102450 - DNA, 1040 bp, Homo sapiens
ctccggcaggcggcaaagtcccctgagaatcggcgcgctcctcgccgcgacggactccacccggccggggcgctcagcctcctcgccgtggcccccagcccggccgcctcccctaacggccgccgcaggctcccctcatggaccgagagcgcgggcttgcagcgcggcagcgtccgttcggcgcgcggctccgggcaggcccgccctcccccgtccccctgcgccgcgaggccccccccccgccccgccctccggcgcccggcgcccaatcagagtgccgcgcacgtgacgagcgatgcctgcgatgacctcatccctggtgtgggatgacgtcaaattcaagatggatggaatcacagcggcagcggcggctgcggcgcgcgcgagccgagtgtgagcggaaaggggcccggcgtctgcctcgagactgaagaccggtgagtaactgtcacgcccctagctctaggagaactgcggggctccttgggaggctacagcctccccgcaaaacgcggcctttcctgacgtaactctgaggtgatttctctcctcttttttctccaccagcgggttgcgggctccgagcgcttctgcgcgtgcgcgggacctgggcgctcaccgagcatgtcccgggttcccacgtagccgattgtaccttcacactgcgcacgctccctgccagcacttggcctcgccctcgcgaatgcgcatgctccattccctcacgggcttcactcttcaccctggccgagctgcccctggggtaggggacacgcctggcccaggcgcgcgcccctcgcgcggagcggttgaaacgcctcgtggagaagggcgcgttctcctgttccgggcaggggttgggggccggcggcccgggccgcggggtgtgcgcggaagctggccggcggccttggggaccccgcacctgccgcgacccgccgctcccttcacggtccgggacctagccccgccgccccgtcctcggcccggtggccggagcgtgaccgctcggtgcccgctggacgctccctccccgcccc

SEQ ID NO: 102451 - DNA, 1048 bp, Homo sapiens
gtaaactgatgtattttccttttaattggcctgcttggatgtcagcggccattggccatttatagggatttcctgtccctctggagaggctccagcttccctcttctcaccaggaaggggaggctgatgtgcatggcgtgctttctctccaacaggtgaagcgattctcagaaatcaaatttacctcccaagattaccttgaggcgaagttcaggttgagaacaaatgtagtcatatctggggctttagagcgttttctttcctatctgcagtcaggccgtggcctccacatggtgacgctctgatggaatggaatgtcgcctccttctttgaaacccaaccctccaggctcatccttgccaaaaaccaggaaggggttaaatattccgggcagcgccaagtcagattatctgtattggtttgcttctacgctataaaaatgcatttggacacctttctcaaattcggggttgctttctcttaatttctatagccatttcacaaggcctgtaatgacaggccagctaaagtgcatggaaggcatcatgaataaatcctttcaggaattccattaagggaagactggattccaaccaagtgctagtgacttgatccaacctgctagaacagggaggggaggcagcccggttaaaggcagagtgtggagatcctgtggctaggggttttgagaggggcagatgctcaggctgaagggggatggatagttccctagcataagtgagttacttttgtgcttctttgaggctgttgtgctaaagtgggctttcttgtgggcccacaggacatttcttttagtcctttgcctttaatggaggtgacagctgacccctggtgcagtgtcgtggccccaggccacttgcagggatggcttgcttgaggctggggcattgacaaagagtctgccttggagaattcagaggactggagaacccttctcttccccgctggggccagttcctaggttctcagtggcccccaggtgggtgggctaccactcaggccctgaggggtagcactcctttggtga

SEQ ID NO: 102452 - DNA, 1027 bp, Homo sapiens
cgggggcctgggtgcccgaagtgccgcagtactccatggtgcagagagcttgctcctgtggaggaagtgtctatgtggtccccagctcctctgtctgcctgtccactgaggggcacccatggctcagcagaagggctattcttggggttcccggtcctcctccagccccgctaatctgtgtaggcctcaagtgctgtgtgtttgtaagcattgtcatccacagtcctattgtacgagctggttcacccgcagctctgagctgctctccagccccagccctttcttcctgtgcccctacccccgctgggatgactctcctcaccctccctggggcgacaaccgccctgtctgtaatgagtggcagtcccaagcttcctgactggcttccgcagctctctgactcccctaaacaaggcctcagggactccacatccaaattaaggcggcacctggtggcaggttggcattttccggtgtcctatctatgaaagacaggaagacagctgggagcaaactcccctgggccagactcttggaaacataaaggcttgggtgcccagctggggaccgggagaaagtctaaaacacgggactgggccaaggaccccacaggtccctgtctcattaggtcccctgaaacgtgtggaagctaaaatggcattcacgtgattcttgatcatttaacagtggattctgatctgatactacactgagaagtgcccctgggccgggcgcggtggctcacgcctgtaatcccagcactttgggaggccgaggcgggcggatcacaaggagattgagaccatcctggctaacacggtgaaaccctgtctctactaaaaatacaaaaaattagccaggcatggtggcaggcgcctctagtactagctactcgggaggctgaggcaggagaatggtgtgaacccgggaggcggaacttgcagtgagccaagattgtgccactgcactctagcatgggcgacagagcaagactcagtctcaaaaaaaaaaaaaaaaaaaaaagtgc

SEQ ID NO: 102453 - DNA, 1043 bp, Homo sapiens
aaagtccccccgcccagatgagtggggacccccccacctctgtcccgcctggacagttgcgaagtcccccccgcccagatgagtggggacccccccacctctgtcccgcctggacagttgcaaagtccccccgcccagatgagtggggacccccccacctctgtcccgcctggatagttgtgaagtccctccctgcccagatgagtggggacccccccccagtcctggactctggcagcaaggctcgctggggtccctccgttcttaccaggaataaaatgcaacatgcaaagccctgctgtgtgccctgccactgagcagcaaaacaaacagcaagagcagagcccggcctgggacggggcagctgcagctgcagcccctgatgccaagccctctgggacaggaactccctggacccccggaacctggggcagtggctagttcctgccgcccgcaggcgtctcacggtgcctcttgacttgcagcggcctggacagcgcctcctgcttccaggtggtctcgctgatgaaagggctcgctcaagggggtcgctccatcatttgcaccatccaccagcccagcgccaaactcttcgagctgttcgaccaggtacgcgggccccgggccctccccgccagattaccactgcactcaggtcagcctgaatgacaccaaaccctgggtacccactgccttctgttagctcgtggggcgtcttcatgacaccaaaccctgggtacccacagccttctgttagctcatggggcatcttcatgacaccaaaccctgggtacccacagccttctgttacctcgtgggatgtcttcatgacatcaaaccctgggtacccatggccttctgttagctcgtggggtgtcttcatttttgagagcgtttaagtgccaggttttgtgagacttgtggaaccacaggcagcgaagggggctggggagtggaagctggtgagcagagtcctctctctgtcctggtggtcggtcatgggatcctgggtgtcaccagcattgtagaacttcatcacctcc

SEQ ID NO: 102454 - DNA, 1088 bp, Homo sapiens
gccccatctccaacattggggattacaatttgacatgagatttgggcggggacacagacccaaaccatatcactaaactttcaaattacttttcttctatttgcaatagtcagcgttcactgtaatgctgcagtaacaaacactcccataatgtacgtgtctccctccatcaatatttgtgtcctgcttgtgttaggggtggcaacggtgggttgtatcatggctctgtcccataagtcttctcatcccgggacagctcctatctggacatgcctttcttcaccatgtcaaaggaaaagtgcaagagagaaaccaaatgacagcccttaaaacttccagttggaagtggcaaatcatcacttgcactcacatgccattggcctaaacaagtcacatggccgagcctgaaaccagggctgtaggcgagtccatttctccttcaggaaagcactgtgaatcatgaggattgggacggggggttggacaattccttatagggaaggaggtggtgaatacgcgggaaccataattctaccagagaagttgacaatctggccacctacttaggagcggctgaatgcctggcatggcttctgggacctaatttgaaagacagaggggctcaccgccgtccacagcagagttcttagagcctctgatatagccacttttccctcaccattgtttttacctttcctctcttctgagggtagacttcctttgttctccatttttaaatcttttacaaaggatagtaattatgttggttttaacacaacaaaagcctgacatgtgtgcatatatgtgtgtgagcaggcgtgtatgtgtgtgtgtgagtgtgtgtgtgtatgtgagtcgctttagggtttggcttgtttctctggaggagaagacaggataaagtctaagacgtgctgtcacagagttcagggtcccatgcttccaaaggccgcatccgggttgttctctgagccgaggacggctttgcgaacgcactgggtaagatgcgggtctgtccccaggtcctgacacacctgcgcatcacctcgcacattgggatcggcctcctcattggcctgctgtacttg

SEQ ID NO: 102455 - DNA, 1036 bp, Homo sapiens
ggtgaacgacattgaccttcagccaacggcgtggctggctgggagaacgtcctccctcatgcctggcctttcctcctaggtatgggttcgaaggggtcatcctctccatctatggcttagaccgggaagatctgcactgtgacatcgacgagacgtgccacttccagaagtcggaggccatcctgcgggagctggacgtggaaaatgccaagctgtacctggacttcatcgtactcgggattttcttcatctccctccgcctcattgcctattttgtcctcaggtacaaaatccgggcagagaggtaaaacacctgaatgccaggaaacaggaagattagacactgtggccgagggcacgtctagaatcgaggaggcaagcctgtgcccgaccgacgacacagagactcttctgatccaacccctagaaccgcgttgggtttgtgggtgtctcgtgctcagccactctgcccagctgggttggatcttctctccattcccctttctagctttaactaggaagatgtaggcagattggtggtttttttttttttaacatacagaattttaaataccacaactggggcagaatttaaagctgcaacacagctggtgatgagaggcttcctcagtccagtcgctccttagcaccaggcaccgtgggtcctggatggggaactgcaagcagcctctcagctgatggctgcacagtcagatgtctggtggcagagagtccgagcatggagcgattccattttatgactgttgtttttcacattttcatctttctaaggtgtgtctcttttccaatgagaagtcatttttgcaagccaaaagtcgatcaatcgcattcattttaagaaattatacctttttagtacttgctgaagaatgattcagggtaaatcacatactttgtttagagaggcgaggggtttaaccgagtcacccagctggtctcatacatagacagcacttgtgaaggattgaatgcaggttccaggtggagggaagacgtggacaccatctccactgag

SEQ ID NO: 102456 - DNA, 1034 bp, Homo sapiens
atctggaggtcaagtggtctttgaattcacaacaaggctgcctgtgagtttgtcagctctcagaagcagtttgactacatgcagagaaggtgattctggccaaagaagtccacctttaggaaaatgccattgtttactccctctagaatatcattctcctagaatcagggcttccgatggaaaggctgtgtttttgcgggaaaatcagtgaacctttctaagctacatttttcctcatctgtaaatagttacagtacatcatgcccaaggccatgccagctcaaaggtggtgggattccttggcgatgtccctgaagctcttatttcccacttcgaaagaacgaaaagggtctgaattttatttacacatggatttagtttgctaattcttagagattccttttttactgctagatcttttttagtaaacacaattgagatagatattaaagtgtaattttaagtgtgcttgttctatacaaatatggcattgccttccagattaagtttttaaccagagtcaaacttagcctttataaaaagtcctcatttaatttcaaaatagatcttcttgtaagacattgcacatagggaagacctacctaggaatagcctggtgaaatgcagaattggaaaaaggcaaaagtccttgctcatgactcagaactacatcgagtgaggtcagtgttgaaaacgcccattccctccaggtgagccttccccattgtggattagtgttgtggcttcatggccctaataggggtgtgtctgccaggaactgcactgcatggggcccacagccctgcctcagaagcagctttggtctcgtttgctgagaccgcttgctgtgcctcatcaatttcaggaggaaacagtgagatgcctctagattttaaatctggtttcggagagcacctaagccctctgatggaatgactctcgtaggaacttgatgggggtaattctaagggggaagagcttgggaaccatgagggctgttaggctgcaagaagggaatggatatgtgagaccat

SEQ ID NO: 102457 - DNA, 1075 bp, Homo sapiens
accaaggaacctgcccggttaggagtggccaaaggcagctgatgaaatagaatcctgcaggtgggagggaggcactgaccggggcagcggggagaagacaaagagacctattcatgcaatgcaggcgcaccagctgtttttacaataaggtgcatgtggcttttgagaaagtgggtcatttggatggagggtctctaatagggaacaatttttctttcaaatacctgaatcacaggtcagttcaattcgccacctgccccactgtgtggtccacacttcgttcactttctgccttcggtaagagaaaccaggaaggccgagcagttctcagtcaggactccttgctcggctggctcagcaggtcggccccccgccatgcagtttctctcttgaccttgagacctccagagtctaaattcaccttgcactgtggttcctgggccaggccacatagcgagataaagtggggcacagcagccccaccccttggaattcaaaacagaaactgggctgcaggaaacaggctgctgacagggacgcaatttcaatacaggtttcattattcacgggccagctccgcactgtgtggcagggggacagttgttagtgttgcactctgaaagagctgttggttaattcctgccttcctcccttttcccagtccacttcgactgctcagggaagtacagatgtcgctcatcctttaagtgtatcgagctgatagctcgatgtgacggagtctcggattgcaaagacggggaggacgagtaccgctgtggtaaggtcatggctcttcccctggggaaacagaaggaagcagcagaagccaaccctgacccttcccatctgtaaaatgggtccaagtcattgccatttttaggtcatgtcttcagctgggattgaactggcgtttgcccaaagacatgttgggctggggggtcagggagggccttccatggagctctggctctcttggggagaccacataagcaataagatgagaccagcgagaagtctcagggatccagagtcactgctctgtgatggggaggctgccgtggacaagaagtgggtc

SEQ ID NO: 102458 - DNA, 1055 bp, Homo sapiens
ccaagcgaaagcagaagccccttataaaaatcatcagatcttgcaagcctcattcactaccacgagaacagtatggggaaaactgcccccacaattcacttatctcccaccaggtccctccccaacatgtgggaattatgggagctacaattcaagatgagatttgggtggggacacagccaaaccatattaggtggtcacatggttgcctacatttgtccaaactcattgaactgttcacttaaaatggatgttttactgtctacaaaatatacttcaagaaagctgatataacatgtttttaattttttaattagattgggatattaggctactggtaccaatgcccaagggcttcccgtgggccccacggagggccagctcttgtcacacccaccgggtgaggcacagagaggccagtgttccctgaacccatagccaatggcaactgatagagcactttacatatatctttatgatggttagggtatttggatgattctgttaatttctgagttgtctacattttggggcgttggttgaaagcgacactcttaccatgttcgcacaacacaggagccagatttcgaagtggcacaggcagtctagggttgtaattacatgagctcaggttggttcctccgtcccttagccaccaacccccttccagtccctcttccacatacctctcttcattctgcgctgtattattattattattattattattattattattaaagatggagtctcactctgttgcccaggctggagtgcagtggcatgatctccgcttactgcaagctccgcctcccaggttcacaccattctcctgcctcagcctcccgagtagctgggactacaggcacccaccaccacacccggctaattttttgtatttttagtagagacggggtttcaccatgttagccaggatggtctcaatctcctgacctcctgatccacccaacttggcctcccaaagtgctgggattacaggcatgagccaccacacctggctgctgtattattatttactcacatacatatcttgc

SEQ ID NO: 102459 - DNA, 1006 bp, Homo sapiens
atctgattttcagagagtccaaccacacctggcctgaaaacaggatgtccacaactcccacagcccaaaggcgcccacaccctccatcccacagcctggggatgccccacaccctctgtcccacagcccgggggatgccccacaccctctgtcccacagcccgggggtgccccacaccctctgccccctccaccccacagcccggggatgccccacaccctctgccccctccactccacagcccggggatgccccacaccctctgccccctccaccccacagcccggggatgccccacaccctctgacccctccaccccacagcccggggatgccccacaccctctgtcccacagcccgggggtgccccacaccctctgccccctccaccccacagcccgggggtgccccacactctcagctcctggagcgtcttggccaggtccatccgtagaggtcggctttttggggagagttggtgtccacagggccaattcagtgatttgggtagctttccattttggaacaacagttactaattcttcctcctcttcctcttctcctctttcctattttaagtgcaaaaatgtacatttaccaacatttgtgtcatcttggtctggaatattaaaagtgagggaggaaggacaagttttgaaagacaggttttggcttgtgtttcagcctttttaggacgtcactcaggaatcagaccagttgctgactatccatggtataatctcagggttgagaatggatcttgaaagagccagggtgaggaataaagtctccagagcaatgctgggccagcgagctttataatgggtgccacaaaaggctttcagatgagcatgtcgcagtcgcctgcaatagctaagacatggccaggactaagtggccagaactgagtgaccaggagtaagtggtcttttcaattgttcggccacattttgcaactctaatataaaaaatcgtgtattatataattatatgtctattgagcttag

SEQ ID NO: 102460 - DNA, 1457 bp, Homo sapiens
catgggagagtttgtgtacgataatatattcttaactcactaggaggggacacctcaacaacttcagagaccaaaaaacaaacaaaagcgtgattccacactcctccttaaaactcaaaacttcttacagtgagaatgacctcatctaaacaaataagtcaaaaggatcaaaaccagtaccagggtcaggaaatgttgctgaattgctaattatctagagggattgatcagacattaataatgagaggaataggaacacatatattcccacctcaacacacatacgcatctcgatgccttataacggcaatattagctgactagctttactattaaccagggaatgtcaatgtagtgttaatattaatgttagatattggaaaggaaaaaacaagagaaagacttaccaacggcacgttcagaggagcatgctgcacaacggacaagctaacagtcactggacaaactgtggcaacaccagttacagattcagttttcacttgcaggacctaacactgtctagaaccctcccactcaggattagttttttatttattggttgtttgtttgtttgtttttgagacagagtctcactctgtcgcccaggctggagtgcagtggcgtgatcttggctcactgcaaactccgccgcccaggtttaagcgattctcctgcctcagcctcctgagtagctgggattacaggcatgcgccaccatgcccagctaatttttgtatttttagcggagacagggattcatcacgttggccagtctggtctcaaactcctgacctaaagcaatccaccgcttcggcctcccaaagtgctgggattacaggcgtgagccattgtgccctgccaggattagtttctatcaacaaaaacggtatctatcaacaaagtctagagttctgcaataaatgggaaatgatattgtttgcttctggcaatttagttctgtactaacacatgcagataaggaaaatgaaaatgtgaaagtgcctaagagttggcataacttttaggcgaatcacctccaaccttgcaggatcaatatttttgagcagctacttccctgttaatgtaacaaaaccctacatgctccgcaacttaccatatctgttaaacgatattcaccatgttgttcacacccaacatcaaatacatactttccagggccaacaggctacgagcaaagagaaaccattcttaagtgtcaacacccagcagaaaatacaaaatacaaatgtcaccaccacaatacccacctcaaatcaccaaattgggtaaagtgtaacatggattaaggaatgcttttgtgaattcgtggctgatgggattggaacttatatgccctgttttgtttacttttggaaactttaaccacattttacttttttataaaagtgatgtattcattttcagaaaacctcagtgaatcagtatccataggcaaa

SEQ ID NO: 102461 - DNA, 1001 bp, Homo sapiens
tgtactgacaagcacatttcacaggttagtcagaggcaccacgaagatgcaacgaggagggagacaaaccaaggttgtctgacccattgccagtgatcctaacaccacacttcatttaccttgcaaatgtttagagatccagcaacaactccagggcttgaccatctatcctcagccacctggcagcatttcagtctatctcccacccaatcatctgactccaacatgccactctaaccccagctgcacaccagctccatccgctggtgccatgcctctgtttgaactcttccctcacctcctcacctccatacggcttctgctaagtccttataggcttggtaggcagtactgaaattggcaaggatatcataaaattcataataccactccatgatgtggacaactgcaaactacttttgtcaaccacagtatgaatccctgcactagaaaactcaaaacgtcctcaaatcttacagctcacttaggaaagaaacttaatagaggtctcccaaaggtgactgctcttaaaaacgtgcatattacaccaagtcattaagctaaatgatatgttttgagactatgaataataaaaagcaaatgttgatcaatttgttgatcaaagagaaaagaaggaattatatttctattctctctatagaaaacattacaaaatggttgccatatggagaagcattcaaagagtattagctaacaaaggtagagaaaagctattctagaagtatgtcagacattaaaactcaggctacttagattctgtgatgtttgtggtatttttaaatttttaacttattttgatttatcattgcaaatgaaaattcacttttataccaactttatattttcttttttttaaagaggttctcaaaacttacataagcttctggcttacacaaaaactggacccacttccacatgaagataaagaatacccaataggctaagaaaatgctaattattcaagtaatatttgtttatgt

SEQ ID NO: 102462 - DNA, 2087 bp, Homo sapiens
cagcgaaagcccgtgcgccctcggagccggggaaggcgcgggccatgacccgggttcgcccgcaaaggccgggcagtgccgcaaggcgtgggggcgcccccgcccggtggccccggggctggtgcgaccctgggcacgccggggccggggccggagccgggggtcgcggcggccggggagggggaggagccgcgcggctccgccggcgccccgcgggccagggaaagtgaaagggcggcggggcctcccgcgcgccgctccaggaagtcgcgagcaggaagcgcccgcggcggccgggccgggctgggctgcggagcgcgggcctcggcggcgcaggtgaggcgcggggccggggccggaccgggaggcggggaccccccgcccccccgcccgcacctgcggggcagccggcgctcaggcgccgcagccgctcagcacctgcggcgccctcagggagccgggcgcggggccctgcgcactcggagctcggctcctctccttccttttcttttttttcggggggaggtgggggctggtttggatgttttccgagagccggggacggtctcaagctattttcgcggagggaagtctttgaaatacgacatctagaagagtggccctcggcgacaatgccgggcgttcccggaccggggcaacgctgggattccggggaagtggaggcagagggagcgggcacggggccggcagccgctccacggagtccccggcaggggcgagcttagctgtccagccgggtcccctgcccaccccggcccgggccgcggtgacagctgagggtccagagagccggcaggaggggaccctgcgcattgtctgccgcgatggggacgtgggcgtgcccgcggaattcacctcctccggggaccagccgcccagggaggagccggcacagaacgctggctcggagcgccggcaccctgggcctttgcgttgtttgtcggctgagcagctggttcccggagcccgtgggcctcctggccaatgcgagtgacagcgaccttctgggtttataataaagggcttgacgcgccggaaagtcccctcgccgctggccaccagccttccagcccttacggcccacgccgtaatcctggtgaccgagaaggtacgttcagtctaaggatttgcatttgaacgaaggatactggccaagccccttaccacccccactccccgctaacaccccagcccgcggccccaggtttgaatttccaaaggaggaattgctaaagcctgccctttccgggtctcccttagctctttgcctggaaggtgcctgcctgcctgcctgccggcccttgaacttaaatcgtctgaagttgtgtaagtggataaatattttagacttcccccgttgtttttttattaatcccctttgagagcaagcttgaaaacacctggccccagacctgtgattcaccaagtcattttggacctgcatttacacgttctgtttcatgcagcccacctgtgatgttctctttgttgggggttggaggcaggtaagggaggtggtgcaaatggaattcaggttccttgtacttcagccaaggggaaagagatagtgaccattttcattcatctttaatatggaaagcgcctttaaaagcaaaaagccatagaaagagcacactctggacaggaagttgtattctatctcgtaatttaaaaaaaagaaaagaaaaaatgcatgaaaacttttggaggagaattgcatttctcacccatctttgcctgtaaagtgagacccagttaaaaaaaaatgtcataaagtagattatttaaaatatctgtggggccgctttgattatgtgtaatgccacctcagccctaaaaagactgaggaaccttactcctgctattgctcacttcctatccccattatttgagtctctgcagattacttggaaccttctaggcagcgcagatcacatgtgggtgggtctgggagtggagcttgtgaatgtttctttcctcagcttattctgttttacagttgcctagggtgggttttttgaagaaataggtataaaaccatgtgtctttcagagtctgtttgtttt

SEQ ID NO: 102463 - DNA, 1085 bp, Homo sapiens
tctttcacccattttacagggaaaagaatccatcattgttttaaaaagaaatcaaagaggttttttttcccttcttgatttgtcagtgccttctgggcctttgatgttgttgtcacaggttttatcagagttggaggtttttgatttatttagtagatggcaatggaatgtttccagacacgctggacatggagaagcagcacttgagaggaagacgtttgcttctgaccatccgtttccagacactgttgaaccaaattctttactctgaagttgtcatcacaaagtcatttcccagagtagatccagacccattctggagcccacccattttgagcaaaatattgcttaaatctagaggtttgagcagacgtggttttgaagtatttgtggctgttcattcaacgtgagtttcttgagcacgtggtctgtgctaggttctggacaaggagatggaagtaggaccttgccctgcagtcccgggccttcctcttttgaatttacaatgaggataatatcagctagtgtttgttgcgcatttactacgtaccaggccacttatcaagtgcttcccataggttatctcattgcatgtttataacaacatggatgctatcatccccattgtttagccttgaaggagagggagcagaaaggttaagtgacttgcctcggcttacacagcccagggtcagccttggaaggaggaggtattggagtggggtgaatcccacctattcaggccctgtaggacctaggagaaaggtgtagttctggctggagcagatagaagagatgaggggcggctcctgggacgaaagctcagcagggattttgaatctttttgtaaaaggtggtataagggaaaaatccttggagaatgtgcatttttggaagctcactttcgagggaggcaaaagtgaatgtggggaactgattggctttggaggacgcagtgactcaggaatgtcatgagtttgacattgggatgggagaccaggcctgcctgctgtgctgggccccttctcagttctctggcctccctccccattccttcctatattgctctgccttcagccctgact

SEQ ID NO: 102464 - DNA, 1341 bp, Homo sapiens
cctcttgtctaggcccacatttctctgtcactacggttcaaaggtggcctggtccataggggtggaactgaggcagtccagtgccctggcatgccttgatatctgggcacatagcgtggctgctggacacatacttggttttgtgaatgggttgatctctagatgcctcccagatagagatgagttccttggttcctttttatccaccatcagaacattatttgaaattcatttccaggttctcagaacaaaccgcctcaagggtagatactccacctcactccccctcttcctagtaacactgctggtgggggcccctgcttgtatcagacgtgcagctttgatcaggactgggtactgctactgtacgtgtgtggttacttctgccagtaacgctgaaggtgtgaatgtcacgacactggactctgaatgcctctcctcctccttgtagagagcagagccactgccagaaggaaggggacaagacccagcaggacaccttctttccacgctttccagcctgtgggagcggcaggggcaacagagagaggatctggagccaggattaatgactcatttatgaagcatcttattctgcgaccgaggctcagtggtcagtggcgacgtaaatggctcgactccccgctggcattcgcttcatcatctcattctccagggatcagtggtgagtcctggtggggcaggcccttggcatggagctgtgtataggtgagggctactgtgcaggtagttgtgttgccccagtttcattataaaacacataaaacttgaatcactgacctcacccataaccgttgaattgctttttggtggtggaagccgtgacccagaacagtgctgaggtgtcctttgtccttggtactggcattgtcagatagtgtttgggctcccgcgtggtctccagtggtttctctaagaaccatggtccctacagaaaaatgaccactgactaccagcagggttagcaaatggctgtggtgaaataagcacataacttatatataagttacacaactctgagatcagatgagtggccttgccggggcagaactttcagagagaaaatgaaatgttctggtgcagcccagaatgctgctttccgttcagagagtgcctcgccttgcatattctgagaatccttctcttaggtggcctcattaattccattctccttgaaggaaacagttgacaagcccagagtctgaagctgggctccctggcctctaacttgtcctgctgacctcttctgggagaggaaaaactttgcttctaccctcgtaggttctgttttgggggacctgggaattaaactgacaaaag

SEQ ID NO: 102465 - DNA, 1593 bp, Homo sapiens
agggtaggaaaagcagtctggtttttcctgtctcttacagtgttcagtttccatttggacaaagcaaacgtggcaatattttttaatgttccaatattatagtgacataagtaatattgataatggctgtagaactgaatgaataatacacagcataagaacgtttcagaacacagtgatatgtattcctaacataacttctgttatttcatatcatcctctcccactgttttgtgtttcaggtacagagccttcatttttattttgacatttctgctgtatgcaagttttcacttatctcgaaagcctatcagcatagttaaggtaagaatcatggaaagcactgcctgtcgtctctgtgaggagttcgtcacttgaaaagcttgtggggcagaggatggggatggtagcaggtacatggggaaacagattatgtagaaacaagttattctgctgctttggcttttcggtttccctttgctaaaattaaagtcttttaaatgttttttggatttatactttcagaggtagtagacttttagttttattagttgacatttccagaatttgaaagcttagctaaatatttattttatcttgtgtgactgttccttccaaatgtatccagtcttaagtggttccccaaattccagctcttcgtgcgatccaaccctaggtctggctgcggaggtggctctccattgttcttggaacgctgcatttttgtctgagtgatgggtgggcaggaagttgttaagcaggtgttctactagactttgagaaaagaagattaaagcagacaagcctacataatcaccagttataacctggagaaaagcaggaataattttcttaccctcattgggattacgtcacccggcctgtagaccatcaggggcctgagaggcattagagtctctatcgtagaagaacgaggaaatcatccactgccagagacagtgcattcacagcccagtggcccctcgctcactctccgggagttggcagggacccagctccaggactgcaattctgtgacctttggagctgtgcttcctccactcctgccggtggctgagccctgggtggctgccctctgcagccctggtcggcagaggcaatgcagaggctggctgttttgtgacggtcctaggttccccactctccagcagctttcaggggatgttaaacattcatttacccaaaagattctaaaattcccccttggcccctgataagcaagaaacttccatgcctctcaagttgttgactgtggaaaacgtttgcagacctttgaaaatgtggtttttaagagagaagaatatgaaaagaggtggtgggccttaaacactcatccgcttgacaagaaactctcaaatcagtaccagtaaccagtcattataaatctgaatactactacttcttgtctttctggttagagaaatatacaaacagctcaagaaaatggtaaattataaagatggaagtgactattgaagagacttggtgagcgtgttggagttgaaggatctggtgtagttggggagcttgtgtggggtttcaggattgacctagaaaggttgggtgtggatt

SEQ ID NO: 102466 - DNA, 1070 bp, Homo sapiens
tggtgtccaggccactcaagacttagggcttctgaggaggcggcgtcagggtcagctcttagttcagtgtcataagtaacaatataaataactgccgcttacagagccctggggtatgacaaactgccacatacattacccctgtgatcctcacagcaaccctgcgagtgcccctgtgaggaaattgaggctcgggtcttcgttccccaggcagggctgccacacactcgagaattccctgtgggtcaggctgcctccagggcccctactcatcctctctgtgcctcagggtttgtccgggtttaattacctgagtacagtcccagcatcaccctcagagcctcctaaacgcacagatttcctgacctagcagctgcgatgtgcctgggcatggattggcttgacgctgaatcctgtgggtttctttacctttcaagatagatcagaacatcacaccacatcaaaactaaactttatagtgccttctgaagcgcccgtgtgcttgagctcatgatataaatggcatcaacgaaactgaaagtagtagtgattctgttgacccacaaaacagttgagtgattatttatagcctgcatttcccagaatattgtaagcaaaaccaaagcaaaatgtatttgcttacttgaaattgaaccagaggctgtgaattagaaagtgagtcttattctgttatgtcatttatagaatgacacggcacaccaggtcacatttaagttagttaaatggaatgtttagacttacctttgatcactgctgattaattgtatttttctcgatgatgatgataaaaccagggctgggaggatagtggtgttataagtgcaaccctgtcccttctatctgctgctccagctgtggcctagcctcaggactcaaggcaagcgtctgcccaagctggtagacaggtgagtctgactcccagcagagatcttagtgcgagctcttttcacctggactgggccagaaaagaaacctgaaagcagaggcttcccggagaagcttaaactgcaggggtccctggagccagggggatggcagcattgatttga

SEQ ID NO: 102467 - DNA, 1041 bp, Homo sapiens
ttttaattttttgtagacaagggggtctctctatattgcccaggctggtctcaaattcctgaactcaagagaccctcctgcattggtctcccaaagtgctagaattacaggcatgagccgctgcacctagcctctttctatgaagtttttggattcaaaagagaccgggaagcttggccccacactgttatgaggtgtgatctgctggtggtggggttctggctgggttttttttcctcgcttttctctgcttattctaaaatttccacaataggcatgcattgcttttattttgaaaaatatatagatacctgtatacatggttttaaaatatatatgtagtttaaactgtatataaatataaaattgacagtccatctctggctgtcgtgccccctgctttgtgtaagtggagcaagctctgtgcacctccctgcagcgctgtcccgggcctgcttcccacaggtcagtctctcctttggcctctcctgcaggtcatcaacgggctggtgcagaccaccggctggcccagcgtcgtcacctgcctcggcaactggtttggaaaaggaaggtgagaaaaagcagccctgtttccaatagcagatgaaaactagaccattttacttttagtttttctgtagactgattacagcaaaaacactttagtatcctctttaaaataagatggctgaaacctctggggcttgaattgctgaaattcagatggcctgtgtcccacgagacaggggagctccgccctcccactgtgggcctggtgaagtccgtgtcactcggcggctcctctgacagctgcatctggcctcccaggtgttgtgggagatgcagagtccaggaccctgccccaggccttttgaagccaaagctacatgttaacatgggagtttgggaagtcccgacctgggtcacccagcgcacagcaccaaagtagcagagctgggacccagcctggcgagtccagatttatttgtaaatggcttttattttatacagataaaatttatttatttgtaaaattcagct

SEQ ID NO: 102468 - DNA, 1059 bp, Homo sapiens
agctctcgtgagcatcgcgagtcctgcatggcacagaagcagggtctgcatggccccccgttgattctgcgccgactccctactttgcaggcactgctgcgccctgcactgctggactcgtttcagcttctcagctccatcttctgtcttctgttttgttgtgctgcaggagaggtttgattatgggggtctggaactcccacacctccgtgggcaacatcttggggtcattgatcgctggctactgggtgtccacatgctggggcctgtccttcgtcgtgcctggagccatcgtggcagccatggggatagtgtgctttctcttcctcattgaacgtaagtgcacgtggccttggagaccacccaccaagggaggcctcggatttccctgcctgggtgggccttgggggcgagtgtgagagctgcgtggcctagcgccctgtttgcccgtggctgcctcagcgctcttcttaccagggagacttccccggggagccggttctctcctggttttgctggatttcctactctcccctgattctggagtgacccatgtccccattccttcctcccgtcctcctgtcctcccttgccccggcatcaggagttcatgcatgggagtcttccatcttcccacaggctgttccttctcatgcccatcttgccaccacagcctgaattggacccagtcagctctttgccttctgataagatatatcttggacagtgttataaaagactgacttaatatcttaactgggtaaaaagtatctcttggaaaatcaaatctcttattccatttcagattcaatagcaaactctttatttaattgaatttgaaattcatttctgaagtagagatccagcaggctctggtgctgagaagattcaggacagttacagcaagaatagagatgcccgggtggccctggcggtcacacgacaggggctcgaatcccgcaagccattctgataagctgtactcaactcttagttctttgactgagtttaaaccatatggcaggagacagctccctcatgctgcctgccaggtaggga

SEQ ID NO: 102469 - DNA, 1029 bp, Homo sapiens
gcggtgatctgccataccccccttgcacacaagtgggctgccaggccgagtgactggggacaggccggggcgtgtgcgggagtcactggtgggacagccaagctgtgcccttgccctcacctggcatgctatggcgatggcttttttctgaaacgaatgccaatttagtaaaggtataagatggcatcttgtgttttattaaattttattgtgtatatttaaggtatgcaacatggtgttacagatacatagagatagtaaaaaggttactagtaaagcgaagcaagttaacatagccatcgcaactcacagctgcccgcttttgtttttgtggcaagagcagctcaaatccactcatttaatgtgaatcctgcatacagtccagtttcacacccggtgctcccgtgttgccctgtcctcgggttacgtagcttacttggcattgccatggtggtggacctgctcagcctcactcatgtttgctctttcagatccgaacgacgtcaggtgctcctccaccctggtgacggtaaggaccctgttttcttgtccttttctagaacagtgtgcggttctgaccacttccccagcctgctcctgcctgtgcggtgtcagacagaaacacacagggtagacagaagtcccaccctcaaaacattggcagttctaggaatagagaatattctgttttgggtttcgctgataataaccttatcagcaaaacccagacaagaggttcaatgctgtccagatgaaggacttcatgctaaggggaaccaaaggctgggccctggccaggcctcctcaggagtggagacctcctggtttccccaggggcctcagtgtgacggggaaaaacgcacgtgtcagctgcctgccatcacttaagttggtggctgcacgtctcaggtggccgagaggtctgcccagcacgccattccttctcttctgtacccctgcccagctcagccagcgtaggccctgcaggcaggattgctgaccacgttggctgccatgaatgagccctgc

SEQ ID NO: 102470 - DNA, 1852 bp, Homo sapiens
gagttttggagtgcatcagtgcagtccttccacctccctgccctctagcagcaggtccacattctggggctgttgagcaagccacactctccttccctagagacggttttttttttttccttcagaagcattcggctgacctagggagggcaggtgttcctcacatgttaaagggaaagattggtctgtgccttttcatttcaaaaccattgaaacaatctcacggccattcagaaaagttaagttggcttaatgggtatttttacatttgattacacctctgtcttagctctttcttcaagagaggattttatgctcacattctattatctgagagtctggagtgttgagatcaaccattattctgtttaaatcagttgtcttatgtcctcttggtagcttttttgggacgatagtaagtatccttgctacagtaaagccaggtttaatttctagctgttgaatcagtatcgctctaatgaaacttttttttttaccagcactcaaaaggctatgagaatggtacaaacagattgagactccagaagcaaatcttgaagagcgaaaagaacaagcctctggtaagtcacacacaacttccacttcctagaatgtcggagctgcaggaaaactcctttgagccacgtcggctctctgtccctctgcctatgtgacatgtgtcacaaacatccaggtcttaaaaaaattctgtctcattgtatttcttcagtaaaatttgagtttgcccttattggctttctttggattttacacttaaccagttcattcattcagcagctccgcacctttcaatgtcccaggcactattccaggtgttgggggcggtgctggtgtagacggaacgcaggcagagacatcccccaagcggtgccaagcggcaggaagacaggctgagcaggctctattttcagctggccttgggaggcttccctaggcaggcagtgttgaaacagagctgtgagggactggagggagagtctgcaggtgcctgagcacagagggtgtcagggtgaggggcgcacggtgggctggccacgtgaggtgcacacagaaaactgacatcatgggaccaagaaaagggagaagcaggtaacagaaggaggcatctccacctcccctatgtcacagatgaggaattccggacacagaaatgctaagttaatctgccttgtcatccgcggtagcagggaggcctcagtgcaggtctggcccacccctagcacctgagcctcctgtgccctacccttcccatcattgatccttgtagaggctcctcacattgctgctgcttagctgaccacaccaagctgcagcgggcattttaaatttgagtttaatcattgaagttataagctgttctctttctagatcaggtttttgtttgtttggttggttggttgtttttttttttttttttttttgagacaagatcttactctgtcgcccagtctggagtgcagtggcatgatctcggctcactgcaacctccgcctcctgggttcaagtgattctcctgcctcagcctccctattagctgggattacaggcacccaccaccacacctggctgaattttgtatttttttagtagagatggggtttcaccatgttggccaggctagtcttgaactcctgacctcaggtgacccacccgccttagcctcccaaagtgctggaattacaggcttcagccaccgcacccggcctctaaataaggtttaaccttctacagcagacacagggcctctcctctgtcagaaagacccctccagcatgtgtaaggggctgctctccctatctttttaaattaaatagcttaaaggattaatgta

SEQ ID NO: 102471 - DNA, 1026 bp, Homo sapiens
gtagtatgaaaatcaaacccgtccatgtttgcattgactcgactctgatgtaaagacactgggttttgatcctgaactccatttcgaaattcagaaacgccgtagataaacagggcttcctgtcttcacttgaaaagtagaaaatctggccacgctgggcctgcaccccatgtgacagtggccgaggagctgcagctggggccccacccttctcagaggccccgcccctccctggtgcccctgctcggggtgagcgctccactgttcccgcgtcctcactacaccacacagcggtgcagcaccctccccagtacgtgtctggaggtgctaaagccagaccagagacaggatgtctttatgggagcgaagtcatatttaactctgttgcatgtttacacacacctgctgactccacatttggaggagacgcctgactgctctctctttcagggcgtgatagagttctcactgtgtctgctgtttgccaagctggtcagctatactttcctcttctggctgcccctgtacatcacgaatgtgggtgagtatccacgctagaacacattaaattccgcacagtgactggggtccgaagtctcttctgtctgctggtttctagagtattgaaaacacaaggtcatgaagggtgatttgagaggtacacctttgaataaagtactatgatgaaacataggctaaaagaattcagatatgcacattgtattgccataatggtaaactttatggggcttcacggttgacacgttctatcccagctagggctaccagttcatgaggtacttcctgttctggggcagcctgcgtttaaacgtgggctacactgaactttggatcatagcagccagtgagcagaagcagagcctttggggacctgagaaaagaaatctctgatactctgacctggaaatggcttctgggagatagcgtctcatttttggcagggccgacagtttgctttatgtttcagaagccccgcagtggctgcagctatagattatcagaaaa

SEQ ID NO: 102472 - DNA, 1143 bp, Homo sapiens
gttggtagggcccctccttgttggtcattcttgcatgcgtgagccaaacacgtgggcatgttttgaaattggatctctgttcttcagaactgtcaccatttacagttcatcccgtacccacagataacacttgctactatattcttcatctttttctctcttaatgatcagcttttcataatcataggcctcttcgggctagcacttttcatacatcacacttggcaggatgtagatgtgggtaaggtaccagctcaaacacaataagcctgtgccggtagttggagctagaggttcagattcacacagatggatttatttaacaaaaatcttgctattgtcaccagcactattgttcgtacctgccgtgttcccacgacctttaccacctaattgtcgcaaacacctttcatgcaccaagcagagcagctggatgcatcttatctgtaggaggggcccctgttctctccagcttgaactcacctcatacaagggactcctaagctcctacttgaaccacaagcacctaagaaaatagaagagtttctgccttctagagctctggcctgaggcttggtggtggggccatgtgtttggtttttaagtagcccctcgagaccctccagcaccccttccctgcctcccctggaccagtgatccaccctgggtctgagggcatctgctgccctctaagaacgaggggccacgtccagggagagccctcctgtgggctgatgtcccacttggggagagactggatccacactggaaaatgcactagttaaattggaggtagcacaatcatttgtctggatttgtaggctggcgttgagccctcaaacatgtgaagggcacggagttaaagctctgggtccggcgaggagccaaggctgaggcagtgatgttggtggaaagccctgggccccggccaggcctggcctccaaggggctcccagtggggtgcggctgtcctgtgacagcctcttcagaccccagggctggcgccagaggaagtgctcacctggctttagagtcacctgagaagctcgcaggtccacccactgggccacccgcattatggtcctcttgtctttatttcctttttcccactgtggacatttcatgattggattaattttagtc

SEQ ID NO: 102473 - DNA, 1057 bp, Homo sapiens
cagagagccagcgccacacaacatcaagaaggccgacaaccaggttggaaaccaagacggagctcagacccaccacatcgccccagaggcttttccagcacccatgatgtttcggactgacctaaaaactaattgtcgagaagccaagggtgaggaggcaggaagcacctccggttggaggcacccaggcttgccagccacagagcgccccaaagtcaccgtcatcccagcccctggccttcctgctgccctccggggccatggcactgctgttcagctcaggcacaggggcacagcagaggtttgggaagcggtctccccaccggcactgggattggcgggtccaagcccagcaaccggcttcgctccacaacacacaccacacctgggactgtttttaatacatagcaacagactgggttatttatttaagatgtgtattgtgtcatatgaagtttaagagacataaatggcattttgttatttattaagacaaactccaattgttctctggctgtttttttcagttgtgtctagcaaaatacttatctgccctttgaaataaaatgtttttgtttaaaaaatctcagaacactcagagaatgttgatgatttctgcttacatttccattacgctaaaaaagggaacttccaaatcgtgttgtgtgttttgggttttctcaggcttggacacattgaggtttctcgggtttggacacatactgggaaaagaccatttccagcagaaaaggggcctacctctcggtcccttgtttgcacagaaggccaagctgaagtaaacagccatctgggtattttataaatcacgcagtttaaagaatatcctaagatttgtccttgacgaggaggtgtcacaccccgtggtggtggggaaaggtgctgaccttgggaactacatggtggggtccaggctttcaaacgtcctcagaatgctgaccgtccagatgtgcatggtgcgggctttctctggatggagtgctgtggaagttcacttggggacctctcacagcagcagggcaaaggtcagaaacaacac

SEQ ID NO: 102474 - DNA, 1153 bp, Homo sapiens
tagaaaggccacctctctgtcctctgatcacagagtggattcacagctgctctcggggctggcaggtgggcaaggcagacagctcccggcagctggactcagcctctgggtggcatctcccacggcccgtggctcctgcccagcagatctcaagggcactccaggagaccgatgagggttccagtgcttccaagaagtatctagctgcctgtgtgtgagaatgcagagatgcccaagacaggagccttggcctctggcagatctagggatgccaggaattttggagtgtgagtggcaaagagggacaactaaagggacacacatgaaaacagcccactcggccccacaaaactgcatctggccacgcatgaggcacctggcactcagagaacgtcagggcgcctaaaagtgatcacctccctcccttccagcaggggcgcccccacttttctccgagtggtttggcccagtgtcctgcccatcacaaaccagacagaggacatgacttcaggctgctgtgtcctcccatgtgttagggcctccgagggcccagggctgtggcccgtgagcgtggcctgcctctatcctccgagggcccagggctgtggcccgtgagcgtggcctgcctctatcctccgagggcccagggctgtggcccgtgagcatggcccgcctctatcaagtgcagagctggaaggctgcaggagcctcccccgtcatctcatgagtcccccactcacgaccatgcagcccactcagaccacgacctgccgccacatgcgggaactgctggctccctcgtgcccgcccggggctgaggactgcacgtgcagccacagatgcatccggccctcctgccccacagcctctatgaaggccacataaatggcaccaagtgtctctgtctgccgatcagcatcccctcttggcttcacagcagacgcatctgcctttcaggactgccttgaacaacatctgggctggtcaggtggagagcgaggagtttccaggttgcagcccctatggtcctgagggctggcgtccaggatggtgggggtccagcagctctgggcagcgaggcccctggctgggtgatccaggtggcagctgaccagtggcctgggagccagccctcctgtcctcacgtggggcc

SEQ ID NO: 102475 - DNA, 1039 bp, Homo sapiens
cacagcacaggtcagcagaggccttgaccacagcatcccagtgaacctcagcctcgttctgcccacctgcctctggcacctggtgacgtttgataatttcacaagaggccgtgatgcctcagggcctgtcccagggagcatgccgcttcctcagaggtgtctgtctggtgggactgcaggagcatggggacgtgcagttgcaggggcagctgagcggcaggagggacctcctggccaggccagggcacaggcagctcccccagcccccacggcaccttctcctgactctacttgctccacttacatggctgggtgttgctcccccgtgcaggtacctggtgagggcgcctgagtctcccctcactctctccttgcctcccaggtaccagatcaatgcccgcacagagctggcggtccgctacaatgacatctcaccgctggagaaccaccactgcgccgtggccttccagatcctcgccgagcctgagtgcaacatcttctccaacatcccacctgatgggttcaagcagatccgacaggtgtgtggggtgagggccctcccaccggagtgggggcacattcagggacagagcagcccccactctccattggctggaagctcccagaagctcctggccacagcagtgccctggggacccaagggaacccctccctccttcctcacctcctccagggcccagagtggagccccaaaaagagggtaccctcgccatgcgcacgtgcatcccactgacctgcacttcccagcctgtatttaattcagccttcactggctccctttgagataaatcctttgtccctcttccagcccaagaaactgaggcttagcaaaggtagggagcctgcccaaggaggggacaggccctggacagacacatctgctgcatccaacataggagagctgccccctgccccataaccccagctgctgtcacctgccacccacagcccagtcagcccccttccttttatttatttttttttcttttgagacagagtctcgctctgttgcccaggc

SEQ ID NO: 102476 - DNA, 1068 bp, Homo sapiens
gagtgcagttctgctgcttcttcccgagtgacttgtgtgtgtcaggaaaggtattctatttggtgctttcggcacttttcatcttgtccttatgacagcctggggaggtctcttagctcgttctggaagtacgcaggtgtgagaggagagctgcgcctgagcccagggcctgcgtcctcctgccctgcctgcctgtaccgtgctggttagctattgctgcaccacgagccactccagagcttaggacttaaaaaagtgtacgtcaccccatggtttccccggcgccggcatttgggagtggcgcagctggggctttcagcgtaggctctcctgaggtggcaccggcgagggctgcaccgtctggggtgctggctgcagagcggagcccgtgggcctgcagtcctagtaatcatgctctctttcttcgtggcaagcactcctgtggtctacatcttccagctggacgcccgcagacagcagttggtgtacaggcagcagctggcgttccagcaccaagtgtgggacgtggctttcgaggagacccaggggctgtgggtgctccaggactgccaggaagcccccctggtgctctacaggcctgtgggcgaccagtggcaggtgagactcggcaccttccagatgtcctatgccctgcctttccataagcctgggggtgtggggcggcagctatgttttttgggtccatgggtaagcctctttcaactcagccacttctggggcccagggtctgtgtcctgaatggcagtggctggggcttccaccgtgggtgaagggagccgggtgccaggccggcgtggctggcttgtcccatgtggtgatgtctgcaacagttctttttttgggtgagtgtgtggccccccacaccacacttagcgatgaagttggcactcagtgtggcaagggtgtgtgggactaacacttggaggctggattagcacagcctcgggcctggggcactggctgagtcctcaggagcatgtggagccccgggtagaggagggggcaagggcggcaggctgagctgctttcctctggggagacagtggg

SEQ ID NO: 102477 - DNA, 1050 bp, Homo sapiens
gagacggggttgtccaggctggtctcagaactcctgacctcaagtgatccgcccacctcagcctcccaaagtgctgggattataggtgtaagccaccgcacctggccaatcccagcacttcaggaggccggggcttcaggatcgcttgaggccaggagtttgaggaagccaggagtttgagaccaacctgggccacgtagccagatctcgtctctataaaaaataaaaaatattagccaggcatggtagtatgtgcctgtagtcctggctatgtcagagtatcgcttggacccaggagttgaaggctgcagtgagccatgattgtgccactgcactccagcctggacgactgagagagacccctgactcaaaaaatatatatatatattcatatatagtaccagctattataatggcattactctaaacatccatattcattaattcttttgtcagactatgctccaggaagcccaggtgtttcgaggacttgcttctacggtttctttgtctgcggaatcagggaagagtgaaaagggtcagccacagaattccaagaagcaaagtccaccaaaaagtaagattttgatggtagtcataagggaaagagaatgcaaaaagaaaatagattagtcagccttcgaagcacgacagtgagttttactagctacgtaatttatgcttcttccttttcagcagtgtccagattatacaagacacaagatctataacagattttagaccaaacatttcagtcatgtcgtagtctttgactgaatatttagccctgaaatggtttttcctgtattttctaaatgccaaaccccaacctgaagtgagtgatgccttggtaaaggctctgtggcatttagatggccccggcacagtgagcttgccagaaagccaccttactttccatcctctgatgctgagttgtttgttttgttttgttttgttttgttttgttttgtttcagtctctttgagacccatctgtggttttccaggctttgcttaatcccagtccaggactagctgggactacaggcat

SEQ ID NO: 102478 - DNA, 1007 bp, Homo sapiens
atgaagtctcactgtattgcctagactggtcttgaattcctgggctcaagcaatctccctgcctcaaactcccatagtattgggattacaggtgtgagccactgtgtccagcctacctggcatgtttttgacattctctaaatgtttactgatgaacaattagttgaatttcattgctaacattatcctctcctttggtgaattttagtctgtgtctgcaatcctacatcatagacttatgaatttggattaaatggattttaaaatatcatggcagagccaaagagccccctttttagatacatgcgtctgtgtgtgagtggaaacggagtgcttcattctgtggccatctgggttgtggtttggggaggggaacactgacctgggagcgagccttgggctctcatggagctcctgcctctgtccttgacgggccctgcaggcctctgagcctcggttcctttgtgcttaagcaggatgatcatgccagccttgctgggtggttgtgagactggctgcagtgggatacacgtagctactgcacacactgcagagagctttcaggtgggaggacagttttcagaactaagctcatcaatacacagaacagttgtatcttgtttttttttgagacagagttttgctctttatgcccaggctggagtgcaatggcgtgatctcagctcaccacaacctctccgcctccctgattcaagcaattctcctgcctcagcctcccaagtaactgggattacaggcatgcaccaccacgcctggctaattttttgtttttttgttttgtttttgcgataaagtctcactctgtcgccaggctagagtgcagtggcacgatctcggctcactgcaacctccgcctcctgggttcaagccattctcctgccccatcctcccgaatagctgggactacaggtgcccgccaccaaacccggcaaatttttctgtttttagtagagacggggtttcaccatgttggccaggttggtctc

SEQ ID NO: 102479 - DNA, 1047 bp, Homo sapiens
agtaatatctttctttttctttactgtggcttttgtaggcttttcttttttaattagacaatttgttcctcacagatagggttgatgaagaacgcttggtaggtaagcacctgtgtgtgagccgagtcattcataaagaactgttcacagataggttgatgaagaatgcttggtaggtaagcgcctgtgtgtgagccgagtcattcataaagagctgttcacagatagggttgatgaagaatgcttggtaggtaagcacctgtgtgtgagccgagtcattcataaagagctgttcacagatagggttgatgaagaatgcttggtaggtaagcgcctgtatgtgagccaagtcattcataaagagctgttcacagatagggatgatgaagaatgcttggtaggtaagcgcctgtgtgtgagccgagtcattcataaagagctgtccttgtgttggtctcatgggcatcgtgtttcctccgcagagccagccccagtgcctgctgagccgtttgacaacactacctacaagaacctgcagcatcatgactacagcacgtacaccttcttagacctcaacctcgaactctcaaaattcaggatgcctcagccctcctcaggccgggagtcacctcgacactgagggccctcggtgtgaagatgaaccttccaccgtcttcactgcatcctggagtgcaaaaataaaatccactcaagagtcacaaggcccgctgtgcataatcggtttcacttttacctttttttttttttttttttttttgagacagggtctcactctgtcacccaggctggagtgcagtggcacattctcggctcactgcaacttccgcctcctgggttcaagtgattctcccacctcagcctcccaagtaggtgggattacaggtactcaccaccaggtccagctaacttttgtatttttagtagagacagggtttcaccatgttggccaggctggtctcgaactcctgacctcagatggtctgcccacctccgcctcccaaagtgctgggattacaggcgtgagcc

SEQ ID NO: 102480 - DNA, 1084 bp, Homo sapiens
atgtaagtgaagggttgctaagtaggatttgggtcataacatactgttaaggataatttttttgttctctacatgtaaaaatatgtatttttaaaaattggatgtcatgggctgggtgtggtggctcatgcctgtaatcccagcactttgggaggccgaggcgggtggatctcctgaggtcgggagttcgagaccagcctgaccaacatggagaaaccccgtctctactaaaaacacaaaattatccaggcatggtggcacatgactgtaatcccagctactagggaggctgaggcaggagaaacacttgaacctgggaggcggaggttgaggtgagccgagatcgcgccattgcactccagcctgggcaacaagagtgaaactcggtctcaaaaaaaaaaaatttgatgttatggaatgagggagacaaaaaatgctctacaactattaactgatgcttttctggttttgttctccagacaccattcgcttttcacccaagatgatttgatgtcttataaaactctgatgaaccatgatggctacacagacattaagtatagacagctatcaagatgggcaacaggtgagcttgaacttgattctgcattctaattacaaatcaacctggcactcaagcatgaacattgctttgtatacttgcaattcaattgccatgaggttgcatgctcagtgttagtgtattatgcatttattgtacattcgtgttcagaaaaaaagccatagaataatactatttcgttaactgataccaagattgccaggaatcttgacttccctaagtcatatgacagtttcttgggaatttacctttttaatgtcagtgttaattagcactgttactttgaaagaaaacccggttgattttcatgatgacagattcccatgttgactggtggctcttctgagtgtctaactggatcagcttttgaatgggaatcttgtagcctcgtctccccagttgtaggcatgagaggggctgtcccagtaatgaatttgcaggggccccagtgctctatctttgtaccttgctcgtgcttggatggttgtgccatacacgggc

SEQ ID NO: 102481 - DNA, 1633 bp, Homo sapiens
gaactttatgaaaatgtagcactagcctagggtgagtgtggatgtatcactatttgtggatgtagaaacaggagtagatgagggtgagtcacttgtcctgcctgccacagagcgaatcagtggaagggctaggctttggctcacagcccacacacctagcactgggatgcaccgaggtcaccaccacgcgcctttgtcttccctgcacaccagatgcagccaaacaccaaagcccaggtcagtggcaccggaacaacacatcagtttagaggatttctgatgttattccactttggttattggcagtagagatggttctatctaatgactaagaactggtatgtaggatcatgataacttacaataatgccacctttttctctgaaagtcttcattttctctgctctagatggtaaaagcaatccaggttttgcgcattcatcttcttgagctggaaaaggttaacgaactctgcaaagatttctgcagtcgatacattgcttgtctgaaaacaaaaatgaacagtgaaactctgttgagtggagagcctggaagcccgtactcaccagtgcagtcccaggtacttacatttgggggtctcgctttccctctctgccactgtgaacatctgcattgagtcatgagaccaccagctctttcagaattcactgggtcatctttatgactttctacaagaaggaccctctaggtctctgaccccagcctggtttgggaatgaactccctcagattatgaagtgagtcctcaatctgcatactgggcccccggtcccatgtttatggaaggcacaattccattcatttctttcttttatttcttctgaaaatattttacttattcttttgaaaaattgtgtaaaatacacataatataaaatttaccatcttagctattttaaaatttacagttcaatggtgttaagtttattcacattgttgggcaaccatcaacaccatccatctccagaactttctcatcttctcaaactcaaactctgaccccattaaacactcattccggattccccctcccctagcccctggaacccaccgttctactgtctgtctctgtgaattcgatgactccaggtctctcatgttaagcggaatcgtacagtgtttgtccttctggatcctttgcttgtttcattgtgcagaatgcctggagggttcatccatgcggaagcactattgtgttttagccattctgatgatatgtagtgatattaatatttctttgtggttttaattttcatttccctgatggctaataatgttgaacattattataccctctgtgtattttctttgataaaatgtctgctgcttatgtcttttgccttttttttttttttttttttgagacagagtctcgctccatcacccaggctggagtgcagtggcgcgatctcggcttactgcaaactccgcctcctgggttcatgccattctcctgcctcaccctcctgagtagctgggactacaggtgcctgccaccacacccggctaattttttgtatttttagtagagacggggtttcaccgtattagccaggatggtctcgatctcctgacctcgtgatccgcccgccttggcctcccaaagtgctggg

SEQ ID NO: 102482 - DNA, 1002 bp, Homo sapiens
agcggtcttaccagggcttcttctccgtgaggtcctcctccttcagaaagcccttctgcagcatccacctgtcgctcaggaacttggtcctgcgggatgggggagtcaccgagtccccgcagggccccaccgggcccccgcccctgctgagtggcacgcactgcctgcccagcccctctcctggacctcactggtgcagcagagacccccaagtgctggctggaagccccagggggaagcctgggggctggacttcccgcccccatggccaacaagcgtgtgtgagcatgcacacagccatcgctcaggcactcagataaacacgtcctctcatgctcgctctctgcccctcacacactcacacgcacaggtacacatggcaggctggccaagtatgtggggagatggtgttcttgcactgacgggggtgggcaggagccctgcacagggcatcttgaccctgggcaccagatgtgaatcaccccacactggggaacccaactgggggcacccaccagccaggcctggccctccaagggcagctgagctctcgggagctgtgtagccgctgcagcttgcaggccatggaggaaaccctgcaggtgcaggggacagggcatgggggtctgtagacacccgccctggtaccgcctccggagaccaggtgcagagcagcgccagtctcagcctggctgcccggtgaccagcgaggtctgtggcgttactgtccgaggggcctctgggcaaaacagtcacagcaagtcctagggggccacctgggcagcactcggtcccaatctggagtttgggggaagcagcagagggagtcagggtggataggaggtggcacagggcccggcccaagaggacgtcagtccatgtggccagggctacccgttggagctcacggaccccagagcagtgagggggacagacaccagagaggaagggacaggagggacagagagggagccaccgtctttcatgcccctcctgtcaggg

SEQ ID NO: 102483 - DNA, 2378 bp, Homo sapiens
cttatagaagaggggaagacatcagtgtgcttatttggcctttactctaaatcttaaaaggaagaaaattttaatatttcttagtttgagcccaggtgcggtgtctcacgcctgtaatcacagcactttgggaggccaaggcaggcggatcacttgaggtcaggagttcaagaccagcctgccaacgtggtgaaaccctgtctgtactaaaaattaaaaaaaaaaaaaaaaattagccgggcgtggtggcagtcgcctgtagtcccagcaactccagaggctgagacaggagaatcgcttgaaccccagaggtggaggttgcagtgagctgagatggtgccactgcactccagcctgggcgacagagccagactgcatcttgtgggtgtaaaaaaaaaatttgtagtttgagagtcaactttttcctcacagtttctgaaaatgtggcccttttgatgctgattaaagctggttgtgattttaacaccttagtagccagaatcgagactgtcatggggacatttaaaatctcaccacacttgacaccattcacaagtagccatgtggctcagtctcctgagtgctcctgcagagtgcagctctgccaggcttttctctagataatctcgtgtgtgttactgtagcagtttgagtttaaacacaagagttcactcggttaacatgttctaaccagcaagatttctgttgtttgcaggtgccgtgagcgatgtggagatgcaggaacactatgatgagttttttgaggtgagagaactgaactctgtgactgatagacctgttgatcttctgtatctgtttggaaggatttaaaatgtttctctgctaataaacatacatgagttatatctaatgacactttgtaatgtataacgagtcttaaaccactgtggtctcccttcaggaggtttttacagaaatggaggagaagtatggggaagtagaggagatgaacgtctgtgacaacctgggagaccacctggtggggaacgtgtacgtcaaggtaggagccagggcgagacggcggcgtggccgcttagtgtgccagggccaaggccaacaggcgaaagcgagacagtggtgcagccgcttagtgtgccggggccaaggccgacagaggatggggtgcctgtcgccatgcaccttgagatcctggatgctcaggcgcacagcagggctcaggtgcactggctcggcgcctaccagctgcgtcatatgtggcggtggccagcccacacgtgcgcccagccagcagaactgaaggacggaccgtacaccacagccatcgttatttcagtgtagaatatttagtacctgttggtttagaagctgtgtggactaaggaaaagttaggtttactcacatgtttggtttcttttttcttttttagtgaataaaactttatttgcctacacagccatatttgctcctttaaccagttgaatttgaaaaatgaaggcaacatttggcaaaatcttggactatcttgaagttaatctcattgaaaataaaggatttttcaattatcctgtaatactattccaccttactatacctgagtgtgtatatctctctctgatatacttggattggtaattgagaaagtcttattaaagcgtggatggcaagcacttctgtttttgtcttttcagtttcgccgtgaggaagatgcggaaaaggctgtgattgacttgaataaccgttggtttaatggacagccgatccacgccgagctgtcacccgtgacggacttcagagaagcctgctgccgtcagtatgagatggggtgagtgaggagtggccagtgacgtgactgagcacagttcggggccgtgtgcacacgaggtagtaaatgtctccttccaacccacccacagagaatgcacacgaggcggcttctgcaacttcatgcatttgaagcccatttccagagagctgcggcgggagctgtatggccgccgtcgcaagaagtgagtattcctgtgcccgttgttaagctcagtggcttctttctcccctcacaaccctcccccttccaaaaaaaaaattttggcataggtgtcgtttctgttttttaaaaggcagtgcttagaacatagtacatatttttaaatatccaaatgtcctctttggagaagaatattcacctgcacacaggtaacttcattatccaacttctcaagtagagatcagatcttagtaatcaagcaagagggcggttagctgggcagccgcggacatgaggctcgtggtgaaagtgggcatgcagtttattctcccagatattacgaagaagaagaatagatgttgtaacctcctttagatcagggatggcttccctgggacacattggaagaaga

SEQ ID NO: 102484 - DNA, 1427 bp, Homo sapiens
cacttaataaaatttgggttcgaaagcagattcctggaagttcaaaaataactaaaacagccccggataggttagaaagtgaacttaaatcattctcagaattagaaaataagaagttattttttatcttcaaagataaaaagggggccgggcacggtggctcacgcctgtaatcccagcactttggaaagccgaggcaagtggatcacgaggtcgagagattgagaccatcctggccaacatggtggaaccccgtctctactaaaactacaaaaattagccaagatcacgccattgcactccagcctggagacagtgagacgccgtctcaaaaaaaaaaaaaaaaaagataaaaagagttttgagcaagctcaaagacccgtgtgccagcagtcagatgcccacgttgggtgcacaggctaaggcagccggcccaatctggaaaccagtcaggcttttgccagcccctaatctagctgattggaacatgtttgttgatacaccagctctgtgatttctcaggtttagagaactctagaatttgatagagtgggccgggggcagtggctcatgcctgtaatctcagcactttgggaggctgaggtaagcagatcacgtgaggtcaggaggttgagaccagcctggccaacatggtgaaaccccgtctctactaaaaatacaaaaattagccaggcatggtggtgcgcgcctgtagtcccacctacttgggaggctgaggaaggagaattgcttgaacctaggaagtggaggttgcagtgagccaagatcacgccactgcactccagcctggagtggacagagactccatctcaaaagaaaaaaaaattaattaaatttgatagaatgatgatggggatagagtgtaaatttgccaaatttacccacgcaacagacatgattttacctaatacatgtgaattatgaagaataaactgatgaaaatagtttgggaatataaaacttaagaatacttgcgccgggcacggcggctcacacctgtaatcccagcactttgggaggccgaggcaggtggatcacgaggtcaggagttcaagactagcctggccaagatggtgaaaccccatctctattaaaaatacaaaaattagccgggcgtggttgtgggcgcctgtaatcccagctactcaggaggctgaggcagagaatcgcatgagcccaggaagcggaggttgcagtgagccgagattgcgccaccgcactccagcctgggcgacagagtgagactccgtctcaaaaaaaagaaaaaaaaaagaatgctttcatcagcaaaacattgtaacattccctttacttgagggcgtccacaataccgtaaggttgcgtgaactgtcctactgaatcttcatggttgcttggattttaatcacatcagaagaatttgagag

SEQ ID NO: 102485 - DNA, 6630 bp, Homo sapiens
gctgaacaagtagtgtgtttgcagaaagggaagttgaagttacgttgtcctaaaatacagcaaggaagaggaggtgcttaataccacggaaaaaagtctgtgtcatgtttctgtgaggttaaaagtaatttgatagtgtatgtcatgctgctgacatattccatgtgtttgatatcttcccagcaaaataatcagctctcattttcccttacagagtcaactgttcattttatttcaaaattggagcatgtcgtcatggagacaggtgctctcggttgcacaataaaccgacgtttagccaggtttgtttgcctttttttcatgtaaattataaaaacttcatgttcttttcaaagacagttaatttctacatattaagcaagtcattttttctctcgtagttgtattttccatttgtgttcataagtgtgttcttttatttaaataatagtgaggcaggtgatcgacttccagtggaaggtctgagaccaccactccttgtttttatcattagagaaactttaaaaatcagtttttgatgtttgtgtgttggctgtgcctgatatttgctgccctgccatcttccctaccccctctgatagacatgggtccagagggggtggccgtgccagccttgggttagcctcctccaggcaccagtggacacggagtgggctttctgctctttgctgtctccagacagtagaggtgatggagccaccttccaagttagcgtgattgtcaccaggcccatcatgctgctcgagcttctctggctgcgtcctcactttcacatccctagctgaggaaacagcgagtcgcatcacgtcatggaaacatgaaaaattaagctgaaaggtagaaaatgggccgtaaattgctcttagcgggtctgtttggttaattgaggagtgcctgttatcttgggcttagatccgctctgagttcagttcaatcaaaagttgtgagttttgatagttttatttttggttagttgaagaaaaggcaaaggttggtacactataaaggatcacttacggattaaagggagaaggcacctctaatcggagcagaaaacttgtgcccacgttgatgagaacatttgaaatttgaaaatcgatgcccaagtctttccagatggagggctggggaactccttccaacccacccttgaagtctaaatgtgcagcctctgagctgttgagtagctattatgcgtggtccctgggagctgccaggctctgcctttgagctcacatctgtctgtatacgttttcctgtaagcatttaagaaaatctaccactttgtgtaagtgagctgggagaaggaaacatgggttttttccggttgaagcccatggacgaccccacagcacacagtgtttttagaagggaagaggatgatggcttttccctccattatgctaattaccaagtggttagtataatagcagtctgtcttttgatagctctgaacatgagtttctttttacaaatttcaaaatcttggagaactagctttacattttctgtgtattgcaattgttttttctttaatgttttgatttatgaaccgaatctcccctaactaaaccagtggccatggattgtggtataaccaagcatcttaagtgaccacccagttctttgattttggggggtgtcccaagtgttgggctgagagaaatcaactgttccctattctaaaagttttctttaatctggctggaggcactttctttatgtttttctggatcatagattacctgagaatgtgaaatgtgaagttaatttaggcattccaggtcagtgctggggagagcccattggagctcgatggggtcagtagtatgtgtcagcttaagcatcctagtttgatgcgtgggtttgttttggttggttttaggcaatcctagccacccttggctttcccattagactgcattgcctctttacgttaagcttccttcattaaatagccactgccagaatacctgagtgagaccaactgaattttactgttgaataattgggctcagtttagcttttcatcagggttgtcatggtacggtcatttcagttcaaagctgagtcaagtcagctttgggaagcctcccaggcctgagttcagttgactcagggctgtacttggcggcttatggaagaaacggggccctgatgcaggtctgagtggttcagtgtggacagtttgtcagacctccctcttaggtggggtgggcttcccagctgcacacctttgactgaggaactcttcatacaaccactcccctttaaacagagctagaaatggagctggctggttttataaaaccaccacttacaaaactgcttcacgtggatattgttgagactaaacatttatttttctaaatcatgcgagtgattgctttagcttgtaaatctctagcataattcagggtgggtttctttataagctgcttacagtgatatggacgttaagattcatgtaatatattagcctactaacttaaacatggtttgttttttcagacaacttgattttaagaagaacggtacagtgtaaggtttcaagtctgcctgatccagtttaaagcacaagggctaaaaggattttttttccttaaaagaaggatcggaaaagagcaaatgttttaagctattgtattatgtaaacagagatcccaccaagaaagtgtaaatcagagccgggtgtccatgacagttgacagacctgtttggtgtgcctgttttgctaggagaccagagaacttgatgtactgcagacagctgagttacgcatttggttttgaaaaattatcttgtgtgaggaatatgattataacgtgaatttttccacatcttggtgtctgctagcttgaagtacaagaaaatattagtattctactatttatcttgcattaaaacactttaacattgaaaacgtgggactaatcaaaacaatacagtttcttcttggttgctggctgacttgacccaagtcactgctcaaactctgttttcataatatgatggttttggtgtactcttcagaagacaaatgtctgacttgcgggaaaaaaacaaacgtttagccatttgcaaacaaattgtctctttgcaattgtctaatatatgcacagcagccagtagaattcccctttttatttttttttccccgcagaccatcttgattcaaaacatctatcgtaatccccaaaacagtgcacagacggctgacggctcacactgtaagtcccacagttggagaaatttttttaaaacaatggtgttaaagagcccactcttaattgagacaaataatgttggcttctgagctgctgacatagagctgttgcaaacaggacaaggtgctggaactccttggcgcacacagcaagaacttgatacttggccacgttcaggaggcttatcccttctagggagggtcactggcccggccacctccattgattgacatttgtcatgagagcaggtccgtccatgtgaaacggatttcaacattttgagccattcattggtctttacagtgactgaacccctggcctttattaagttctttgtgtaaaattaaaactcttaggaatattaaggaatcaataaggtaagttgcccagtaagtgtgggttttatttcaccattataatttttcctccaggaagtggagatttcatgatatgtaacaattgtatttctctaatacagtaattttttccatcagtttatgtaagcattattctttccgagttcattaaaaattttctgccacatctaagaacattttggtgctagcctggcaaactatttgtgcttttacctgaattggaattttgaaaaggagagttttcacgttctgtaagcagaagtacaagatgggcatatcatgagacctccgttacaccgcagtgttagggattcaaggcagccgccaactgagaaaacgcctctgcttctccagaaaataacttgctctcttttcagcactgaatctcaactgaagcacttgccagaggcagccggttaagtgtttacctttaattttccataatataaagttgttgcgttttgtatttcagaccattgccctcttgaacatttaccgtaaccctcaaaactcttcccagtctgctgacggtttgcgctgtaagttcatacaagttccttccccggttccctgggcttgcgtgtcagagctcagtgtccactccatctggtctgccgtgctagtgtcaaggaccgcgtttcactagaggtggcaaggagctttcgtcccactgaccccatggaaacctcttttggagatttgaactcccaccgtgtgttaaaagggaaaaagtaactggaaagggtgccctttaaaacagtctagagctgggccgggcgcggtggctcacgcctgtaatcccagcactttgggaggccgaggcgggtggatcatgaggtcaggagttcaagaccaatctggccaacatggtgaaaccccatctctactaaagatacaaaaattagctgggcgtggtggcagatgcctgcaatcccagcttctagggaggctgaggcagagaatcgcttgaacccgggaggcggaggttgcagtgaactgagatcgtgccgctgcactccagcctgggcgacagagtgagactccgtctccaaaaaaaaaaaaaaaaacagtctggagctgctgctgccccttcttcctttactttggccgtcatcctagagggaatgtactggaattaaacgtcgagtcatattcttccctcttagagcaacaaaatttgaatgtttctctcactttctggaatttttaaaaagcaaactttttaagttattttttcagattttatttctcattagccttttttccttgaactccattttggagtgcaccctgtagttgtaagagcattgtgctgagagcgttccccaaatgagggtctgcagcttgcactgacccctgagttcctcacccaccagccccgtgccgacccgtctaacccgtgtgggggtgctccactcaaataggcccttggcagaaaagattgtccgttctgtccacacactgcctggatacagtctccagctctaggagatggaattggtttgctccatttagaaatagatcaaaactgggcattcagtagatggtaccaatatcttcctgtactgggaaatactaaatttagattgtgaatatttacctaatgataatttttagagaaggagatatcatagatgagtatgattgggaagttcagaaaactaaaatttgatttttacagccatccaactatagaatcattagaatttagtcatttatggataaattaaaatgaacacctggactcttgttaaaatcagaaagtccaaaccaaagataggcacttcccattcaccattctgttttaaagcagtaaaaattgaggtgcccttggatatccacaagcctaaattgagtacacccttgaaccagagcccctcagttaatggggtgaccgacatggggtagctgatcccagggggcattcccctctcgagctggccctgcactgggtggcctggggattgtgcttccttgcacagtggtgcacatttctatgtgtggatgagattttcttgtcaacttttcctgccaagacactaaatgcttttcagtgctaatactgacctgatagtagagatttctttccctgagtcggatggtagcaggatttacttggtaacccttggtttaaaatacctgtttttttgtttgtttgttttcttttgttttttaaggaaataagatcaataggcggagggaaattgtttctatatgcacttattaaataatttttgttaacaaccctgccctgggataaaagtgaatggaagtacatgactgagtaacagtaattaattctttgccctgatcgtttatttggggactgtatatgctttcttgactgacaatagaatgttgtattagttttcattgtgtctttatttgcagttcacagcacttttgttttgcatatgctacaaactaaaagtttagcaattacgttatattccaattctggagtccagattgtacaaattagatgaaattctaattcgtcattttaggaagaaatcaattacctaaaattactggctcttttcaacataccctttagtatgtaaaaaaataagcttcaaatgcgtgggttaaagttaactatcaatcccagtttaagaatgatatttctgtaagaaaactgctttattttccaagttgtagtatttaacataggctgagtcacaaataagtttttaattgtatcttaatgcagttgtctctgcctttcaagtcactttgattgaaacattttaagcagaacaaatatagccaataatttaaaataatcaccccaaaaccatttctcaaacctgctaaaactttgagcatgtgaataattttctcctcttcacattcttcttatgtgggaaggaagtgaatttgaaatattaaaatctgccctttggaataggctactttggccgtttataacttgatttctactcggggaggaaggtacattcccaatagctttccaattgggatatcctgtgatatgattggca

SEQ ID NO: 102486 - DNA, 1043 bp, Homo sapiens
ggcagggtcggcggcgtcggcagcagtgtcgacggcagcggcggcggcgggtgggaaatggcggagtatctggcctccatcttcggcaccgagaaagacaagtgagtgggagccccccgccgggggttgggcgcgatcggggcgcagggtggttgaggcggtgggagggcgaccggggaggcccaggcgggccggcgcggcggtggcgggggaggggcgcgcggcgggaaggagcggtggcccttccggccccttgcgcgccctccggagccgccgcctcgtgggccgcgcggcggaaaactggagcgggcagaatgaatggggtctcttttcggggcgccgcggccgagctttctccggccttggggtccggactggctgatcgcccgacgtccgggcctccgagtcgccgactcccggaagccgcctcgagccgcgctgaaagttgcctggagcatccgggccttttggacgtggacacgtttgttccaactttcggctgtgaatgtcctgtcgagcaagctctggtaccagcctcgccagtattcagtcgcttatctaacttagggtcctaagcgttggtgttttatccacttagccagcctcttgcctgtttaagcgaccgctgggccggcagtaaggagatatgacgagaaaaagtatggtggagactactggattaactatctaaccacaagagacgtgatccgctcttaacatacaggtgctcctggatttaccatgggattgcgttccgataaacccatcatgaatcgaaaatgcctttaataccccgataaacccatcatctaagttgaaaatttgtaagtcggtgactgttcttgaagacacaattctgatataaggaaaaagatgttttgattttttccttaaggttgcatgccttccctaatcaatcgttaggttaaaagcaaaacatttaatttcagctttaattgccaccttggcacgtactaatttccagtgagttggctgtagtttagactaaatggaatgttttcagacgtttgaaggataattct

SEQ ID NO: 102487 - DNA, 1050 bp, Homo sapiens
cccgcggtggggatcgggagaggggcagtgtcgcccatccccggaaggctgagcctggtgcagccagggagtgagggggcgggaagccggggtgctgccctgagggtgccccgacacgctctcctggggccctgagcggctgccacgtgcgtccagggttctggccacagggtgggcaggggccctgtgctcctcactggaggcccctgaggctctggaactgagaccatccacccgccggccccctctcgccggctccggcacccctgcctactgtgacttcctgccccggactcgctctgccagcttggggcaaaccacttccctctggggttttcacttccctctttcccaagtggggaaagaccacctgtccccgacccagaaagggcccctgcccgagggcagcagcagtgccaggctggcatgtgaggcttggggcaggcccggcccccagaggcacagggcgatgctctgtgggacgctgtgtcgtttctaagtacaaggtcaggagaggagccccctgaccccggaggggaggagaggcagggcaggaaaccgccaccatctcagcccacaggcctggctgctgggagttgctgacagcccgctcttccggggcccccaggcccaaggccaccctggggtgtagctgtccgctaggccctctgtgctcccggtcaacagacccacagggcctgcttggcggaaggggaggggtgttaagaatcagcccccacagaaagcattgccaggggattttgtaccaaaccgaatgcacgggtggacgggcagggcctgtggatgcgtaggccagagggagcggagcgatgacagggagcccccggggtgggcacggagcacagtcctttccctcccagcaggcacctcccacagcctccccacctgccctccgccatcccaggtcgccccgacccatctgctggggtcctcacccgcagcccatgagtctggccgccaggacgagtgcctatcagcagcctagaccctgaccgctggaaggttgggttctgtggcccaggagcagta

SEQ ID NO: 102488 - DNA, 1007 bp, Homo sapiens
gtgttattccggaagaaacacgaagaggccaactctgtttcttccaccccaagagagtcggttcctcttaggtcagattcagttcctgcctccgagggaggcgagcacgtgcagaaacaggtggatcttgcctcggctccctccaggctgggcccagggacctccctctggctggggcatcccctctctccccacccccaccccgagaggccagtcctgctcctgggagccagtatttctggactgccggaaagccttcttcttatcccgcggcccagcgaggagagcgccagccgttcagggtgacagaaaagcacagaggcagggcccaggcgcctccaggcgaaggcctccgctcccaccgctgcgagaggaggcgcgtccacgacggaataagcaggcggtcaggtcgccaacaatccggtcaaccacggtgcttcttccctggtgggtgtctggccccgttcttgctggggatggcgctcggggatgccaccgtgtttccccagggcccactgtgcaccctgcatgtcgcgcccttgtcacgggagcggcctgctgacccggagcacgcgtggccgtcacaaagggctgcaaagctgcagcaccagaacgcaaactcaggcgtgcggcaacggaggccacgttctcagccaccgtgccactctgcatgtcagctggctgggcgtgcctccgtcttgtgttagcaaggacatggcaatcacctgatttgctttggttgaagctccaggcagtacctggcccctcaccagactgaaaaagaaagtcccagaaccccagaaccccgtatggctcagaagtgccatcgagtactaggggtgcgccagggcccggctcagcccggccaagccccagcaggaaggaacatgtcctcaacgagaacatcctgcaaaatgcccggggtgggtgggggatgctcacggtgccagacgtgggctaggggccataaaggaccctcaggcaaggggcaaacacacccatgggtg

SEQ ID NO: 102489 - DNA, 4062 bp, Homo sapiens
tacctccaccttccccaggggaccatgtgtgtctctggcagtacgtgactttgtccgtgatggcagatggcaccccctgttctccaccgggcctgggtgggaccctcagtgctctgggcaggctggggtgctcagtgctctggtggctcggggcgtcacggcctgctgggatagacacacatgggtccctgagcacgcggcctccatggctggttctgaaagcacaggagacgactctgtgctgggcagcacctcccgacttggaggagggagggcccctggctgccggctgcctccacgccatcctggggcttaggtgccagactcctgtccagacgtgcttgtgtcacccgtcctttccttacccccaacctgaggcttggaaaccccttaagccaagggccgtggatgctgggctgagagccgggtggccgttgacctcctgattcattctccctgcagggctgaaggcctttcggcagcagctgaggaagaccacgcggaccaaagggtttctgggactgaacaaaatcaaggggctggctcgccaggtgtgccaggcccccgccagccgggccagcaggggcggcctgagccccttccacgcccctgcacagagcccaggcctgcacggcggcgcagccggcagccgggagggctggagcctgctggaggaggtgctagagcagcagaggtagggcctgcccccgccctgggaccccgggtgggcacacggcaggttatctcctcgaggaacctcatctgctaagtggttccctcctctctgtagcccagtgcacacccccgctcccagccagggagatgtgtggggcgtaggtcctaggtgctgagccatgggggtgcagcaggcgggcgtgtcctttaaagtccctgggtgggtgagggtggcggggagcgagggcgccttgtggccgcatctctgagctgctgagaaaccgggtggagaatgaaaggtggggcgcggtcagggatcagccacgcacctgccctcggcagccgcggctggcagctcctcgggcgggccctgccacacgggcactcggaaacccgagaaccctgcgagccggcgcagtgaccacctgtcctctgttcccacaggctgctccagttacagcaccacccggccgctgcacccggctgctcccaggccccccagccggcccctgccccgtttgtgatcgccccctgtgatggccctggggctgccccgctccccagcaccctcctcacgtcggggctcccgctgctgccgcccccactcctgcagaccggcgcgtccccggtggcctcagcggcgcagctcctggacacacacctgcacattggcaccggccccaccgccctccccgctgtgcccccaccacgcctggccaggctggccccaggttgtgagcccctggggctgctgcagggggactgtgagatggaggacctgatgccctgctccctaggcacgtttgtcctggtgcagtgagggcagccctgcatcctggcacggacactgactcttacagcaataacttcagaggaggtgaagacatctggcctcaaagccaagaactttctagaagcgaaataagcaatacgttaggtgttttggctttttagtttatttttgttttatttttttcttgcactgagtgacctcaactttgagtagggactggaaactttaggaagaaagataattgaggggcgtgtctgggggcgggggcaggaggggagcggggtggagggaacacgtgcagtgccgtggtgtggggatctcggcccctctctctgggttcgtcgtggttgagatgattacctcggacgtctacggaaacgagcgggcgcattgttgtccgcttgtgtgtgtgtgtgtgtgtgtgtgtgtgcgcgtgcattgattactatccatttctttagtcaacgctctccacttcctgatttctgctttaaggaaaactgtgaactttctgcttcatgtatcagttttaaagcagcccaggcaaagatcatctacagattctaggaattctctcccctgaaatcaaaacctggaagacttttttttcttattttagttgagaagtttcataaactgctcaaggattagttttccaggactctgcggaggaacggcaggaagaacctcagagagggcagaggtgacttcaaagtgctggggactccgtcctgagggtcacttggccctgagcccctgcgtgcccttgcggaagcccagaagcttcttcctgctgcacctcccgtttccgctgctgctgacgtttatgcatttcatgatggggtccaacaagaacacctgacttgggtgaagttgtgcaatattggaggctgactgtagggctgggcagctgggagacaggctcatggctcatggctcatggctcagggcggtgcctgccctgggccgggacccccctccccaccccccacctaggctttttgggttttgttcaaggaaggtaaagtgagaggtttaggtcagtgtttttaagtttttgttttttttttaaagcaaatcctgtatatgtatctacatgggagacaggtagacactacttatttgttacattttgtactatacgtttgtgttccaggtttcagcttccctcgctcctgttgttaagaagcgtccctgtcagcacaggtgtgcattgaggaaggggccccagggccttcgctccctcagcactggggtggaggcggcaggaaggggcggcccttacctggcaggtctgggcgcacctttagcaggtggactccgtggggctccaccagccagaagcctctggaaggcaacgaaggcaatgctgctccctgagtccagtccccgcccccaaacccagcccaggtgccttcagctacttcggcttcttaaaccctgcagtgttaaacagaggcattgagaaaggggaaaggcgggtatttttaaaagccaaagattgacccagttacttgagggtagggaggcgggcccagtgcaggaggctgcatccctggcctgctggtgcccaccgggggctgtgcctgtgccgggccgcagggaagctggctgcccccattcctgctgctgctgctgctgctgctctgtggctgtttcaaagactgggcgaaaggctgtccggagggcagaccaggtgccttgccgcagagaaaacaccaaagtctcctgttcgctcataaagaagtttttgggatgggagagaatccagaccatcttggggcagccaggcccttgccttcatttttacagaggtagcacaactgattccaacacaaaaccccttcccctttttaaaatgatttctgttctaatgccatagatcaaaggcctcagaaaccattgtgtgtttcctctttgaagcaatgacaagcactttactttcacggtggtttttgttttttcttattgctgtggaacctcttttggaggacgttaaaggcgtgttttacttgtttttttaagagtgtgtgatgtgtgttttgtagatttcttgacagtgctgtaatacagacggcaatgcaatagcctatttaaagacactacgtgatctgattgagatgtacatagtttttttttttaccataactgaattattttatctcttatgttaacatgagaaatgtatgccaaatgattagttgatgtatgttttttaatttaatatttaaataaaatatttggaaggaaaaaaccttgactttttcccttcctctctctctcatctctctgggagctctttccttccaagcggcttccctgagaggccacatcctccaggcttgtagaagtttcaaatcttaaagaggagggcagggagccaactcctgcattccacctcactgcagggaactaatggccttccgtctgcagaggacccctccccctgcggcagccacaggtggccccgtggtctgccccctcctcaggacccttccccagtggccgggctcagtcactgaaagtctcagcaccgcccggggctgccggcaccatccatccttaccccatcctccgccaggttctctgagtct

SEQ ID NO: 102490 - DNA, 2597 bp, Homo sapiens
tgagtagctgggattacaggtgcccaccacctcacctagctagtttttgtattttttgtagagatggggtcttgccgtgttgaccaggctggtctcgaactcaagcgattctcctgccttggcctcccgaagtgctgggattacagggcgtgagccaccatgccccggcctaagcattctcaaattgtatgtgaggtgtcttgaattaaatatgaccacagaggggaattctaatatatttagaccttttgtgagagcaaaggtgtatcaggataggcaagtcagtgaggaattcacctctgatttttcaaagctgtctttgtgagtaggaatctcctattttttttttatttgagaaatttttctttttctttgcatttttaaatgatgaatgcctttgtcctagagaagttagaaatttcctggggttctggtggatggtttgtagcgctgccttgtgccttttttgtgcggttaaatgtcaggtctttcttctttaggttatggaaacaaaggacatgctttacatcgtcactgaatttgctaaaaatggagaaatgtttggtaagccacactcgttttcagtatctgttgaaaaccaatggcacgaacgcgtctggatttgcgcggccagtgtctgggccacacatcccaggaccccgcggtgttccccagggctccatgggtggtgggcaggctttgccctgggggctgtagctttgttttgtggctcctcagattatttgacttccaacgggcacctgagtgagaacgaggcgcggaagaagttctggcaaatcctgtcggccgtggagtactgtcacgaccatcacatcgtccaccgggacctcaagaccgagaacctcctgctggatggcaacatggacatcaagctggcaggcacggagggtccggggtgggagcagggacatcaagctggcaggcacggagggtctggggtgggagcagggacatcaagctggcaggcacggagggtccggggtgggagcagggacatcaagctggcaggcacggaggccccggggtgggagtgtgcccgcaagcagccccagcttcccggcatgtgccgaaaccacagcccctgtgccgaaaccgcagccccttgccatttgccgtttaacctcatccatctgtttctttgccgctcagattttggatttgggaatttctacaagtcaggagagcctctgtccacgtggtgtgggagccccccgtatgccgccccggaagtctttgaggggaaggagtatgaaggcccccagctggacatctgggtaggagccctgtgcgcgcagacccccttcccgaggccgcgttccccgagggcgccgtgttcccgggggcaccgccctggcgctgatgtggctctgtggtcctcaacagagcctgggcgtggtgctgtacgtcctggtctgcggttctctccccttcgatgggcctaacctgccgacgctgagacagcgggtgctggagggccgcttccgcatccccttcttcatgtctcaaggtgagtcgtgtggtctcgcctgggcaggggcctgtgtctcctgcagccccttcgtggctggcttctgagtccttgttgagtctgggaatcaggcccaggttactgtgggctgcgggagaaacccagcccatggatgccttctcagtgccctatttcgagggtggacgggtgcccttgctgcacaggcttgtgccttgcgcctgccgtccccgcccagtacccgcacccagggtgctggcatcatccctgagtccaacccactggctgtggctcacccggcttttctgtgtcataaagatgcctgtccacctggtgctcaggtgtggggcacggcagaagggtgaacctaagtggttctctgtgtggtggacacaaagtgtggcagcccccagggtctggatccctggctgatggctccccttgggtggcaggactgagccgatggcccggcccctgctcctgggccctggcgtgtcaaaccacgtggggcggtgggtgggagcgcagccgaggtcccggccgccctggctcagcctcctggcccctccacagactgtgagagcctgatccgccgcatgctggtggtggaccccgccaggcgcatcaccatcgcccagatccggcagcaccggtggatgcgggctgagccctgcttgccgggacccgcctgccccgccttctccgcacacagctacacctccaacctgggcgactacgatgagcaggcgctgggtatcatgcagaccctgggcgtggaccggcagaggacggtggaggtgagcctggccacacttgccctggcctcacccgcaggggctaggcagctgtctcaggggaagcaggcactcaccagctgagttaaaacgggagcacaggctaatttaggggccggcttgtccaccccactaaaggatattctcagtcacccaagaataacctgggatcgggtgggccctggggctccccgccatccccatgctgatctctgctcctcttgttcccagtcactgcaaaacagcagctataaccactttgctgccatttattacctcctccttgagcggctcaa

SEQ ID NO: 102491 - DNA, 2041 bp, Homo sapiens
gccgtgggggctccgcgcgggcgccgggccggggctcggggttgcagccaccgcgcagggtccctggccttgcgcgcgcggggttcgcgggcggggttggcggcctggccgccctcgggctcccctttgttggggggccggggtaggagtgagtccgcggggctcaggggctggggagccgggggtcaggttggagccgaccgcgggcggagataccgggtgtggggggcgggtccgcgatccccgaggtgcctgggatgtcgggggtggggaccggacggatcgcgggcggcgggggcagggtgtgggagcggggcaggggacggtcctgggatccggatcgagccgacctcgggtggcagggccaggtgtgggagcgggtccgcgcccagaggtgctaaaggggtcgagggtggggacggaaccgacagcgggcggcgggaggcgagtgtggaatcccggctcagggggtcccgggatcgggacggaaccggactcgggcggcaggggcctctatgagagcgggtccgtgcgccccgcggggctcaagagggtcgggggtccgggtggagcgggcggcgggggcgggtccacacctcccacggggctggaggggcccgtggatagagtgggggcgacaggcgtgggagcaggtccctgcgtcccgtggggactgggggctccgcgggcacggatggagccgaccgcgggcggcgggggcgctggtgggctctgagctctgtgcggccccgcaggtgcgcgcggagccatggttatcatgtcggagttcagcgcggaccccgcgggccagggtcagggccagcagaagcccctccgggtgggtttttacgacatcgagcggaccctgggcaaaggcaacttcgcggtggtgaagctggcgcggcatcgagtcaccaaaacgcaggtgcgtgggggcggtgggacccagccggcggggcctccccactggacccggggcgacccgacctttggcgggtggaccccatgcagattcactgctccaggcttgattgtcgtggtgggtaaatagtaaccgtttttagttcggtaaagaaaaataatgctttatattatgttgctgcataatttggacatatattgggagaaagcagagaggataatagcaaaaaaaaggaccaacctaagattgcagtggttcatggactcagagctaaaccctgtaaagtgagcctgcaaatacttaagtcacttacttaactctgattattttaaataacattagtggttactttggttatgttttcccaacttcttgtgaccttctggagacagagtgttgagaaattaacttgcaaaaaatgaaatgtgtaaattaggttgagggtttcttttctttttttaaaaaaacccacagaatatcctttttctttttaaatttgtaggttgcaataaaaataattgataaaacacgattagattcaagcaatttggagaaaatctatcgtgaggttcagctgatgaagcttctgaaccatccacacatcataaagctttaccaggtaaggggtcagcttgcctttctctgctaatcctggcaaatgtgttatattttatttccaacagcataagtctgcaatttctgaaggtggcttcccttttggggagtgtgtggaagttgggcatttggttgtataaggtaaatagattgatttttataggctgtgcagatatatttacaattattttattgcttttggatcataattgagatttgcttcattagaattttatttagtatcctaacctgatccagttttaaatgtgtagaagtctgttgtaaatttgctttactatgaaaacagacaaacttatctgtaggtattgccacaggtcacgcatttagtataaaaggacaaatttgagtgaaactggaaacttctgcctttgcagataattattaaactttaaagccagctgctcttactggttttcattagtttatttttgcaaggacagtagtgagcatttgttttccctatttaaactcttccatgaaaaa

SEQ ID NO: 102492 - DNA, 1055 bp, Homo sapiens
gggctccctctccctctccatgtgcttgtgggtgggggcagaggtcccggccttgtctcatgtagaagagatggttccaggccacataggcctgagctggtctgctgcatggagtggcctgaccaccaagcagagagcaggaacggcaggggcagtgcttgtgcttcggggtttttagggatttatgaatgtgcacaccaagaacagcaaacaaaccaaagttcaagttatttctctttcttacaagtctgcatgaatatagtctcttccagaggaagttgattaaactctattgcaccagcctctgaagaatgcatagtatgaaatagcagagcatttcttgtggctcccagatctgccacctgcagtggggccaggctacccgacagctcccaggcctctgggcaccatagctgtcttcaggtgctccagctcaggacatggccattcagaggcaagaatcagcaagctccttccaggctggggcacatcctgaagccccatcagagcagccccatacagtggcttaggggtgtgggcttgtgtcctcctcatggaggaggggagcacgttttcccagcagctcaggtttccagggcccccccaccttccaggtgtgacagtttttcatacttaaaacatcactcaactatcagagtggtatactggggagaggcagggctgtgacagagagctgaagtggtgtgcaacagtcacaaacagctttcacctttgaccttggaacatgtgatgtgttttgcccaagttttcatttctccctgattgcatttagcttgggatcttgttaaaattcgtctgcatttccatagcataccctgagcactcaagaggcaggacaaggggttctagccagggacccagatgttcctgcagacattgcacactggaggcaagcgacgccaccagggtgaggctgtcctgatgcagcatccccaaagaggctgggccagggcagcagattttccctgcaacagggcatggggctcctcctgtcccctgccccttgggcctgggcctcacagtgtggacttgtc

SEQ ID NO: 102493 - DNA, 1062 bp, Homo sapiens
ctgtctctgtgtgtgtgtgtgtgtgtgtgtgtgtgtgtgtgtgtgtctttgtgtgtgactgtgcctctgtgtgtgcctatctgtatgagtctgcatgtatgtgtgcatgtatgtctgtgtgactgtgcctgtgagtgttgtttctgtatcttgtctgtatgtttttgtgtgtctctgtgtgcatctctctctctgtctgcgtctctgtgtgtggggactgtcataccttccttcccatgctaaacatacctgtgtcttgactctagtccggcaagcttccctcgctacacctctgcctcaaccctaaggaatttggctgacacgcatactaaggttttctaagggggagttggcttttggctgtgtgggctggaactagggtttaggggaatgtttgtctcccatttgcttctggctctgcacccccgtgtatgagggggcaggagggcactgtgactgcacctctcccatgagcccagaagatacgttttaccctgtgggcactgaagacagggccaggtttctagggctctataatctttttaactatttttggctacaggtcaagtgtagatgtgtcaggggtcatagacctctgaatcctgcaggacaaacctgaagctatctgcttcatggagttaaatgttcatcagatttgcatttctcccttaaaaccttgtcactggaaacctgggtggaagtctggcccagtgcagaagccaccagactctcctgccagctccagaggctgtcttaggatccagagccccttgcttaatcctgttttctctgctgtgctggaagaaagtcccattcctgggtaattgccagaagaaaggctccgtcttaaggttaaaggagctagaatcacaaggggaatcagtaaacccagttcccaggccagggacccaagctttgggatgagcgatctggtcttcaaggccaaaatgcttgctcaccagctttctttctcctccacactctgtccaggtttgggggcactgtcttaggcccctttgacgtcatcagcacaagagactcagagcaaggaacaaaactgcc

SEQ ID NO: 102494 - DNA, 1078 bp, Homo sapiens
gtaagaagggcaagagataactggtacacctctgtcttcacaaactctcatctttaagagccatggctgcctctctgctctgagaatgcacacatttaaatttatctccagatgtagactaagaaatcggagtctttgtgctaattagtgcatgctatgagatgaaaagtgttgttactgtcctttttaatttgtaattttaaaagttttaaaaattgttaaatatacctaatataaaatttatgttttaaccattttaaagtgaagactcagtggcattaagtatgtcatagtgttttataatcattaccattatctatttctgaaacttttcttcattccaaacagaaactctgtacccgttatataacaacacattccctaaacctttctcccctggcccctaatatctgctcttctttgtctccatgcatttgactactccacgcatctcatagaagtacagtcatatgatctttgttcttttgggtctggcgtatttcacttagcatcgtgacctcaaggttcatccgtgttgtagcgtgtgtcagaactcgttccctcttctggctgtatcatcccatgtgtggacacagcacatttcgttcattcatccatctgttgagggacacttggcttgttttcaccttttggctgttgttaatagtattgctgtgaacattggggtacaggtatctgtttgaatttctgctttcaattttttggggtgtgtacttaggagtgaaattgctgaatcacatggtaattctgtgtgtagctctctgaggaactgccaaccgctttccacagcagccgcaccactttacatccccaccggcagcagtgcccaagggctccagtttctccacgtgttcatcaacatttgttattttctgttttattgataatagccattgataatgggtgtgaaatgcatcttattgaggttttcatttgcatttccctaatgacgaataatgttgagcatctttccttgtgcttattggccgtttgtatctcttctttggagaaaagtctattcagggcctttgcccatttttgagttgggttgtttgct

SEQ ID NO: 102495 - DNA, 1050 bp, Homo sapiens
taatcccagcactttgggaggccaaggtgggtggatcacttgaggttaggagttcgagaccaacctgaccaatatgatgaaactccatctctactaaaaatacaaaaaattagcgaggcatggtggcacacacctgttatctcagttacttgggaaactcctgcctcagttacagaggaaagctgaggcaggagagtctcttgagcctgggaggcggaggttgcagtgagcagagatcatgccaccgcactccagcctgggtgacagagcgagactctgtctcaaaaaaataaaacaaaaagaaaaaagaaaattttattctaaccagaagcattacctcttttccctagatccagatgcagaggtgtgccttcatgtactgaggcttgtccagtctgtggttctggaacctgaagtcttctccaagtcggcctctgagttccggagctccctgcccctgcaacgcatcctggcaatgtccaagagccgcaacccccgcctgcaaaccgcagcccaggagctcctggaagatctccgcactctggagcataatgtgtaggtgtgctcggccaccagggttttggtgaaaatgccggtgtcccttctccccagatccctcatttgatactccaaaaccatcaccatgtaccatgtgttagagttggcaaaatgtgattgactagagatggacatgaattgatatgtatcccacataactttgtcttggaagtgagagtgcttgtaggtggttggttaagcttgccaaaggagaggccatgaaagaacctgtccttctggaaaagtggtccatgtctgtgctggctggaagagggcttgcttagggcagcttcttgctgctcagcagaccatgacctgtaggttcacctataaaacagggaaattgaataaccatctaccccattagtcagcattttcttgagatacatttctttgaaaagcaattcattctctctctagtaattgtaattaatccccccaaaatgcaagtttacttttataaccttttggtgaacctgctatttcggatga

SEQ ID NO: 102496 - DNA, 1095 bp, Homo sapiens
ctggctgtctctgtgagggggttgaatgctaggcacttctagctggctatcttgataatgttacccagaatgggtagtttctgtcgtcctatcttccaatttactgattttttttttttttttttgcctctgtcccctccattctgtcttcaccaagattttaatttcagttattttattttttctgttttaatttttccattttggttttctttatatgttgtttttttctcattggtttctagcacagttgctcactaaagaaattttttgatggccgatttaaaaccaccataaatcatatcagataatttgaacatctgtgtcatctttctgctgatgtcaggcaattttctttttcatttaagttgcctcatgtgtctttaaacccaaagttcagccatgactatcgtaaatgttctcagtctcaagtaatgaggcttttcatgattagacctgagctctgtgttattcttctacctatgttgtgagcagagttttggtgcgttatcagccattcacattcttttcgtctgtgttcccctcaaaggctgtcaccctgctgtagtgttttccttatgatgacgtcctcatgaagttgttccatgttttccttaggatgatgtcctcatgaggttgttccatttgggttgtgcccttgacagcatttgtctcatggataaagtggcctgttttattttaccctttcagggggctcacatagctatctcttcagcttgactagtgatgcaatttgtccagaaatttccttatcatttgtgtcccttgtatcccatcagccttagccacataaaataaatcctttccattcatttagcaaatatttactgagcccttactgtaaggtggtgaacaacacagccaatgttctgctttcatgaagctttcagactaaggaagaacacttattcctatttcatagaataactattattgagagaactaaaataggttaatgggcttgacaatgagtgggcgataagggatggcctctgtgaggagagaatatgtaagctgaaatgtgattcttttctggaatttccatttctgtttatattatacatctgttctttc

SEQ ID NO: 102497 - DNA, 1028 bp, Homo sapiens
agcctggggacagagggagacttggtctcaaaaaaaaaaaaaaaaaaaagaaaaaaaaagaaaaatccctaactaggtaagaaagtaaggacttggtaagagagcagttgtgtttcttttttgtcttccacagaatacagtgagggagctttgtgtcccctcttcagacaatgctgccgagccagcgtgctgaacctgccctggctggggatggtgccgtgggagggtgcgcttcagcttggagtacactcatgagagttagtctgcagggagtgggccggcctgtttattaccattgttgttgagctcccagcactcgggtgggtcagaatgcagggagtggaccagccccatttgttatagttgtcaggctcaggagtgagcaagacagagttctttccctatggaacttatattcaggtgaggagacttgatagtaaacaaatataatggcatatatcatatagtaatgcaaataaaaatggagtggcatgaggagcaggctagagagtgttgggcggagctgctcttttgggtatttgagtggatacctgaaggaagcgaaggacagcctgtgctgagatctttgagcagagcatcacaggccaagggtggcaggggaagggtctgaggcagctatgggcaaaggagtattgtaggagtgactaaaggccagtgtcgctggagaggataagaagggaatgttaggagtcggggccagaggaacagctggtgctgggaatcatcatagtgtagaaggtatttgtagccatggtaggggactgcattgctgagggagtgatatagggctgaggatgaagctgtggggccagcattttcagtgcagatgaagatgatgagggagcacagaacagccaggtgaggtcggaggaaagccgggaagatgcagtgtcctccagggctaaatggaaacagtgtttccacatgcagctggggactgtcctgtgctactgagctgggcaggtaagcctacaggcgggcgggtgagagggcccagctgtgtgagt

SEQ ID NO: 102498 - DNA, 1904 bp, Homo sapiens
agttcgtggtgctggtggtagtgggactgttttcagaatttagactgttttcagaatctagaatcataactgcttaggactaagagataatttgaaaactggcttcttctattcctttggttttaggtagatctagtttatgaaaatatactggacagataagaagctcttctaatttttaaaagatcgaggaaaaggagaattgtttgaacccaggaggcagaggttgcagtgagccaagatcgtgccactgcacttcagtctgggcaacaagagtgaaacttcattaaaaaaaaaaataagatcgaggaaaaaaaagatctcattatccctttcagtaatcagttcctacttttatcaatttctgttaagaaatttgatgtattttaataagtacacgagctttggactcattcaacccagatttgaattgcagctttcctgcttgtgaacttacctaaccttttagaatcctgcttttctgatgtataaaatgagaatttctacctcaaggatcttaatgtatattaaaatgcaatagtgtttaggccaacacctaatgtagtaggtgttaaataggtgctagttttcctcttttatttctagtctaaatatctcatgctttagggataaaagacttgaaatgaaaaaaaaaatctcatgctgcaatgaaaactcattttcttttgtttgcttgctgtaaaggtggcaggttactttcaagtatctagacttccctgattcagagtacgagaccagttgctattaatcatccctgactaaatcatctcatttcctttaacgtttgctagatttcatttgtcttcccttcgttcagctacatggctggctttttcccaggctttgtccacattcttcacattcctcttaagccacagaactggcatagaactcgagcaaatagccgacgaggacagagtgtattgagatggtggccacatgttacgtaactgttaatgcagactagtattgtgatcacaggaaactgcatttcctaccatgttttcaatgctaaaagggcagataggcggttatttccatcttacatctatttggcttgtctgagtaacacaaagcattgatcaggttctccagatttgtgccttcagcccagacctctgtcccgagctctagcctcatagattgagctgtctacttgatatctccacatggacatctaataaacattcacattcaatgtgttcagactaaacccctaatcttccctcacaccaaattctaatttctattgattacaattctatttttctagtgtctcagacttttaaaaaaccttcgagtgattcttgactccttgactccttttaatctcttacgccctcattcagtctgttaggaaatcctgatggctctactttcaaaacatctccagaatctgatcaccagctagcactcccacctaggtgttttttttttttttgagacagagtcttggtcagttgcccaggctggagtgcagtggcacagtcttggctcattgcaaccctctgcctcctgggttcaagcgattcccctgtctcagcctcccagtagctgggattacaggcgcccatcaccacgcccagctaattttcccacccagttttgagccaccatcaccttgggttgagagcttcctataggtctccctatgttccatccttccaggccatgaactgggagccaggggtatgatggaaaaatccctgaccacctctccttactgaacagtcaaaatgcggagtgagacacaaaaaaacattttacttacttatttgatacagtgtcttgcagtgtcacctaggctggactgtagtggagtgatgctagctgactgtaaatcgaattcctgggctcatgggatcctcctgctccagcctcct

SEQ ID NO: 102499 - DNA, 1063 bp, Homo sapiens
tactgagtgacctaaagggcgcatagcatatgctggacaaagggatgattcatgtccctgatgggatggagtgggatggcagcatgagatttcatcatgctacgcagaatggtgtgcaatttaaaacttaagaattgtttatttctggatttttccatttgatgtttccagaccatggttgactggctaagtgaaactgtggaaggtgaaactgtggataagaggggcctactgtatacctgttcttctgtagctgaaggaaattttaaagtattagaaagtaggattgattgtaagatgttctttcttttaaaaaaagtcaaattttagaaaatttcttggtatgttaagtttactctagttctgtttctgaagtattgctttcaatttggttataatttactggtgtccctacaacacaaagagaaattgtctcttataaaacagcaggtaaacagcatcagcctatcccattctctattacagcacagtactctatgtgggtatgtggttctgtcagataaaagagaagacccattgttaaataatttgggtaaaaagaaattggaaagacactgcagctatgaagagaagtacacatgtatagtatgtgtgtgttttaaaatttctttaaaaagctatctttactgcatcctttcctcttcacccttaactaccaatctaacctaaagttctgtcccaatttcatcataatttttaacactatatgttgtttaatgagtatacatttcacccatgtataaaaataaattaattttccttatttttttatgattcaaattaacctcttttttttagtgtcagttccatttggtggtgaatgcttttttaaaaaatagctttattgatgtgtaatcgacatgtaataagttgcatatatttaaagtgaacaattgataagtattgatataaatgtccacctgtaaaattattatcacaatcaaggtaatgtgcaaacccatcacctccaaaggcactttgtgcccctttgtggtccctccttcctgctcctctccctgctttccagagagtgactcgcctc

SEQ ID NO: 102500 - DNA, 1044 bp, Homo sapiens
ggatcttgttgtgttgcccaagctggttttgaactccgggctcaagcagtcttcccatgttggcctcccaaagtgctgggattataggcatgagccacccctcttctttcaagggggcacttctcttcagtttctgcctgcctttggctgctttccattccccttaaatggttcctatattttgttcagaatttgtgattcttattggtggagggttagtccaatgcaagttactctgccattgctgcagctatttttttctggaataagtattaaaggctgtgtgtgtgtgtgtgtgtgtgtgtatttcactagcatcacaagttttatttttgtatattcattcttgttcagtttcccaattttcctcataatttctttgacttattcttatagagatgtactttcagttttctaaatgttggagttttaaaacctacttaaaaaatgatttttaacttaattatgtggtggatcagagaatcagcttaatgtattaagtgctataagaggtgccttaaaatctaccattattgtggactggtcagcattttcttgtagttttatcaatttgtgcctttatgtatttttgaggctatattattaggtacatacaagtttaaaatgctaccctcctgatgaactgaacttttcagtatgaaatatttagccttgccgggcgtggtggctcatgcctgtaatctcagcacgttgggaggctgaggtgggcggatcatgaggtcaggagttcgagagcctaaccaacatggtgaaaccccatctctactaaaaatacaacaattagctgggtgtggtggcatatgcctgtaatcccagctactcaggaggctgaggcaggagagtcacttgaacccaggaggcggaggttgcagtgagccgagatggcgccactgcactctaactctgtttcacaaaaaaaaaaaaaaaaaaaaaaaaaaaaaaaaattagcctcttaatttttaaagatgctttcccttcttttaacattattattatttttagttattatttttgagataggg

SEQ ID NO: 102501 - DNA, 1033 bp, Homo sapiens
tattttttgtagagacagggtctcaccttgttgcccaggcttgtctcaaactcctaagctcaagtgatccacctgcctcagcctcccagaatgttgggattacagcgtgagccactggacctggccttaaagagtatttttatcatccacctatcatctgtctgtctttgtccttctctcccttccttcagatttagattgccagtgaggttgaggctcttcacatgtttgtaccattccagtttttcctttgagtcacctgtctgtgtcttgtgcccactttcctgttgggctgcatttttcttagtgatctgctgtaggtctttgtgtgttctggatactaatccattgcctcttttgcttctgtggtctgtacaaggtccatatttatgggccagctaaagtcccccttcaacttccaaggcaaagctgtgtgtgagggctgggtcacttctagcctctccggttccagtccctggagctctgtgcctttgggtcctggtgagctcttgttgattgcagtgggagatggggagaattgccttcagagccattcactgactttcttggcagtcttccatttggccactgagcaaagccgcgtgtttaccctctatcctgactcgggatctcagcatgcaccagcctgagaggggccttccccctgggatctttggctgccttccaacatgctcatggcttgttccgtctcaccacatctccaaggcactcttctcccctcttttcacctcccccacttcactaacgcccacccttgagtcctctggagccccaagacctttctcatactataaatcagcctcttttcttcctggcctccccctgccttgtgtatagcttgcctctctctggggaactacactttcactgccactttcatgatcgaaggtcactcattttcagcagttagtaccttagacccagagataggggttatttttttcctagttgcccattttttaaaaaaatttaaatttaaattttagattcagggggtacatgtgcaggtttg

SEQ ID NO: 102502 - DNA, 1141 bp, Homo sapiens
tagactggcactggcttgctgcaccagggcatgaataggactcccagccttcacacttctttttgcccctcctcccatctttcctacctggtcttaggttttaggttttctttccctgtttagcttcacagattgtattttatatttactggcacctttggcaatattctcatgaggagttaaggatacgtttatacaggatgagtttttctaaagtacttgtttttttacaaatcctgatgtccaagtgccttttatttggtgtctgcctctggcagatggcgttttttcaatggagtgagccatttggaggaggcagtctcctgtcttagaaatgttgctttctgggtaaattgctttgtgaggttgtttttgttcagaagcctcggttggtgctggttctgggtatagttacttggggcttgagatatttcatgtagttacttaaagcagatgaattcagctctgtgggtttatcaaccataatgtggtagtatgttctttcctcagatatttctcaaatatttttgcctttgaaatttcttttgtagatacagattatggttctcttaggactagctttcatttgcaactattttctataattatacatgcatttctttaataaatatctttgtgaaagaggaaatgtaataaagatatatcaaggttgaatgctattatttatttttcaattttgttttgcttttaggagaaactggctcttcgacagcagttgaatgaagcgaagcagcaactcctgcagcaggcagagtattgtacagaaatgggagcagcagcgtgtaccctcttgtggggtgtctccagcagtgaggaagtcgtcaaggccattttgggaggagtaagtatggtcagtgggctctccagatattgttgattactgcttgtgtaaattagagcatatagcttattaaggcatttaaagactaagtccatatctttccattttcttttgttcactcatcagctagttattgaatacttatcgtatatggttcattgtaacctgatgcaaagggaatgaaataagatcccttctctccaggagaccttgtggtatatgtggacatattaccacttcagtattaatactttacatgtgtttaagaagatcaaaagt

SEQ ID NO: 102503 - DNA, 1058 bp, Homo sapiens
tttgtatttttagtgagatggagtttcaccatactggtcaggctggtcttgaactcctgacctcaggtgatccacccgcctcggcctcccaaagtgctgggattacaggcgtgagccactgcgccgggcctcctgggcacgttttcatatttttgtagtgacagggtctctccatgttgctcagactggtcttgaactcctggcctcccaaattcctgggatttcaagtgtgagccaccatgcctggcctgtttgtccttattatttttaacatctggctccctttttgaaggctgaagcttcagctttcaaaatgtttgtatgtacataaaatatatctatagcagaatatacagtaggtagagacatgatttgaaacaacgatgcacataagaggtgtgaaagaaaagcaagttaacttgagctgttgttttttttctcatgtgaagagaaatataataagatctgcttgttcttttagcacatgggaactaaagaggaatttgttaaagtcagaaagaaggatctggaacggctgacaactgaagtgatgcaaatacgggacttcttacccagaatactaaatggggaggtgctggagagcttccagaaattaaagattgtagaaaaaagtgagtcttcattttcagcagtcattggtggtaacagtaatttgttctagcagatttaccctaggtaaataattgtaaacgaattttaaggtactcttacagtccttgtgatgatatttgggagagtctgatgacctaagaaagggaggtttcctcagtgtagtgacttggacatatgtaagttggtataagttggttgccagttttctgagcatctattaacagcttctctttctctctctcttcattggcagaagaattttatacttttgataactgaaaagctctattctgaaaattaagtacttactgtgtaagttaaggatcttgccaaatggaaaccttgcatggagtttacttgtcagtagagatagctggaagtgtgttcacttatctttaggtggatgggtgagccagtatctagaa

SEQ ID NO: 102504 - DNA, 1314 bp, Homo sapiens
ggtgagccagcccaggatttgcaaatgcagaggttatgcgggggcctaagaccagtttacaccagtgctccagagtcctgtctggttagtgcctatcacacccagagtgacttgtcttgtatatcttgttcaccaccacattgcatggagtacagtggaccttcagaaaataactccgcagcatgaacgtcgtggacagtgataatgggacaagaaaacacaaggtctccaccacagctatgccccatcacaattacagcacaagtttggaaataacttggcctgacattcgactcccgatgacaggctccaacttttctgcatcttgtcttaggcatcataaaggaaatgtgagctatcactcttcctgaaacatgagctgttctgcagcaacatcaatagatagctttgtcattttaaaaataaattggaaatctttgtattgctttaagtaacagtgttgcgctcttgctttaactgttcaagttgggtgctcacagtcataaaatgatcactctccatggctttcatccataagagcttatttgtcccaattcattcattcattcatatatttagcaaacatttatggagtgccaactgtgtactattatgtacgctattcttggcactgggaatatagcagtgaacaaaacagaccatccctgcctatcttatcagttctgcaactttaaaaatattgactaaaatggggaggcatcccaaaatcaacccagtgacaatttcatttgtatcattgctttctttttggcagcatacaaaataacagtacatcttatggttgatgctatattagattcagtgtagatgatggaggatataagtttttttataatgatggggttagggttctctctatccaagagttataataaatagaagttgtggatgttctgacactggggtgtgttcaagtttaacactttacccccatctaaaatggcttctgggctcattgcgtggtgagagtggctgttggatttgctcatttcaaaacttactaatatttcacatgtctacatgtctcactttgatgtttacctcgtttgttttgtgtgtttttgttttttgagacagagtttcactctttcacccaggctgaagtgcaacagcgcgatctctgctaactgcaacctccaccttccagtttcaagcaattctcccgcctcaccctcccgagtagcgagcgcccaccaccacgcctggctaatttttgtgtttttagtagagacggtgtttcaccatgttggccaggctggtcttgagctcctgacctcatgatccgcccgccta

SEQ ID NO: 102505 - DNA, 1536 bp, Homo sapiens
tctcttgtaagatttgcagttttacttcacaagaccagcgaaaatgtcagtgtgcaggatggctgcacgtggtgggcggggagggcgttgatgaggagccgatttcataagtggccactttgttcatgaattttgtgttgtgatgacatttgcttcctcacgctgaggccgggccaccactgccaccctaccctgtagctgataaagctgcaggtacagtagtaatttatttgtgtttcttttataacaataaggaaatgtttgcttcaattttttaaaaagacgtgcaaacgaaagagaattaaaatgtatgtgatacttcaccactttctaaacttgaagaaaagagatgcatagactctaagatgtttgtattgttttgccttccaggaggtttcagtcaggaagaacttctgaaaatctggaaggggctcttctactgcatgtgggtgcaggatgaaccccttctacaggtaacatgcgttccctttgtcatgctcccgggttcttgctgtggatggataagagacttgatcactcatgctgtgccagtcccccgatacactgacgcacactgacagtcatgcttcaaggagtcattttcgtacctcttgtccatacagaaagggatgcagggtcaacacagttaggtgaattgtcttttcaaataaaaggaaagatgtgcattcgttgtcaatttactatttctctgtaaaatttcataggttccatgctaggttttacattacttaaagtttctctcttctggtaagtttattttttgtggtcaaggatggcatgacaggagcactaactagtcaagaccctgtgaaacccaggagagggcagccgcgtcactgggcttcgggttccatggagagcagcagtagcgctcagcgaaagcctccctgttaaagccgagtgcgcctgcgcagtcacccaaacgcgcagcaggctcggtctctctgtgcggggcctgctgagcccgctaagcccaccaccaaagccaacactaaagatgtgactttcactttttaaaagctttgttctgacccatgaaagtagatccgatctgcctctgtagagggagagcaggcttgtccaacccacagccacatgtggcccaggatggctttgaatgcagcccaacacaaattcggaaactttcttaggaccttatgagatttttttttttaagctcttcactattactagtgttagtgtatactgtgtgtggcccaagacagttcttccagtgtgacccagggaaggcaaaagactggacacccctgaggtagaggaaccagccttgagaagtgcttgcaagtctctgatgcagatgacaggtcctcagggcaagattttacttttctgggttttaatgtgcagccttgccacttctcccgtgctgcgtaataacttgttttaatttatttttattttactgaacatattttgagtaggagcagggcaaaatatttttatattacattcaaaagtaacaaccaacagctttagtggaggaagaaaaccaat

SEQ ID NO: 102506 - DNA, 1286 bp, Homo sapiens
ttcttagtggaagtgacaagaggggcagaccttcccacgagcggaagtgggagaaggaagcaggccgcggcacaggcatctcatgttgccccacgataacccccatgtttctccccaaccccgcctctgcaggaagagctcgccaacaccattgcacagctagtccatgctgttaacaactcagcggctcgtaagtcctgttgtttcttctccttccttccaagttttccgacttgctagtttaatgggaaccttgtgccggtattgtgtagatgtcaggggacaagccattcctgtttttaaaagctgtgataaacttagtcattgacttggtgagagggcacagtgtcttggggagaatcaatttgacatctcaaagatttcagaaaatgcttttagaaataacaatcctccagaatcttcaaattctgagttactttaacacttggagcctggagagccagatgcagggtccacggtgacctctggatgccaggttcgtcttccccaagagcagagccgtcactggtaataaatacatagaagacaccaccggtcacagactatgaagtaactcctctcaaccatagagaaaaaaaattagttagggtgcttctgtgtcaggcgttgattgcttataaaggaagaaaaaggtagccgacttcgtttgttctgcttaatgctcttcagaaaagcatcctaatgatttcaaccacccccagtggtgctctgaatattagctgactcatattgaacaaaattctacatatgatgtataatagatttacaaagatgaaaaaagaattgtgcaaaaagaaataaagccaaaaaatcaacaaaaattgtttttgaataaaaaagtgctagttctgtgggtcagaagagaaaaattcagtgttttgtaccgtagctcacccagatgccacctataatcagacaaaaatatgagtttctatatggattatataagtgtcagaattaatggttttgaactgattgtgaggtaccagtgcagtaggaagagttactagaagtggaacaaggagtcttgattttaaaagaaacgtggctttgcagtggataaaggaaaaatgctccagagagcgctcaaatctgacattgcaatgttgccagcccttccggttattctgtttttatttaaattcaaaagaccaaggccaggcacggtggctcacgcctgtaatcccagcactttgggaggccgaggtgggtggaacacctgaggtcaggagtttgagaccagcctggccaacatggttaaaccc

SEQ ID NO: 102507 - DNA, 1586 bp, Homo sapiens
ttagtgtgaaggaagaatttgaatgtgtcctggaaagcttctctgttttggcttttgcagttcttaaggatgagtttggggagcattagtgaatacgttgggtattttttgagacagagtctctcttgctctgctccccaggttggagtgcagtggtgcgatctcagctcactgcgacctccgcctcctgggttcaagtgattctcatgcctcggcctcctgagtagctgggattacagacgcgcaccaccatgcttggctaatttttgtatttttagtagagataagggtttgccatgttggccagggtggtcttgaactcctggcctcaaatgatctgcccacctcagcctcccaaaatgctggggttacaggcatgagccactgttcttggctatgaatatgttttttgatctagaaggtaaatatgactgttgtgaatatttttttacttttgggatccaggccataacaatttcattggtcccttcattctgctgagctgattaatatttcttacctttccttttttttttttttttttttttttttaaacaaaaattgcctttctttagctgattcgtctggtcctgaggcagtcctttgaagtcttgaagcgaaatggctgggaagaaaggtcagtaaaccatttgagttagcatgtggtagccttaaaacttaaaaggtagtagagtgtcaagttttctgaacttgtagagtaccaatgagaagctcgatacatcgttacctatagagaattgaaatccagtagaaggcataaaacagttaagtatatatgacagttaacattttatcctgatttaagtgattgcttttttccttgtaaaatgatttcagccttgcattgattgttaggctgtgtaggttctagacggagtatttttgtttctctttgggaagtgggacgtgttggcatactgtcattcacagaagcatgcgtttggttctttagccgaatcaaggttttcttggatgtcctgatgaaggaggtcctgtgtcctgagagtcagtctcctaatggagtgagattccacttcattgatatttacctggatgaactctccaaagtcggggggaaggaggtaagcagctgccgacaggctgcccacggggtgagggggccgccagtgttcgcagtagtcgccagtgaagtgctgtggggtggcccttcgcatgaccagcgactgtagcagcgtgaattgcttcagtcctgtctgggaatgtgtcctaagcagctggtgggatgggatttgtgcactgaggatgtacatgacagtcttacctgtaaaacggaattgaaagcaacctacagactccactaaagaactcactaacacgggggagtactcaggatctagggagctttataaagcgctaggaaaagctatgcaaatggtagacatttttaaggtatatactcataaatagacaaaaggctggaaaggaaacatacattttttagtatgcaaatgattctctgaatgtgggaatgtgcacagattttacttttctttcacaggtgttttgcagggaacatgtatttttttgattaaaagaaaatatgt

SEQ ID NO: 102508 - DNA, 1037 bp, Homo sapiens
aggacatgtcaagaagggaaaggctctttctcaatttttccctttttctaaattacagcttttagcagatcagaatctcaagtttatcgatccattctgcaaaattgctgcgaagacgaaggagtaagtgattcccctgttcgttcctcctgctccgtggcatttgctcatgggagttacttgccgtcgtgcagcctggcacagggtacccaggacactgcttcacagcagagagcggctggagaagacagccgaagctttgagcagtgatttggctcttctagcttcagtatttgcctcactcattccaggaatgccctcccacacccaaagatctgaccgctgggcgtcccgtgcctgtcgggtggcacttaggcagttcctctcagatgcttgctggcccgtgggggccactccagaccacagcaacgtgtgcagggcttccctctgtgcccctgaagccagaaggccaggccgtttgttctcatcacatgctctccgctgtgcttctaccctcagccacaccctggtacagaccatagctcggggtgtcttcgaagctatcgtagatcagtctccttttgtgcctgaagagacgatggaggaacagaagacaaaagtgggtgatggtgacctctctgctgaggagatacctgaaaatgaggtatccttgagaagagctgtcagtaaaaagaagacaggtaggaggatgttcttggtcagtgtagctttctttctgctaaaatcctcctcagacaaacagtttttaatacatttgttggcatcttactgaatgcaacctagagttgatggctctgcctcagcccctcccaagaaaggcagcagaggtgggttcattgtgcctggggggtgcctagcggggctctggggagacctgagatctgtcccatgtggcatacacacatttctgtacctctcaggatctcaggactctcctcgaggattttaccattgtcactgctagtgctttttgtttgctttgttgttttttgtttgacacgctaacaccttagcat

SEQ ID NO: 102509 - DNA, 1095 bp, Homo sapiens
tgtgtttataaacggacagaaggaaggcttccagtcacagttggggatggaggaagtgggaccagacgacaaaggtagtgggcgcaccaagtacctcaagggagacaggaactttcctcgtggtagaatgtcaggaaattgcgtccgccagtcatactgtctgagaatcgccagcaggactctggcccagctggcactgggtgcttgttgatgggtttctgtctttttaggaagcagagtcttttgtgtagaggaagaggacagtgaaagcagtcttcaaaagagaagaaggaagaagaagaagaagcaccacctgcagcctgaaaatccaggcccagggggtgcagccccatccctggaacagaaccggggcagggagcccgaggcctctgggctgaaagccctgaaggcacgtgtggccgagccaggtgcagaggccacgtccagcactggggaggagagtggctccgagcatcctccagccgtccccatgcacaataaaaggaaacggccacggaagaagagcccgagggcccacagggaaatgttggaatcagcagtgttgcccccagaggacatgtctcagagtggcccgagtggcagtcatcctcagggacctagagggtccccgacaggtggagcccaactcctaaaaaggaagcggaaacttggagttgtgcccgtcaatggcagtggcctgtccacgccggcctggcctccattgcagcaggaaggccctcccacaggccccgcagagggggcgaacagccacaccacgctgccccagcgcaggaggctgcagaaaaagaaggcagggcccggcagcctggagctctgtggcctgcccagccagaaaacagcaagtttgaaaaagaggaagaaaatgagagtgatgtcaaacttggtggagcacaacggggtgctggagtccgaagctgggcaaccccaggctctggtaaggtgggagcacccacaggccagctcgccacagaggcactcactcgcgtccatggggctccactgcctcctgagaggaagggtgggggctggcggccaggcctctggactcagcagcagttagaatagggtgtgttc

SEQ ID NO: 102510 - DNA, 1072 bp, Homo sapiens
ctcagcgctgctccctcactaagagggccagagacattgcctttcttgctgtcgtctcaggcccctggcagcctattgtaaagaggatggggtgttgctcaataagtcccagggtcaagggaagctttcccctgccatctgtcatggcacagggaaggcgcacaggagaagctcctcgggcttccctgccctccaggcggcacacttgaacctgccggagccacccgtgtgtcggcagcggcactgggctgcccacacctctgagagccaagtacgagacccggtctctctctgggtggctgtcagttgctgcacacgcaatgagtgtcctgggcctgcctgtgagggacccacagccccacatgggcatcactgtcctccacaccagactgccagcgcagtgacgattcagctacaaatgggagagtcgatcttattaacagatcggctttgaaaggccaaaatccccattttgaagatgaagataaaagtgggtccttactctgacgaggcgttttcatcgcccctcttggcatggtgccatgatagcggtcgtgttgtgcgtgaagcctgagctctgccgaatggaagggctgtctgcaagtgcggtgcggaagaccgcgggccgtcgggtgggctggatctgcctggggctctgccttcccctcctgtgtgtgtgggcagcacaggaggctctgtcgtctgacccctcctccgcttctcacccctcgctcacgtagggaagcagtgggacttgcagttccctgaagaagcagaagctgagggcagagagcgactttgtgaagtttgacacccccttcttaccaaagcccctgttcttcagaagagccaagagcagcactgccacccaccctccaggccctgccgtccaggtacgcaccctccccagagtggcacagcacatttcaccacaagggcacagatgggcttgagctgacagtgcttcccatgccgggcctggagccccactgtggccctctgagcctgtccacagtggacaggttccacggccagggtagcataaggtctgagtggtctgggacccaccctg

SEQ ID NO: 102511 - DNA, 1041 bp, Homo sapiens
tgtgtccattgtccattgcagtgagattccatcataggcatcgtctcatcgatgtcatagagtcttcaagttagaagttcagaactctccagcaaaaggcaggggagtcttggcatttttcctcacgggttctcagtggtgaactgtttttaggacagttcaggcatcctctctgtttgcctttcttccctggatcgtagaaccctgcagcggtaatgaggcagtgaccgcagatgggccaagagtgtgggcaccactgaccctgggctggggggttgcgtgtgtgggacgctgggaaggacaaagggcggtcctggtgaagccccgacaggagggtcggtttcagtcttggccgcagtccctttggcctctccctatatgtgccactcagtaagcagcagtgtgggcggcataccctccagggcaggttctccagaaaaatctgactaagcgcctccactgcacttgcgtcactccttttgttcctgttatttctcttctgcagctaaacaagacaccatccagctccaagaaagtcacctttgggctgaacagaaacatgactgccggtaagtggggttttgccagcggcaagcttctctggagcacagctgcagctcctggcgcggctcgcagcctggttccacaaggcggtcggggaagaggggggtcctagctcctcactgcccatttctttatttttattttttttttttttttgagacagagtctcgctgctctgtcacccaggctgcagtgcagtggcgagatcttggctcactgcaacctccgcccccccaggttcaagcgattctcctgcctcaggctgccgggtagcgggtagctgggatcacaggtgcacgccatcacatccagctaatttttgtatttttagtaaagatggagtttcaccatgtcagccaggctggtctcaaactcctgacctcaggtgatctgcctgcctcggcctcccaaagatctgggattacaagcgtgagccaccgagcccggcccctcactgcccatttctgagtcagaagg

SEQ ID NO: 102512 - DNA, 1093 bp, Homo sapiens
gaggcatgggatgtggcctcactgccctcctttcctcagaaggctcttgggcctgctctctgcagggccttgagatggccctgcttcgtcctagcaagtgggtggggtcggcacccaggcaggacgctgtctaaggtgttgaagggacagctgtcggacccacttaatatggggccttgctctcatttgggacagaattcaagaagacagacaagagtatcttggtcagtcccacgggcccttctcgagtggccttcgaccctgaacagaagcccctccacggggtgctgaagacccccaccagctcacctgccagctcacccctggtggccaagaagcccctgaccaccacaccaaggagaaggcccagggctatggatttcttctgaggagcagcagagtcccttgtaaaagactgcttttgtacagaatgcgctataaattatacctttaagaatgtggggccttttttatgattttgtaagttcccataagttgtgtgcacgaggttctgagagtgcccgcaggctgctgcgtcctggcccctctgtagtggctgcgggcgtcttggttgaatcttttgctacaaaccatgtttgcgtttgagctctccaggattttacatttttgggtaacctcagtgattcccattggtgtaggaaatgagaccctctctgaagctgaggagagcacgttgatctgaactttaaatcaatcagtgctgctggcacaatgaaaggtggaactgcacttctgttgagctctcagttctgcggaatttggtactcattaccgtattcgccgtactaagttggtttctgttagtcttaacagtctgttttcttttaaaagcatgtagggcttcattgccatgttctgtgggtgtttggcaggttaccgatggggaagattcttgtcacagaatcagcaataccatagtttttctacatgtgctcagctgggggtgtggacaggtaggggtggggaaagaagaggctctgcgttctgggggctttttcttctcctccccctacccggtttccctccctgttttcctacctctacggcaagcccaaagtgtcttcccgggagc

SEQ ID NO: 102513 - DNA, 1044 bp, Homo sapiens
gctgggattataagcgtgagccactgcacccggctgtagacacattttttaaaagagaaaaagaaactgtcaatctttttaaataatgtatttccaaaatataatttcaacacgtaattaatattaaaaagtattaagatattttgcaggcttttttttctgtagtaagtttccaaaaccaggcgtgtatgctgatggcacgcgtcgcctggcactctggagtcacatgtggttgcagctatgatattggccatggcgattctacagctaaagccgagaggaagtttgtccagagaacaagtcggggtggggatctcagtagagggaaccgcacctgagtagaggcacaaaggagggaacagccagtgcagccaggatgtaggggggctggccagggacggccatgggggccgtgggggccgtgggcagggtttgggctttgtcctgtgcacacttcaggagccactggagagcacccaccaggcagcaggggaaggaagggtcagaggcccggatggaccagaggcgggagggcagccaggcctggggcccacacctgggctcagcgggcaggatcggaggaccggcttctggttgatgtggggagggcccagggagaatggggaaaagaagacagggaggtttccagagcgtgtcggcctctctcctcgtttcctgatccacctcatctccatgggcacgttttccttctgagaagagctgggaagcccgtcagcaggcgggcctctgtcctcacctccactaacctggcccttgcaggcgtcccaggcttccagggccagccccctggggtttggcaccctgcagcctctgactttctcttcactgctcctttgggagcacgtgccagaagagacactgcctccgtggctggcacggacgacgacgcccagcaggcagctgtctcaggaggacaggcccagctgcaggaaagggcagccccgggcttctggcaggggctgaggcagggaggccagccctacctgggggctggaggtggcgttgagtgggggtgtagggggt

SEQ ID NO: 102514 - DNA, 1105 bp, Homo sapiens
agctgtgacctccttgccgctctatgtttggacatgggagccttgcaggcacacacataggcacaaatgcacatacacttgggcacaaatgcacatacgggcacacacgtggacatgggcacacataggcatacatgcacacatacacacgggcacacacaggcatacatgcacacggacacatgcatacacacggacacacatgcatacacgtgggcacacgcacacacatgcacacacactcggatgcgtccaggtacatcctagttcttcacgccgtcgttactctcgggagtttcacagcgacccccgaggcggcctgaccgtgtggccctctgagggtgcagtctttccctttcccttgctgcggtgatggggaccccatgcatgccctgagcccccacgtcctgagcaaggccaccttgtgctctgcccctgtgaccctccctgccgccgtgcccaggaggatcagggatgggaggctggccctggcagaggagcggcagatctcagtgaccttgcccatcttctccccctagggaatcccgctggctccgtggtgatggaacgcatccggatggacattcgcaaagtggacgccgtctttgtgggcactggggacctgtttgctgccatgctcctggcgtggacacacaagcaccccaataacctcaaggtcagccacacgcaccgctcccctcctcgcccactcccacggcacctcatggggagcaggatatgagagtcctggtggggggtccctgctgagctgacagggcatggccctgagtgctggccccagttgtgggggagggcagtggccaggccatgacaggagttgcgcctgtcactctcacatcgcctcccatctccccttatttgggacctagggatgatcagagtctgtgagggcttgggtgacagatgtttcagaacagacccatgggggtcccaccaggattcagatgccacccgcttggcgttggcgcagggctgtgggatgcatggagctgttgtgtccttggtgacttgggggctgctgcagaggagtggcaccctgcagcatttcccacagtgtgaccacggcagtgacctgagggacgga

SEQ ID NO: 102515 - DNA, 1042 bp, Homo sapiens
gtgggccctggctgccactaccgtacagaggccgtgtcgcgctgggctgggcctgggtggcctctgtctttgcatctctgagaaggagtcgggtggtaacggttggggtcaggaagaattctgccaagtatctttactgtcattctgaccatagcctctttgttcccgcattcgaacttttggttcttactttgctgctcgtttagtccctggggatttcagatcttaggctgttgtttcaccgtatgggagggttgatgtgagcttgcttggagacacacggtgcagcatcagggaccttcccaggccccagcaaattcaagtcggtctgcagacctctcagctacccgcgggacctcttgtaacccatcggcatcttccaggaatccgccgagtgacttgaggaagatgctaacgcagtaaggtctgtgctgggccaagagcagctttgaagctccagagaaccaccccgtcaggttccttgtggaagctcccctcatccgtggtgcagcaggctgagcactgcgcgtttgccacgtgctgcccgtgacagcacattgagccacagcatttgtagacaggacagaggggtgcctgccccctgcccctgctggcacatttaacccttgtcccctgacctcagttctgtgccccaccaaatgcccaggggcaagaggccaccctggaagctgccaatcttccaaggtgggtgtggggcacggtgggggcgggcagctcccaggcccttgggcaggctggggtgacggcagaggccacagcaccagctctgacaagtcctatcatcctctgctcagcagtgacctccctggccccactttgcccagagtttggggtccccccaggtatagctataggcggcagtgcctgtccctggcctgccttgatttcagccacacccctgcagccctgcatcccagctctggggtgtgcagaggtttgtgtctccagggaacccacggctggagagaaatagggagatgcaggaagtgggggcccatggggcccccaagaagcggactct

SEQ ID NO: 102516 - DNA, 1020 bp, Homo sapiens
gtagtctgaatgcctgagttcactttcttcttttagtatttgagatatattacaggagagtgcagaagccctcagtataatgctggatgaattatcaccaacagattaaccttgtggccactgtccagcttaggaaaccgtcaaggttcgcaattttgaatttccaaaatggagtatggtgcctgataccttgtagatctcagtcggttttactgtgtgcgtgaagtagcagttacctggagtagccgcatagccacaggcgcggcaggttctgggttagaaggattgtttgaaggggagggccagattctgccccccagttgcctttaccgtaagtgggactttggtctcattcaggcagtcacgtttctgtggcttcctttctggcactcgaaggtgtgggattcatttggtccaaccgttgctgttttgatgcaggtggttttacgcacgacgagctgctgaaggtgtggaaaggactgttttattgcatgtggatgcaggacaagccactcctccaggtgagtggggggagcagcagagcaggtacagaagcagcgggggaggatggatgggcatctggtcaacccagtttttcttttttttttaagtcggagtttcgctcttgttgcccaggctggagtgcagtggctcaatctcggcttactgcaacctcagccttctggtttcaagcaattttcctgcctcagcctcccaagtagctgggagtacaggtacctgccaccatgcctggctaattttttgtatttttagtagagacagagtttcatcatgttggtcaggctggtctcgaactcctgagctcaagtgatcctcccatctcggcctcccaaagtgctgggattacaggcatgagccaccgcgcccggcctggtcaacccagttttaatatggccagagaccgtggggaggtcgtatagccttgacgcttggttcggcacggctggtgggcctgggcctttgttaggtgagtcttacacttgctgaggtgttgatgtg

SEQ ID NO: 102517 - DNA, 1061 bp, Homo sapiens
tgggccatattccatgcccactgaattatcaaggggaggctgtgaaatgtcccttagcaagtattctgggcgatggctggcacggtgatgtaggcagatagccagtgatctatggggtctcgcagccctcttcctcctgatggttagggggctgtgagtcccaaggctcccttccgctctcccacgtccctctttaaccgtgactctgtggcttagggcacagcctctgtcaagagggcagtgcctgctgtggttgtgtgagaggctgttgaccccagctgtctagaggggcctcccgtggttgtgtgagagcctgttgaccctggctgtagaggggtcttttggagcaggggtgaaacctccagtgcactgagctgagaccccctggaagccgactctctgtgatgagtgagtgagtgagtgggtgagtgggtggttgcgtgtgtgtcattgtgagagcctggtgcttcaggggctgagggcgtttttgttgtttcctacacaggaagaattaggaaggactatttcccagctcgttcatgcttttcagaccacggaggcgcgtgagtatgctctgctgtagttgggtgcatttgtagatgtcagaacctctgagcatcagagccaccagacccaggaggtttgtgttctcaaatccagagtaaggaatgcctaagggcaagagagcgccagctggtgtctgtgggtgcttagcatgtgtgcagtgctggtgtaagtattcaacatggattagctcatttacccaaaaccctcatttcgagcctaatgggctaatatcttacactttaaaaataaagtgaaaagccaggataatgtcaccaagagattggactgaattccgcctgatggtcctgaggttcctgcagttgatttttctgactcctctgttctctggtgaccggagttgagaagttcttaccctgcctgtctgtaggactcacttgaggagcctctaaaaatcctcatgtccagatcctggtccagcaagatccagttctgggggtagggcctgggcatcagcattttttatctatagctat

SEQ ID NO: 102518 - DNA, 1731 bp, Homo sapiens
ggctcatggtcctcggcccctttctgggcctccaccttcctttctctgcctgtgctgtcctgacgtgtcttccccagcggtacccagtggaggcagtggagaggaacaccaggcagggcgtctcgtctcagccaagcctttctctctgctagcaatcttgaggacagagggaaggcctgtctgaatgtttacacgtgctgcattttgtagctgacatgcacactcaggccatacgttctggtggtggtgctggtcacataactccctaactgcaagactgccttgcgctggaggagacctaggatcgttgatatcatctgcgtggactttaaggctggcatgtttgcagacagtggcgcctgcccgcacttaggttcccatcagagcgtgtaaccatgggagagtggggggcacggctgtcttggggctcatcgaggctgcctgtcatgtttgctttttctttcctcagacagatcgaggagctgctagagctgctgatgactgagatcctgcaccccagcagccaggcccccaacggtgtgaagagccacttcatcgagatcttcctggaggagctgaccaaagtgggcgccgaggaggtgaggctgggctccgacggggcggtggagctgggcgtttgtggaggaggaactgagctcccgctggctttccccgtagcttacggcagaccagaacctgaagttcatcgaccccttctgcagaattgctgcccggaccaaggagtaagtggtgggtggcctgatcgggcccgactccttcactgagttcttccatggggctgctgttgtgggggtgctgctccctcgagggatgaatctgtctcagagtggccgctggccgtgtgggtggggagaggttgcaggggagtcggcggcttccgcttgggaatccagcataacgggcctgctcaccggcctctgctctgcccctcagttccttggttttgaacaacatcactcgaggcatctttgagacgattgtggagcaggccccgcttgccattgaagacctcctgaatgaactggacacacaggatgaggaggtggcgtcggacagtgatgagtcctctgagggtggtgagcgtggagacgcgctgtcccagaagaggtctgagaagccgcccgcaggtgggggtcacactgcgcctggcttctcctcggggcctgtcctgggctgagccagtgcgatctcctgctgggttgctcctgccacctcctacctggtccccttgtctctgcccctctccacagtccatcctcagcatagaagccagagtgacttctgtgggcaccaagcacacgtcgtttcccctcatcccccagcctctgatgtgctccacgccctctccggacccctgggctcctcggtctaacgcatgcctctggctcagttggccccctagactcgttcctgccttggtgccgagtctctccgtccctcccaccgtctctccccccatcactctctggggctggactctttcagcctcctggcctctcccagcccccaacgcagtcctccccatagcgtcactctgtggcacgggatgtgaatcacttgctcctcgtgttcctcgttcctggcccgtctccccagaggacagcaagctctgtccatattgaccatgactgggttcaggcctgagacctcagggcacctgactgctctgtgtgcagtgtgtgtgaggggcaggtgtactcacctgcccct

SEQ ID NO: 102519 - DNA, 1065 bp, Homo sapiens
tcagctggttcgtttcagctgtggcgggtactgaacacgctgctcctgggcattagaacagggcgctttctcacacacattgtcaggaggtggtgctggctggggcctgctggaagcagcgagcctcaaaccataagtccccagcccccgagagccccctgacttctgccctggttctcaggcattttccctgaagatgagatcccagagaaggcctgcaggcgcctgcttgaagggaggcggcagaagaagacgaagaagcagaagcgtctgctcaggttgcagcaggagagaggtaggactagggggtgtgttagtcatggagccggcgtcctcacctgcttgcttctcccctggatgggggtcacctgcagtgtctccccctgaagcatgagtgccgagtcccccatcctgggtgcctgctatccacgcatcccggaaatgccctgtcctcggcatccctcctgtaggcctctccctgcctcccccacccaccttccttgtctgcagctcccccgagctgtgtgcgctgccctccctcccggtctggagacatcctcctggctgggctgcctccttccgtgcctccgtcttagatccaagccccgtccgctcctctcccgcaccctccagagattcctgagtctctccacgtcttccttccccttcttccctccacttcttccctccacttctgtccttgatttctggggctgccttccgtgttgggcctctggccacacgagtgtggttggcatgtgatgccctcaccaggggcaaccctgggtccgcggcagaccactcagggcctggagctgcctacctgcagtggagggggttgagcacagtgccgggcagggcagggggcccatggcaagaatggggtgcagaggaggcacatggtggctttgccccacactgggaagccttccctgttactctctccatgctaaactggccccagggcctagggattcaccccttcccttgcccagagctccgtgccattgaagccgtccatctcatttcccatgaggcagtggcctcctctttgtagccggccct

SEQ ID NO: 102520 - DNA, 1006 bp, Homo sapiens
cttgtttgacctcagaatcagaattgacagcagagttgtcatgaggataaaatgagatacaaatatgaagcacctgtcactgtgactgcggagggacctggcacccatcactgtgactgcggagggaactgggcacctatcactgtgactgcggagggacctagcacctatcactgtgactgcggagggacctagcacctatcactgtgactgcggaagggcctgggcacctatcactgtgactgcggagggacctagcacctatcactgtgactgcggagggacctagcacctatcactgtgactgcagagggacctagcacctgtcactctgaccacggaggggcctgggcacctatcactgtgactgaggtgggaactgggcacctatcacggtgactgcggaggggcctggcacccatcactgtgactgcagagggacctggcacctatcactgtgactgagggacctggcacctatcactgtgactgcggagggaactgggcacctatcactgtgactgcggagggacctggcacctatcactgtgactgcggaggggcctgggcacctatcactgtgactacggagggacctaggcaaactccagctcccccgaccagggctgtgtgcgtggaaacggtcctgccatccacgaaggaagctttctccttggggattcagtagacagatccccaggcgtggacaattgtcacagcatgcaccagcccagctgggacacgcacaaacaccagacggtctgtaattgaactctgattaatacacacagcaggcagcctgctgagaggcaagccatttcacagcaaacccggcaacagtttattttataacctatataatgaagaggtcgtggtttaagtgaaatttaaaaatgtctgtcctgaggaggagggttcagttcagatgtgcacgattcccctgtggcccggctgccaataccaactgcctgcacctccaacagcccccctggatgggtgagtgcag

SEQ ID NO: 102521 - DNA, 1029 bp, Homo sapiens
gcggtggctcacgcctgtaatcccagcactttgggaggccgaggcgggcggatcatgaggtcaggagatcgagaccatcctggctaacatggtgaaaccccgtctctactaaaaatacaaaaaaacccagctgggcgtggtagcgggcgcctgtagtcccagctactcgggaggctgaggcagaatggcatgaacccgggaggtggagcttgcagtgaactgagattgtgccactgcactccagcctgggcaacagtgagactccgtctcaaaaaaaaaaaaaaaaaaaaaaaaaaaaaaaatatatatatatatatatatatatatatatatttcactgagccattactacagggaaagttcctgtagagctgagcagtcaagacgtgtgacttcaccaaggaccagcacagagttcaaggctgccttccggctgtttgactgaacaggtgatggcaaggtccttccagcccctgtgggggcgtgatgagggccctgggccagaaccccaccaatgccacggcgctcgaggtcctggggaaccccaagagtgatgagatgaacgtgaaggtgctggactttgagcacttcctgcccctgctgcagacagtggcagggaacagggaccagggcacctaagaggattatgtggaaagacttcaggtgtttgacaaggaagagaatggcaccgtcatgagcgcggaaatccagcatgttcttgtctcactgggtgaggagatgacagagagaggaggagagatgctggtggcagggcatgaggacagcagtggttgcattgactccgaagtgcttgtccgcaggctgctgaatggctgagggtcttgccagcctccccagagcccaggcctttccctgggtgacatttcgtatctagcctgaggctccctagggcctctggttgcagcacctttcccatcttgtctctcttggatgatgtttgccatcagcattcaccatataaacttgctctctgtgtacccctcccacccaaaaaaatttcaaggctgg

SEQ ID NO: 102522 - DNA, 1081 bp, Homo sapiens
aatggcttctgcttccacgctttgccccccctctctggccttgtcaaaaactcttgtgatgtccctgttataaggtatcgccggtggactggtgtttctagatcgcagcgtgggacgtgattggctacatttgactgtttcctttttaatgacttgtttaatgtgagatctttagctgctccatctcattgcaagatttttgttacagtaaagttggactgagttttctaaagacagttgctcagaaatttcatgggaatttacttttggttaaccgaagagtgtttggggttttaaacgggtcgtttcaagtggtaaagtaacatgaccacgaggcgtctgtccttcctaaaaccacttcatcataatttcaagattgattctaaattaccaatttcaaagcgctgcattttaggcaagtgcattaatcgttcaccttctgacaggctttcatgtagtcatttacaagcggccatgttttgattatctttgtcaagcaaagtgcaggagacaggcagtctcataaccttggggcagtgtctgtgtttagttttggaggcgggaaggccgagttgatggtgaaagttggccattctttctgcagggccaaagtctgtacctggctattagggtgcatggatgctggggttaaattggccacgtcttttcccaagcctaggtagaaggattgcagataggatatgttttaaatgttactggtggtgaattgaaagcaacacaactatccttcagtgtgtgactggcagaaatctacctcctggctagcgtgccctgtgtcacttaagactcaaagtggagctgggtgctcttggtgggacagtgtgcctgcagcccagaggcctgtccccagtgactgggaaggctatgcatcattgttggagatggtctcgattcctttctgaaagcgggtagagaatgaaatgcataataaataacaataatgatgaattataaaatgagcagcagtaacaagctgtacaaggaaatacctgtcctgagatcgattactcacccctgactgtctgccctcctgattctcagccaggtgctgggagctgag

SEQ ID NO: 102523 - DNA, 1073 bp, Homo sapiens
aatgcaggctgagtggaggccccggccctcgccactctggagcgatggctatttcaggctccaggaggccgctgagtggttcccgggctggccctgcattgcggctgggcaggggccacacgtccctcccccgtgggccctgggtgcctggaatctggagcagagagagagagggaaggtaacagcgtggcctgtacatccctgcctgcaggcgctggccttgctgtccctgggtgctgcctgtgtactccagggcactctctttcctggagaggaggccgcgggagtcatcgcggggcagatcctggaggccagcaaggccgcccctcctcctaagtggcactgattgacaggggagaaagacagaggcttgttccccagaaaagcacagaaaaccagccttgttcctcagacaggagatgcatgtgccgggaggcaggcagggggacggctgtgctcggcctctgtgcagtgggattattagggacaaattccagaacaaaacttgggtttcatctaagctttttggggatttggggaaagcagaagaaaagagggagcccaggaggaggtcaatacaccgtgccaggaaatgaggaaaagctcagatgtgcagtgtcagcgcttttccatgaatcacctcttacctctagaacagcaagtgcgggaggtgtccaggtgcgggggggccacgtgccctcaggggcttccctccccagcccgcctggagacatcatcactgactcagctccggcaggcaagggtccctcggggtctaccactgggattgacgccagcaagtcggaccctttctcagaagcccagagggagggcagagccgtagccacagtttggaggcatctgctgggctagtgcatgttttaacagcacctatgacaaggtgaggcagcatgggtggccctgcaggtggcggtttgcatatgtgcacatccagccagctccgttttccagtctggggactatggtgacaggaagtaaaaagcctgcgatttggcctacggggtcccagggtcatcccggggtcgcaccttggctaccaggcttgagggttc

SEQ ID NO: 102524 - DNA, 1019 bp, Homo sapiens
tgtgggatgtggcgggtggccggggcagtgctgggcaggcaggtgttggtattcacaacgttgctttcttgaccgattattttcctgggagacttcctcagtcaaagggttgatatgcttgcgagctctcgatgcacgctatcagattctccaaaaacgtacagccagcttcgcctgcacctgcagcttctgtgatttgtgctcttaattgacgtggcgctttttttaggttgagtcgtttttcattgccaacaatcttctcctgcattgaaataatagcttgtaaagaagcctcacgcttcctttttctctgttgactcttctaggacgcgctccaggagatatataatcagaagggcatgtttccaggggagcagtttaagcctgcccggaggccgtggaccctcctgaacttcctgtcctgggccaccattctcctgtctcccctcttcagttttgtcttgggcgtctttgccagcggatcacctctcctgatcctgactttcttggggtttgtgggagcaggtaatggacactgtcgctaacagctcacactctgacgggcctcacagtatcagccacagggtccgggacctggtgactcatcacagtggctgtgggaggcaggggcctggctgttatggaccctggagccaggatccccccacggcctgcgggcctcagagcctggattcttgcactgagctgagggtcgcctccccagagagccgaacggccgccacctggcgccatccccactgcagccccactggctggcgcccttgaggatgccgacgagagggtccccgagagggtccccagcccccctgtctgcttttgggctcttaggggtcaggctgggctggccattcgggaggtttaagcaggacatcatcattcagctcctccccattgacccccagtgacttccccactgtgtgcccaccccaggcacaatgccaggcccaccacgactcatcagctagcctggggccgaacagacacccagcctgtccctg

SEQ ID NO: 102525 - DNA, 1049 bp, Homo sapiens
gccgcccctgccaggggccttggtgggaggggtcctgagaggcagtgactgccaccagcctctcccattggactacgagatgacttgaggccacccacagaggacaggatgtgacctgcttacatccgagggtcctgctcgtccacctctgtcacctgttgggtttgcaaggccgagctgttagaatgccccgaagcccttctgctcccaccagccaaagacccagaggggcaggcagggcaaggtccacgtgtccacctgcctcggacccagccggtcagaagacgtgcccctcacccctgcctgagcagaccacggtctgagagggctgtctccccgcgggccacacctactcactgacagcagaggccactgggtgcggggcagagggacagggtctggggcagaggaaggaagccccagtaacacgttttacagcaaaaaggcaaagtcatccgtctcacctcttctctctctctcctgtcttgaaagcttcctttggagttcgcagactgataggagtaactgagatagaaaaaggctccagctacggaaaccaagagtttaagaaaaaggaataattaatggctgtgactgaacacacgcggccctgacggtggtatccagttaactcaaaaccaacacacagagtgcaggaaaagacaattagaaactatttttcttattaactggtgactaatattaacaaaacttgagccaagagtaaagaattcagaaggcctgtcaggtgaagtcttcagcctcccacagcgcagggtcccagcatctccacgcgcgcccgtgggaggtgggtccggccggagaggcctcccgcggacgccgtctctccagaactccgcttccaagagggagcctttggctgctttctctccttaaacttagatcaaattttttggtttttaatcagttatcttgggaacttaacctggcccctcacctcttctgcaccccccgcccccgaaactgtctcgtaatgaatttctgctgtcctcctgggagtggacggccgggtcccgtcccccgggagc

SEQ ID NO: 102526 - DNA, 1027 bp, Homo sapiens
tgtgcctgcccctttctctactgagctagtccccaaaccaaaggcaagccccctcgggcctcgggggatggggccggccacacccctgactccgccctggctctgccccatacccctgccgtggggccgacctgggggatgcagacatccggctccgtattcctgcctatcggggccaggatgcaaaaacaatttttgcgtaaaagatgtcacactgatctgctggagtggggtggacacatgaattcagttttatcatgaacactcgccactggctgcttgttaattcagggataatggtggcattcttacaaactgctcgggaaatagaatgacgggaacacttttagggagcccaggaagttaccagggacattggtgtcgccggcccaggcaacagcagcgtacgcttttcaaagatcattgagttgtcttagaatttgaagctgtgtaatgacaatgtcacctggagttcgtctccatttcttaactttttgttgcacaagtatttggacagaagtcgaactgtgaatgagatactgaaatgcactaaattgtattacattaaactggagttacttgatacaatgaagaaatgcatctgatctacttgtatttattgtctcagaattgtacgttgtgacaatcaaatgttacttgcctaaatgccaggaaattcaactggccttttaatcagcaagatcgccagcaagtactgtaactgtaaaggaaaatctctctctctggagaacccacacaaaccattgacctgagtgcgcatgacagccactggcttctttttctatgattgaaaatctgccatcgctgactgttggccagtttcaaagggacccattgtatacagggtgcaaatgtattatacggatgtttccttttgtacacttcatttttacaagttttgctactcacaagctttatgtagtggaggatagaggtatttttggtctttagaagcttgtcggggtgagggctgctaacttacacttcagaggcctgtgtcccaaag

SEQ ID NO: 102527 - DNA, 1029 bp, Homo sapiens
aggcagacacaatgtcccaatacataatttaacaggctctttgcagcctggagacgatgtaatgggttaccaggaaaaaccatttgagttcaagttccagcaacttttcaaaaacaataaaacaaaataaaaaacaccccaaatgctgcctcatgaaaaaaggtactaaaaaaaaaaaaaaaagaatgaacatcgattgacaggactagcatcatttcaccatgattcattaaaagaaagtgccaaaccagtgtttgtgctgaattcaagcattttctaaattcccaagtggaaaaaaaaaatctcttataggtctgctcagagggaaaataggcttgcagtccacttactgcccacgcaccaaaggctgcctggaccagagccggtgggattggaggaggggattctgcctttgcctcccttcctccagaaagaacactccctaacgtgggagcccatccagccgcacaacgctgtgtccacgtcttcgggaaggggaatggctagtgtctgtcttctcagagcagctggactcagttctctgtgagaacagtacaaagacatagatattcctcggcttggagtctacacttggtattgtcgggtttttattttttatttacttattttttgttttttgagacagagtctagctctgttccccaggctggagcgcagtggtgcaatctcggctcactgcaacctccgcctcccgggttcaagcgattctcctgcttcagcctcccaagtagctgggattacaggtgcacgccaccacgcctggctaattttttgtatttttagtagagacggggttttaccatgttggccaggctggtctcggactcctgactcctgaggcccacctcagcctcccaaagcactgggattacaggcatgagccaccgtgcctggcctcgtcagggtttttaattataaatttaaattttatcgatttgagtacatgtgaagtggcatctcattttcattttaacttgcatttccctgatgtctaatgagcgctgagtg

SEQ ID NO: 102528 - DNA, 1019 bp, Homo sapiens
tacaggcgcatgctgccatgcccggctaattttttgtttgtttgtttttgttttttttttttttcagtagagacagagtttcaccatgttggtgaggctggtctcgaactcctgaccttgggttgtccacctgcgcagcctcccgaagtgctgggattacaggcttgagcccccacccttggcctcaagcaacatagtgaatgttaatctctgcatggatggtacactgtcctagaaggtgcaaactttcattcattggagtctcagaagagaagggggcttcagtagactgtcaaagttaacttgaaaaatgatcactttaaaagtgaaggtaaaaagctgacttcatacttcccacttgaaattatgttgtggtatatctgggactgaagctttaggaagcacttggcctggtttcactttatgccttcatcttgctcctctctttcagctatacatgttttgaaaggagaaggtggtatgaacaattgctttaaaaaaatccacccagaggctaattaacccttaactttttaatattatgtacatagttctcttagtaggcaacatttttgttttcaaaaatcttttaaattcttacttgaaatggtattacctcagatctgttcattttaaaatgaaagtagagtttatgcatgttgtgaattttttttccatagaatgtataatattttacttcagtgaaaatgcattctgcttagacctttctgggaagaatatagaatgtaactggttcaggtgaatttaaaaactgtgtatatgtagggatagaagaatgaaaagttcccaaagattaagggtaattagaatagattattactttaaaacctagctgattatttcacttcattttattattattatttttttagagatggggtctcgctctgtcacctaggctagagtgcagtggcatggtcatagccgactgcagccttgctgggctcaagtgacccctcccttagcctgccaagtagccagcactacaggtatgaccc

SEQ ID NO: 102529 - DNA, 1061 bp, Homo sapiens
ttggataaaatacaagttgttccaaaaatacgaatgcaaccctaaagctttcgtaattaaaactgcactttggacatttgggacacacttttcttcttttatggtgacataattatagattccgttacactgaaacccaccgtcgagtctgtagtggccctggttaaatgcagtacttggaagaatgtattcctgtgcctgtatccttgaggaaaatgaaagattttgtggaaatggagctttgacctgtacacgtgaactgtgtttaaaataattcctagaatgtttctgagcagaatagcgtagttatgatttggggttaatatatgtgctctgaactcatgcataccattacattatttgttgttctatttcccctcttctgatgaatgctgtttagttgttttctcagtgacttcaaacaattgtttacaggtcctatggccgggctccgaagatgattcacctagagtctaactttgttcaattcaaagaggagctgctgcccaaagaaggaaacaaagctctgctcacgtttcccttcctccatatttactggacagagtgctgtgtgagtaccagcaggggaagaggatgcgcggtgggatggggttggagatgcgtggagagtgctgtgtgagtaccagtgggggaagaggacgcgtggtggggtggagttggagatgcgtggagagtgctgtgtgagtaccagtgggggaagaggacgcgcggtgggatggggttggaaaggtgtgggtctaggctttgttgagccagctgtaatttttcaaatttactttttaacatactctgttataggttgtcccttcattccttggccaagtgcgggacttgctgttgcgtgtttgcgccctggtctggcgtgctgtgctcaccgtggcgccgagcgtggtcgtgttcccatgtctccagtcttgtgagctgtctcactgtgccccacggctgccaggcttagtctaagctgtgtttgatcatgactttcagctttgttttcatgacccctgtgttcccatcgtggctccattgtccttggtcatctg

SEQ ID NO: 102530 - DNA, 1016 bp, Homo sapiens
tagatatttgttcttagattaagttagctttttaactcattggattattggattcagttagctttcccccctgcatatgaaaatacacaccctcatttgttaaaatgagctttcaaagaaggtggtacactttcccactcaaacttattttccttttgtggctggctgggtgtcaaaactggtgtttctcacccactctaacataaagttttctctgacacaggatatcctgtaagttccactaactcaacaggatttggcctgtggaaagtacagctatttgtcacattttttagtctagggcagggcttaaatctcgtgctgaatgtctctacaatgccacaaatacagtttagataagttgaaaataccttattaaagttaaatttaagcatcagttactcagaaaatcacgaattgagagattctgagggccttgtgaagagcccaagcttagaggtttaggcacaagagcagggggtacaagagggaaagaagtacaggcctttctggagttcagagagaccgctgcaccgcgctaccgcaggaagctaactgcaaaactgggtgacgtggtttcaaatgcctgattctttgactctaggccaaggaacctggaacgtatacactcaggcagctgtgcgcctcggtgggctccgtgtggttcgtcctccctcacatctaccccattgtgcagtacgacgtgtactcacaggagccccagctgcacgtggagccgctggctggtgagtggggtccccagcctttgaggaggcgtgctgctggggcagttctgaggagacctgctgagatgccaggcttctcataagttttagctgtgtctgcctttaagagatattttgggtaacataatggaaattttgcctgggaactagctgactgcctcttttgtttatctgaatgtttgctttcctgtaattgctttttcatgtttaataaacatggtgtatctgaaaataagaaacacagaagaattagctctgagagtggaaaaa

SEQ ID NO: 102531 - DNA, 1051 bp, Homo sapiens
gaacaaaactccatctcttaaaaaaaaaaaaagttttcctttgaaagggttgattaaacttgtccgtctggcatggcatttgagaaattcaaagctattgtcctttctgataagttctaaaattggaaggagttgctataaacaaatgattgaagaacatgtggcagctgaacaagagtgagtgaatgtctcctttgttcgggctagcaacgatttatttatttgcctgtttcttctacgtggaaaaaaatcacaaagggcatttttctgttattcccccattccccctatttttctgcatttgtgcctcttgtgtggccaccagcaaaggctgtcagatgtgggacacagcagtcagtctctccagtgattcttccattggaacattgtgtagagaagctgaactcgattcccgcaggggagccgaagcaccagccagcaggccctgccctccccatggcccagcggctgcagtgccaggctcatggcctggctcctgcttcctgcctagtgtcccctgtctctgtccactctccccccggtcctggtatcttgcctgccttctgtcttccctgcagcaggattctcagaggcctcagctcactcctgcctctcattgctgtcttggagtgagggggagccacctgactgctgactgttcttaacccaaaagcccgtggcctgaagctgaaaaatccagagaaggttttgaatatttgagcagcaccagcacagtcaagttttctttacagtctcttcttaagcctcattatgtgattctcttctactactaatgggcaggcaaattttgtgaccctcagagacgtagtcatgatcataatccctgacttgctgaaccaagatgggtataagactccttgactcacaggattcttttttccccagcaaggttctccttcaaccctgtagtccacatcattgagatgaaaagttagggcagaagggaatggaagtagaaggaattcatggagatcccaaaggagcaaatctttcatagtaaaagaaatagagcccctttcaccccattgcg

SEQ ID NO: 102532 - DNA, 1044 bp, Homo sapiens
gtggagggtgaggctgcagtgcagctgctggggcaggggaccctggcacgtgactctgaccttgcctcttctctgcaggtaccgaaacttccgcaccttcacctctccacgccccacccagttctcctgtgtggcggtggatgcgagcggtgagatcgtctctgcaggggcgcaggactcctttgagattttcgtgtggtccatgcagacaggcaggctccttgatgtaagcaccctgaggggctgggctggggctcaggaggggccctcctgtctcctgggagaggagcgcagggagctgaggttacactccgagggcccatgcccctggcccagagctgcccagagagccgcctcggccgccacctccactcttcacgcctccttgctctacggtaggttttgtctggacacgaagggcccatcagtggtctgtgttttaacccaatgaagtccgtcctggccagtgcctcctgggacaagacagtgcgcctatgggacatgtttgacagctggaggaccaaggagacgctggccctgacctctgatggtgagcacgaggcagcaggcaggagcagcggcctggggaccagcagcatgctgtcacacccactgccctgttcctcgttgtgggtttggtgtgaaccttctggtgggaagcagggggtggcttttatccagacctgctggtgtggcagcccttgaggttggcagtacctaggagacagcagattggcgagtcaggccagcgtggcttccacaagtccttgtggggctcccgctctgtgggcaagtacgccaggcaggagagaacagctccccgagggtgaagggctgctgccgcagctgcttcctgattttcggagttgctttggagctctgccagggctgtgtcactgggagaaggacacagggaccatggggggcccagacgctggatgcggccagtcccggaatctgcagactgggagaaggatgagggggccataggtgggcccggaagccagatgcggctgcccagggatctgcagactggcctcaggc

SEQ ID NO: 102533 - DNA, 1878 bp, Homo sapiens
aagcaattctcctgcctcagcctcccaagtagctgtggttacaggcacacgccaccacccccagctaatttttgtatttttagtagagacagggtttcaccttgttggccaggctggtctgaaactcctgacctcaggtgatctgcctgcctctgcctctcaaacaaagtgctgggattataggtatgagccaccatacccggcccagctcctttagatttattccctcttatgggatgtttttagagttcacgtaagtgcattgttccttggacctcctgtctaggcgttcactgccaatctgtagggttgccattggctgtcaggaagagtcctgcacagagggtcctgtgccctgcagatgcgatggggcgcttccttcctttctcatccatttatctttcagttctcctttcctatgtaaagtgatggtggcatcacttttctcctttattccattaactcagaaaattaactgattcagagcgtgccttcctcccctctcgctccacaacaccacatagctctgcagcggtctcttcctaagtgtttggtggaacttgctggtgaagccatctagattgggcccagcggaagggctgagctgccaggatgaccccaaagggatgggatgttacagttgggtccttgggtccttgaaggcctttgctgccccagggctggatggggcagaaccagattgttggggcagggaaaagaggaaaaaaatggctgctggggtggaggaaccggcatgtccagcccctgctgcttttctcaggggtcacagaggaggtggttgggtgcaggacaggccagggcctgggcgttgctggcattgaccatcccctgtgtgattgacagctgtagctggaaccactataacatgcagtacgcactagcagtttccaagcagcggggcacaaaacgctccctagacccgctgggaagtgaggaggaggcagaagcatctgaagatgacagcctgcatctgcttggaggaggaggcagagactcagaagaagagatgctggcctagagccagccggttgcagcgttggattgtgccggctaagacctgccagggagatgggacccttgtgccacctgggccagcaaagaggaggggtccagagaacagctgaaatactgtcactagtggtagtgacttgcttttcctgtgcacacatgtagcccatcaggacagcgagccgacgggtcacgccaggggccggcacgcactggcacctggccccaggagcggggccgtgtgaacggtgatgaatgttgaaaatgcgtctcagagaggtattcacatgaactttgtatgagacttatttatatctttaacataaaggtttgataaagaacttagggattaaaaaaaagatggagttttctaacgtgaggatgaagtctacacttcagattaaaaagggttatgttgtatcctgctgtcttgtgggggctcaagacctgcctgccttaccaccagggcctccgtcctggggaagcaggctgacagagcagggtgctcctgctgtctagcgggggctctgccttgtgacctgtgcatatccttggggtcaggggcacagagcctctccctgacctcttggggatgctttggagtctggggctgggattggcctgtcttggtgagctcactcagacctgcaccagctctgcgtgggccacacggaggaggagacagctcctcccctctgcagtgcccttgggaatagtcatcatgagagaggcttgggtctccatcatggtagggcatcctggtccccacagctcagtaacagcagcctccagggtcaggacctgaggctgacactgaggtgggcacttcaccgactgccagtgctgtct

SEQ ID NO: 102534 - DNA, 1125 bp, Homo sapiens
ccaaccgacagtgaattggaatgggggtgtgggggacgtttggcttggtatggaaccaactgtaactttttgcagagcaagtaagatattaatatacattaggaatttgctcctggtacttagctaaaatcctgtttttaaaaatgtgttaacacaaatctgagtggggcacgttttgaagagttgtctctggttttcccccgtgcaggatcctggtgcacctgagccgtggaggggctgaagtccagatctttgctcctgacgtccctcagatgcacgtgattgaccacaccaaggggcagccgtccgaaggcgagagcaggtgtgggggtgggattggaacttgcttcttgtctacctcccacggtgcagcctttttttgctggcttagcttaaaccaagtcttgtgtgcaaatgaacgtccttctgagcagctgtgctcgggctgttccagaagtaatgctgccaaggctcaggagtgccttccttccagtactcacagaaggactgaaaatggcgaccggatcgcttcccactgagtcaggctgctcataccttggtcttaagcaaaggtggtggttctcagcttggtcgcccaccttcttcccctgtctgggctccagatctgttttgctggttcccagcagcatgtctgttactgcggtgtgtgtggttctggcctgtgtggcctgagatccccttcccttgcctgtcctgcctgacagccctgtgcaggccattccaaggtgccttccaactggcctcggaccacgagaggtcggagctggagattcgaggaagaagccatagctgcctcctggggctgtgcttctcaccagtggggacccctgtgatttcttttcctgcctgggaccctggcttctgcacctggacttgcaccttcggcccccacacctgggggctagcagcttcctgcggtggctggccttcgggttgcttcactggtcctgagtcctggcttcttaccttcccctctgagtcccaccgtcctgatgagtgcacagaattctgtctgctttagacactcggagagacttccatttcccatgggccttgactgcagaagattcagagtgatttggcgcaggttctgaagtgctgatc

SEQ ID NO: 102535 - DNA, 1002 bp, Homo sapiens
gcccccaccaccctcagcagccccaccccactcaaccctgagggtccccagggtcctgatgaagacctccgaccccagcgccaggctcctcggagcccaacagtcccaagggggcaggagacggggtggtccagtgctgaggggtacagccctgggccctgaccagccccggcacctgccatgctggttcccggaatgaatcagctgctgactgtctccagaagggctggaaaggatgctgccaggtgacccgaggtgcactcgccccagggagatggagtagacagcctggcctggccctcgggacacattgtctgccccggggctatgggcaaatgcccctccttcttacttcccagaatcccctgacattcccagggtcagccaggacctgttacagccctggtcacttggaactgacagctgtgtgaggcctgcacttctcagacccagacttagaacaaaaggaggagtgaggactcaaggctacaatgaggttccagtacttgttacaagaaattggttttctgcaaaaaaagtccctacctgagcctttaggtgaatgtgggatccactcccgcttttaacatgaaagcattagaagatgtgtggtgtttataaaagaacagttgtcatcaccgggcattgattggcagggacaaggagctgcttgggtgtggaaagttggggcgttggaaagtgggctgtggtgcccatttgcagtgactgtgaagtgactccaggacggacctgcgggggcacccagaggtcctaagccccaggactgagggtcgtgcatcaccactcgggtgtcccgggaggtgccctgggcccggggacctcacaggcaggacggcgacactaatgcagggagagggagtctggccccagcttttcctatcagaggcgattttccttcaccaggggatgggcaggaaagaggcaggggccccagaagcttctgtccctcatgcctgagggcacgggggacacttggaggct

SEQ ID NO: 102536 - DNA, 1186 bp, Homo sapiens
gttccgcacagggctgtcccgtcactcacctgaccctgtcacgggcacgcctgatgttctccgtctccccagcattttaagtgacactcctactatatgtgccctgaaagcttttttttttttttttttttctgatttcctacaacttcttggcatctgtccccaggaaggctagaccagcctcactggcgtccctcgctccccttcatcctcacgccagcatcactgtgtttctggggatttgttaccgcgagagctagagagtggtgagaggctgccagcccctcggacttgctgtgctgggcaggagggtggtggtcctggccccggaccccgaattcccatggagaacagaggcaggcaggctcctggctctgccttcacatttctgtgatgggcttaactacctcctgctcatgggaaccagcctgttcctgtttggaagatacaggtaactccctggtggccccgcctcacctgcctttctggttgttttttccagtcctggactgctcttcctgctcttcagcagccttcgagctggtaagttcagggggtgctttgccatggggcgcccagctcagagatgggctctccggctgtgtggactgctggccgcagggcactgggagcagcctcaccaggctccttcttgcttctcaagtggtcctttggagacagttggaccctaaacctaggttgctgcacaggatagaagcgtttccttaaagggaaacacttctgcaaactccggagttcttgtttgactccgtctttgttgcgggcagaatgcagttcctctgagccagggcttcctgggtcccctggtctccctgtcccaggcagcagccctgctgagccctaagagccaccagcctctggaagagccaggaataaggacgaagcaccgcagcacaaacctgaaaccttgccaagccttccagcccagagggctttgggggcaggggacacacacagattttcctgcaggtgccaggtgcagtggctcactcctgtaatcccaggactttgggaggccaaggcgggtggatcacctgaggtcaggagttcgagaccaggctggccaacatagtgaagcccgatctctactaaaaatacaaaaaattagctgggcatggtggcgggcacctgtaatcccagctacttgggagggtgaggcaggaga

SEQ ID NO: 102537 - DNA, 3133 bp, Homo sapiens
acctctgagcgccctgcccctaccccacagccacccctatcccccaccccaccccaagggcccccctctactgaaacccccctcatctgccccatccccagtcctcccatctccacccctcccctgaaccccactccccactgaggtccccaaaccccacccctcactccaccctgagggccccatcctctgaaccccaatcccccagccccactgagctcttaaccctccccacctgagggttccctttccctgcccgtcccccagcttcctagctccccaccccaagtgaccccccgcagctcctcgcccctcccactgcaaaccggcactgaagggctgccccgcccccgcccctccccgcccccgcgggacacgcccagattctttgcccccatagcctggtgacctctggccacccgctgtcccaggtgggcctggatccttccagctcattctttgcctgcgccgtccctcgttccatggcccagtcctccccggggaccctgagcctggaagccccggaccactggaaccttgaacccaccagctggctgtacccggagccgtggcagcagccctgtgagtctctttcctactccctgaccatgctgccttcaagggtgcggctggccaagaccatccccaggggtccctgctgggcctgagggacactgtaggaggctggggcatgggagtccctgaggggtcgaaggctgggcccagaggaaagcaggggctgcagcggccattggccccaggtcctcatgagggccctgccctcccctttttgccccatcttccatgttgtaacagggccaggcaggtggggggcacgcctcaggggacccttgagcccctctcagggctggcactggccttggctgtcctgcccctcatccctgggttgggcaggtgggtgtcaccgcgggggttcaggtggcctgaactagtcaaggtctgctcagcaagctgcttcccgtgctggggtgcatcagggatctgagcaggggctgacggctttctcacatctgtgtccgtgtgtcctgacacagcatccccatggcggccatcccagccctggacccagaggccgagcccagcatggacgtgattttggtgggatccagtgagctctcaagctccgtttcacccgggacaggcagaggtgagggctcatctgcttattggaccagtcacttaggatgctgatcccaggcctggatgaggtctggagttccaggcttctggagtattcatgcattattcaggcacccgggctggggcaggaggttccccacccacagtcttcccccaggtatgggcgtttaacacaccaagataaggtgtgagggcgggatggcaggggacctcaggctcctgtgactttggaaaacgaattgtgatgctcacttcctggccgaatttaaattaagagatcagaggaagaagaaaggggctacttcttatcttcctttccagatcttattgcatatgaagtcaaggctaaccagcgaaatatagaaggtgagtgtttgcatactggcccacaccagacaaaagagacggggcacagtggctcacacctataatcccagcactttgggagaccaatgtgggaggatcatttgagcccaggagtttgagaccagcctaggcaacatagtgagactctgtctctacaaaaaaataaaaataaaaattaaccaggcatggtggcatgcacctgtagtcccagctactcaggaggctgagttgggaggattgcttgagctggggaggtcgaggctgcagtgagctatgataacaccactgcactccagcctgggtgacggtgagatcctggaaggaggcagtggacaccactgtgccacgtgtatcccttctccccctcccaaggcccctgtagcttcatttaaagcatatagtttaatgtattttagtttatttacagagtcagcaaccatcatcaccatctaattttagaaggttttcatcaccctgaaaagaaaacccatgtctagtaacagtcactccaaattcccccttcttgcttcccttcttttaactctaggcaaccactcctcgactttctctcaacgtgggtttgccttttctggatcctttgcatttccgtatgaatttaggatcagcctgtcaactcctgcccaaaagccagctgggattttgagagggctctgcagctccatttggggactcatgctattttaacaatattaagtcttcttctttttttttttttttttttttttgagacacactctcactctgtcccccaggctggagtgcagaggcatgatcttggctcatagcaacctctgtctaccaggttcaagtgattctcctgctcagcctcctaaagtgctggaattacaggcatgagccaccacacccagccaatgttaaatcttctgatccatgaacatgggatatctttccattttgttccatcttccttaacatcttccaacaatactttgcagttttcagtgtataagtctcatatttgtttggctaaatttattcctaatcgtctgctgtatttgacagcactgggaaaacacagtgtgctttgaatgtttcctttagacatctgcatctgctgcggaagtctccaggttcacacacagcaccctctgtttgagggagggatctgcgccccatgtaaggtaggcagggaggctgggggtgactccctcatggcctcagagcagggatgacacaagccagccttgctttgctccttccaaggacaagttcctggatgccctcttcctgtacgacgatgacgggtaccaatcctactgctccatctgctgctccggagagacgctgctcatctgcggaaaccctgattgcacccggtgaggcgaggggcctgcccaggggggtgaaggggctgaggacacacccatcctttcagctactcattctggagtgtgggtggattttcttcccaaatggatgatttccctgagagcttctgatttctgtctccaatgcgtcatttggcatagagccctgagctatgggaggcgggtgtctacggttggcgattgtgatttttcttttcggtgttgatattgccacatcgctgtgcaggggagcgatg

SEQ ID NO: 102538 - DNA, 1017 bp, Homo sapiens
cccgtgtgtagacgggggaggagggaggaccacagagccaggaagtgccacagcctttcccactcagtgtggacgccttccaccatgccagccctccgcccccaccatgccaggcctctgcccccaccctgctgccctgggtttcagggtcccagcagtcactgactcctgggtggtgccgggcaggcgcccgctgcccctctgatgctgacccttgggttccagctccccccggggcttaggtcggcgggagaggaggtaagaggtccacctggggaacccctagccggcatggacacgactcttgtctacaagcacctgccggctccgccttctgcagccccgctgccagggctggactcctcggccctgcaccccctactgtgtgtgggtcctgagggtcagcaggtgagcggggagtgggggtcagggtgggctcttcaaggagcccaggacctacggggcggatgaattcacctgaaacaggaggagagggaggccaggcgagaaaggctccgggaggcacagggcctggggctgtggggggagcgtggggggctgcggggggaaggggacgctcctagacctccactccagctcctggccctgggcattactgctccccccacaaggcaggacaatgaagggggggatgtcccagcacacgtgggagccctcccctccctgcctcaattcccttccctgcacccctgtgggcaccgcctttcaggagactcccgcactcagccccaaaggaggccaggcccgccaagcaggagagaggtgcgggcgccaggcttgcaggcagcagcctgagggtgcttgggtcgcccctgcctcctggggatgggactggtcccgctgtcctgcagcctgcgtggcaccgtgaggctcctcacttgcgcctagacccgccgtccagccctgggtggtcccaggggagagcgcacagggctcgggttcgggttcagctacatttcccccggccccccgcgtcaccccgcgctgttgcctccc

SEQ ID NO: 102539 - DNA, 1074 bp, Homo sapiens
ggcgcggtggctcacgcctgtaattccagcactttgggaggctgaggctggtggatcacctgaggttaggagttcaagaccatcctggctaacatggtgaaacctcgtctctactaaaaatacaaaaaattagctgggcatggtggtgcgcatctgtaatcccagctactcaggaggctgaggcaggagaatcgcttgaaccaggaggtgcaggttgcagtgagccgagatcgagccacggcactctagcctgggcgacagagcgagactctgttgcaaaaaacaaacaagaaaaaaccccaaaaatcagccaggcgtggtggtacatgcctgtagtcccagctactcgggaggcagaggcaggagaatcgcttgaaccggggaggcagaggttgcagtgagccaagatcccgccactgcactccagcctgggtgacagaacgagactctgtctcaaaaaaaaaaaacagacttgaccaaaaaaaaaaaaaaaaaaaaaatggcccggcctgcctatgcctaccttcatctcgccctggcctgggcacttttaattctctgggccctttgtctagtgccccctccctgcccctgcaggacaccgtgccctgcctttccctggctggtgtgtttggacgttggtttcctgttatcgcaggtgaggacttagcttcctggcccgccacgcctccctgacatggcctcctgtttggagccttcaggctcatgcttacatccttagctgatcattaaactttgtgaccatttcatgctcactgctttcttgcctgggagctaatggtgaggaaaggtcactgggaaccagcgcaccaacctcagacattgattttgttccagccttttttcctgggcaggggtggctatcacctgctggtaggcagcggcaggcccactgtcctgcctgccctctgactgcggtgtcggcgactgctgcccgaggtttattttgagaaagaaaagccgattaaagggccattaaaaaggtcttttgaagattacagcttccaatgaggttaacagagaaaatttcctccttcaggccgcagccagtcc

SEQ ID NO: 102540 - DNA, 2004 bp, Homo sapiens
tctgctgccatggaattgttgggtcgcagggtcatggggttgccaggggccaggaggacctggagacgtggccgtgctgggtcctgggggagccctggctgaggctggctatgaggggccacgtgagcgcacctggagctgctgaggcttgagccctggaggccctggccggttccctgagttggtacagggcctgtgtgtgcacgtgtgcacgcacatgtgtgtggcaacctatgcgtgtgtgtactgtgctttccagtctccaaagccttccactctattaccttggggcttcccaagcccaggaccggacggacatcatcctcctctttgtctctccaaggagagaggcccagggaggtagggccacctcaggtttccagagaccccggggcttctgcctctcactctgcagggtctgccagccccttgctgcccagtcctggggtccctctggtgatccccaggggctgtctgccgcctgccatctctcctgaagtttctggtctcctctgtgcagggcggcactatcattggcagcgctcgctgcaaggcctttaccaccagggaggggcgccgggcagcggcctacaacctggtccagcacggcatcaccaacctgtgcgtcatcggcggggatggcagcctcacaggtgccaacatcttccgcagcgagtggggcagcctgctggaggagctggtggcggaaggtgggtctgtgcccggcgcactgtaggccctggggttttgttttgccgctgctgccaggcgtgggaatgggcaggacagagggacgagggatccctgggtgccccgaggcagaggaggggctgtctggccgttggccggggaggagtagtgtctgccagcacgagctcagatgtctcccagagatggaggtcagtgctcaagcctgagggagggcacccaggcagtgcatggggctggtggaggccggtgttgctcaccctacgctgcgtagacaagtcttctctgtgattgatccgagtgagattctggacatgcatggtcacagtctgcagaaatagagttgaagttggggtgacataagacacagagtcccgagattgctgcttggaaagtggcctctcggagccatgtctgttccatgtccctcatgtgggggaccctgatgtgaggccttggccgctctgcaaggcaccccagaggtcccccgtctgcacttggccccagcggatccagccatgctgccacagggttccaggcaggaggaggctgagcctggaactccggggcccctgccgggctgcacgcctgggatgcgggggaaggggtggcaggagaggggtctctggccctgtggtggggccagtggagcctcagccaggtcctcctgctgctcctggcccaggtaagatctcagagactacagcccggacctactcgcacctgaacatcgcgggcctagtgggctccatcgataacgacttctgcggcaccgacatgaccatcggcacggactcggccctccaccgcatcatggaggtcatcgatgccatcaccaccactgcccagaggtgagtgaggctggcgccggcggccagcccagggcccctcctccccgcacggtggtgaggtggtctcagggtgacggccatctgcaagggcagtggactctggtagccccagcatccaggccagccgccctcagcccccagctgggggaacgcacagcgggctccactcccactctgccaggccgcggggggcctttgtgcagccccttctgaggggcagctgcttgccctggggtgtgacgcccccaaaggaagtcctgggctggccaggcctgggcttggcaaatgaccctcagcctgggaggagatcagtcgaaaccagcccaaaggctggaaggatcccaaggtatcttttagctcagagcctgggcatgagaaggggctgtcccctgcctgcctctccatccactgggtcccttgagcaccccgcagggaatcgggctgg

SEQ ID NO: 102541 - DNA, 2669 bp, Homo sapiens
tccactgtggccggttcccggggtggggctggggcctgcctttgcagtgtgtccctggggggcagctcctggatgtgtcctctgcccagccctttggccggtgcggacacacaccagggaagtcacgacatgagggcctccacgggaggatccatcgcagcggatggggccctggggacctggctcccgcccttgccttgcgcgcctagcgatggcagcgagcgacggtgggtgggtcgcattgcatggcaccctgcagccagcagtgcaggctgggccttccagcagggcagcgaggactctgtgaaatggtgtctggtgtgccgtcgtgaatgctggtcagacacgtttccatctctgatgccacctgttctggaagcttccgtcagcgtggggggctctggaagctggggtttgcacatctacagaggatgggcatgtggcttggggtagagggaccaagtgggtgtgccagcctgaacccttccccacagagcagcaagatgggcatggaggcggtgatggcgctgctggaagccacgcctgacacgccggcctgcgtggtcaccctctcggggaaccagtcagtgcggctgcccctcatggagtgcgtgcagatggtaagccctgggccccccccatcagaaccgcctggcccctctccccagtccccactcacaggccccactgctctctgggggccccagcactgtgagcaccggagggcagggcctcgtggctggcccagggcatcccaggtctccagggaggggagggatgtgagcacatccctgggtgggacgtgggacctgggacgttccccaggaggtgtgtcggagctgcagggagcctggtgagcatgggaagtcacaggggtccacggccactgagcttctgtaggcagtggtgggagttggggttacgatgggacggaggaggaggggccagtgatcagagcagagccctgggaggagctcaggcaggtgatggggaacactggggtggctggagcagggaccccaggagaggaggtacggggaaggcagaggcgagggggccgggtgtgggggctggtccagccctggctcggtgggtttggaggcctgcaactggggcagagtgccctgcctggagctggagctgctgagaggtgaggagggcagctgggggcagggtagggcctcctggtctcagccagccccagaagagctggccttggtggtgaccgctgttcctagggagaggctgccaggcctgggccagggtcaggagatgccggccagatctgccctcgtcaggcccaccagacagggcagtagccatgggtgtgcgggccaggctctccatagtctgtgttctgtttctcttccttaagaccaaggaagtgcagaaagccatggatgacaagaggtttgacgaggccacccagctccgtggtgggtaagccccctcagcagacccctgcactcttacatggctgggtcccggtgccaggcagcatgtgctgcagtggcgctatgcacgcctggcctgggtcatccttctaggcaccgcgtctgaagatcgagggaggaaggggcctgcgggtggtacaggaggcgggctgggaggtgtggtaccacaggagaccctgggcggtggcacgggcagggcccagtgcacagggatctgggcatggcgaggggatgagaagctgtggatacaagcccaggacatggggtggccccgcgggggctgggaaggctggcagatgttgggtgtgggtaccacccccctgcaggcgtcctggcggccgggtcaggctggattggacgtctgggttcccatgcgtgcctccacccgctaccaaggtggccaaccctcccttgagctggatgccggccacgtgctttgctgcacgggctggcgtggcctcgtgttgtgttgggggtctcgcaccttctgtggaaggtgccctgcctggcatgcgcggtgtctgctgcctcatggctgagcttccatcgggccgtgtgcctgtgaccagcctcctgggctctgtcacggctgcgctgtggctgtacgccgtggcgctgcagggctgtgcatggtgtgacccgaatcccttccaggagcttcgagaacaactggaacatttacaagctcctcgcccaccagaagccccccaaggagaaggtgaggcagggagcggcgcccacagagggaggaacgggctcagttattctgcagcctcttcacgctggccccgtggctgggcctgcctgcccccaccttccctcctgctggggtccgagctgtgagctgggagggtgggcctgacctctgcctgggctcaggcaccactgtggctggcaggtcccgggtgctgggaccctggctgcagggctggctgttgcttctcagtggtggatggaaatgaagtcaggccacaggcttaactcaggagaggagaagccattgtgtagaaaatgtcccccggggccaggctcacacctgtaatcccagcactttggaaggctgaggtggccagttcacctgaggtcaggagttcgagaccagcctggccaacatggtgaaactccgtctctactaaaaatacaaaaattagctgggcgtggtggtggcacatgcctgtaatcacagctactcaggaggctgaggcaggagaatag

SEQ ID NO: 102542 - DNA, 1027 bp, Homo sapiens
cgtcactggattcacatggatgtggtggggttttgggtccatcaggttaaattaactgtagtcctgatgggactgtctccatgtcttttcccttcccttaacgtggctactagaaaacaggatagccagggccccttccttactcgtggctgtgcaccccccaccctcccgcccgctgccagccccttgtgtgggcactgacctgtgttcccgcccgcaagcctggcttcacaacagtgctcgccccttctgcctcctctgttgcctgcgtgccagggggccaggcttgcaccgtgtctcttttggtcttcaccagaatcttctggaattagaacagataccgtattcccagggcagttgggcggtgtgctgggcagcgtccaggctgctggcagggcctggcccctttttccagaacctgccggcctgctgacctcctgtgcaggttgggggtcccctccccggctgtgcctcacgctcatctccccttctctctgaagtctaacttctccctggccatcctgaatgtgggggccccggcggctggcatgaatgcggccgtgcgctcggcggtgcggaccggcatctcccatggacacacagtatacgtggtgcacgatggcttcgaaggcctagccaagggtcaggtgggtccggccggggcaaacaagtgaggacttgggccttctgtgtgcacacttggggcatttcctgtggaaggccggctgctggaggtggaggctgagacctgggtccgcgtgtcggtgcccacccgggcctgggtactcagctctgcctgcagcgtgatgcccaacactggctggcccccgggcacaggcccacccctggggggaattggccagaggctcaggctggcccctgaagctgcatctcctcctggcaggtgcaagaagtaggctggcacgacgtggccggctggttggggcgtggtggctccatgctggggaccaagaggtgagctgcctgctgcgggtacctgggggcaggagggccagggcgcagtatc

SEQ ID NO: 102543 - DNA, 1050 bp, Homo sapiens
cacctgggagggctgccagggttggggtttgtggggcacaggcccgggtgaaggggctcagctccctgccatagccacttccaggtccaggggggccctgcgttgttcctcgctactgtgatgagctcagatggggagactgaggcgggaatgtccctgcgccccagtgctgggtagtctaagagcagcgcctggcctctgtccaagggtgccagggacacccctgcccactcacagccagtgtgtgtgcaggctgctgtccactgtgccctggggggtggggtcgcctggttgagaacccctggtcctgtggggcccaggtgggaggtgggcccaagcctggtgctgctggctgtctgggtgcgtcagccccaggctggctttggagacacagggctccctgcagggtagccatgccgacggcctacagggaagggtgggcacgtggaggacccccgacccccccttgtcccccagagctgtgaccgcatcaaacagtctgcctcggggaccaagcgccgtgtgttcatcgtggagaccatggggggttactgtggctacctggccaccgtgactggcattgctgtgggggccgacgccgcctacgtcttcgaggaccctttcaacatccacgacttaaaggtgagcccagcccagcccctgctgcggcagacctgccggcatgccagcctgggccccagacactcaggccggccagcgcagggcagggcccgggcaggtgggacgcgtagcccagtgctcctgctggccccggatcgccggtcagcctggaattccctccccacagtcctccggctcatccgtgtccgcccctcccgcaggtcaacgtggagcacatgacggagaagatgaagacagacattcagaggggcctggtgctgcggtgaggctgccgtgggtccctggccacagctgcgcgtccaactctcggggctggggtggggctgctgaggagcggctgggcaggagaaggcaggaggggtccttggagagggtgggccagggcggctttcctgggagctgccactc

SEQ ID NO: 102544 - DNA, 2062 bp, Homo sapiens
ggctggagccggggcccgagccagggcattcacatgctgagccgagctccccacccctgccaggcctcccgcggccacttccgccgaacccctcacctagatccccgcatgctccctgccttatggtggccctgcaggaagcccgcgtcctggggttttctgagccagggaggggagtcagggtggctgggcatggggcccgaggtgatggggcccgaggtggggccgctggctgccgatgcagggcccaggagtcacttgacttggccaggggcagccgactgccggcctcgggaggcagcttctggcctggacttggagctggagagagcaggcagggtcctcgatcgggaacagacgggaacggtgcacgggttggaaggaatgggtgttcacaagctgcctgggaggctccccgtggggatcctgtctgcactggcgttggccttggcccaggcagcccaggggagtccagggaaccgggcctcacctgtttccagggtggcgctccaaccccctttgaccggaactatgggaccaagctgggggtgaaggccatgctgtggttgtcggagaagctgcgcgaggtttaccgcaagggtaggtggtgggtgcgacccgaggcctcactttgccctcccctggctccctggggcagggcctcaccatggagggctgccacgtgcctctgtttgcaggacgggtgttcgccaatgccccagactcggcctgcgtgatcggcctgaagaagaaggcggtggccttcagccccgtcactgagctcaagaaagacactgatttcgagtgagttccaccaaagcctcgtggaggcgggtggggctgaggggtggcccagaccttccctgaggcaggtgtgccaggcccagccccactggcaccctgaccccgcaaggcctcctgggcccccatgcccaggtccccgccaggccgtggagagcagggaccatgcccaagtcttctgagcacaacactgggcaatcctttcgggtgggcatgggggcacagcgggtagccaggagtgggcacgcttgagggcggctgaggctgactctgtgctgtgcctccgagggatggggaccccagacctgtcccagctccacggataccgagatgttcagacagaggggcatgcacaggctgcagggtcggggggggtgggggggctggggacgtggctgaagagctgccctgacccctgactccccatcatcctcccatccccgtcctgcacaggcaccgcatgccacgggagcagtggtggctgagcctgcggctcatgctgaagatgctggcacaataccgcatcagtatggccgcctacgtgtcaggggagctggagcacgtgacccgccgcaccctgagcatggacaagggcttctgaggccagccatgcccacgcccctccccagcccccacccatgccagcgcagcgccagggctcagatggggcctgggctgttgtgtctggagcctgcaggcaggtgggggctgcgtccctgctcagcccatcccctgcctctatccctggccacctgccaggcctccctcgggctggtgtcttgagaccagcctgccaggccctccagcaggaggacagagtgccctggggcatccaccttcctgcccaggggacgtggcgctgtcggtgtttggaggctgctgccccctggctttggcgccccatgggccctcagcgtctccccatgctgggctcactacatgggccagcccttgctctacctggccggtaggctgctggcgcctaggttgtgttgagagggggatgcccctggccctgcctcactgtgacctgctcctgcccacgtgcagcacctgtcaccttttctagaaataaaatcaccctgactgtggggtgcatcggtctccggagagcacagcctgcagaactcctcagagagaggggggagcagcaccgagcggccagcccagtgggcagcagccccaggggtggagggccctctggccagtgcctgggccaggtcaaagggacatgtgccctgagaggccacaggtgctctcc

SEQ ID NO: 102545 - DNA, 1050 bp, Homo sapiens
accgtggggagggagcatggagcctcacagggccccgtggggagggagcatggagcctcacagggccttgaagagctgtgccccagggggagctgcgtgtgcgggtctgtgaatgcgcacacacgtgtaacacgtgccccgcacggagccgtcctggcccctcagcctctcctgctgtcctggtctgtggaatgtgggcccgggccctgctgggctgagggcaacaggagtcacgtggaagaggtgccacacacgcgtccacaggcggggctcctctgctcagattctccgagtgtgccggtcagtcacttggacggcccacacccccgggaccagtcgctccgtggtggggcaccgctggccaggccccagcccttgtggagggaagcagcctcgccgtgccgggtgggcttagtccgcacccctctgccctcagaacgtcctgactgccatcctgctgctgctgcgggagctggatgcagaggggctggaggccgtgcagcagactgtgggcagccggctgcaggccctgcgtggggaagaggtgcaggagcacgccgagtgaccgcaggacctgaacgccgctccagcctccacggggaccccagcgtcttccccagcccccgggagctggagggtggctgccatggccgcagccccggccccacacaaaagcctccccggtttgccacatcggccgagggcaggagtgggtgttaggtactggctaaccggggcggtggagatgcctgtctacaccagtcctgtccccaggactccccttctgtggtctggaggttctaggctggcctgggctcttaaagggaggattttgcaggctgtcctccctaataaaagattttcccaaggttgatctggaggtgacgtttcccaaggcatggttgtgacagtcttcctgaaagcaagggccgtttctccacagaatgaggaggtcttcacggatggctttgccgattccagcccttggtccttggatagatttctgttgggcaagggagacttcgagaatgctggcacccatagcgacat

SEQ ID NO: 102546 - DNA, 1002 bp, Homo sapiens
ctgtttaggaagggacttgttctttcagttcgtagacggagaacgggtttactgacctatttattgatctgatgagtcacacccagtgcaacttccactgtttcgttgtctgccgctgtcattcagcagtcctgcttccttatcaaagaaagatggtgcaagatcttttagaactcctccaatgtgtgttttattaatgtgatttgtaggagaagaggagttcgtccctggtgtgaaggtacaggcatagtggctgacactcttcctctcctgtggccatcatgccttgaactgttggtcaagatagtgttaatttatacttgttgggttttaaaccttaagcaggatttctgaaatggtttcatctatttcttccatttacacgtgaggaaagtataggtccagggagactcagtgcctgtgtctgtgcccatgacggggagttgctccaatgttgcatcagtgggatgaggcacagcacatgggcctgcaggtgcagcctggagtggtggtgcctgtgtgcctagcctttcaccgagcatgcagcagtgatcacatgtgctcttcatctgcttcttgaaggttgcaaagatgccttcttgggcacgtttaaaaattaaaaatcacctttgaaatacaactcttagccccacatctgttgaaatacaatgtaatcttgctataccctgtgccgtaattcatacccttatcctaaaatgtgattgtaccacatctgcagaaaaaactcccagatcttagagcattgacattagttcttttctctgatctccttcttatcaagaggttctgctgcttgactcttaaccttcataaatgtgaaaactgcctggaattcagtctttgtacttgtacctaagatttagaccagattgaaactggagaatgggacattgctttccactgaaaagaaagtaccaattcattgttacttagataatctttttgtgtgcatttttattatttatttttatttttgtttat

SEQ ID NO: 102547 - DNA, 2520 bp, Homo sapiens
aaagttaacttccttataatttacttttaattgccaaagttccttcaaagttaaaatgttgtgaaattttttctcaccctacaggccccatgaatgaagagaacttttttgaatgggaggcattgatcatgtaagttaattttaggtgtactagtttttagggctttgctggaagtcagatgtaagaatcacatcagcagtgtgactgtgtccaaaagcatcagctggaaaaaagactgagttctccagtaatgcccagctctcgtctaggctgctggtctgaaagcagagaacctgagcattgatccaaaagaaatgagtgtttccttagagccagtcaaaggtttagttataattatgtaatatatgtattatatatttgagagttttaaggtggtaattttggaatgttgtatgatcgtggttaaaataacctcaaatggcgtaggtggctttggcttccagaagtagccccttcaggtgtgaaattttgacgagaaaagggtcctcaaagatgtgtctgaccacaccaggcatgttagcgcagccttgcctgccctgcctttgggccaggacttctttttcttctcctttcctcccagttcgtatcttcgtgtgctgcatctcctttttctgttgccttgtctggacttgttggccttgtgttctttccgacccaagacatggcttagtaagtgagcagtgtggttctgggattcgtggcatttaacttagggtgacgttgcttggaaagagaaacacatggacccctgattttagagtgttctatggccttgactcactttgctttttcttctttctaccttagatgtgcaatttttggccattcttagtgtattttcagcaaagtgaggttaaataaaatttaggaagttgaaatttgtaatcagtctctgttttctttcttttctttttctttctttcttttttttttttgagatggagtttcgcccttgttgcccaggctggagtgcggtggcacaaccttggctcactgcaactcctgccccttgggttcaagcgattctcctgcctcagcctccctagtagctgggattacaggtacccaccaccgtgcctggctaatttttgtatttttagtagagacagggtttccccatgttggccaggctggtctcgaacttctgacctcaggtgttccgcctgccttggcctcccagagtgctgggataacaggtgtgagccaccgcgccaagcccagtctttgttatctcattagtgaggtcttttaatttgcagcaaggtcttgggttggattttgttgcattgagaagtgctctagagggcaaggaccggaaaagtgagggctgtgaaacaagtgtgggctctggcttgaagtgatcttaagcttcatgatgcttttggaattcgccagttgcttggatcacattaattcttaatgctctatgggttggtctgagaaacagattgcagctaagtgttgtctgtggaggttaaattgatatgaaaattagtattttggataaacaaaatgtttttaaaaaatcatcaaacgctattcagatggtacagcacgcctgccatttcctgatcatttgtaatatcctaattgcttgggcctatggcacatgttttttcggtgtctgaaggtttctggaatctgtgtttgtgtgtaatgtggcccccaaggcagttatgagatggatggcgagtcccacagtctgggctgtcctcattagtggactgtgcggctgtatacttgtatcggggcagctctttttatttctgtagaagcaggagatcatatacatgaactgatgtgtaacctgcttgtttcatgtgttaatgcaggcgcacctgcactcatgccagcggggcagcacgcctgctgcaggggcccagagtggcgggaggcctgtctgtgtgtagaggttgaaggcgcctgtcgtgtctgcagttatttgtggggtgttggctcctccgtaggcctatttggaagctcattaaaggaacagttgagccgtccagtgtggttttaaaaaaatgttcattgttaaaaatcgattagggtaactattaccaattttaaataaacagtgtaaaattaaaccaatattttgaaaacctgtcttaaaaagtaattagaactatttttaggtagagcacttctgtgtttgaacaaggctttttgcattagtttggaattcccctgcttgaagatcctagtgagtttgtgggttttggtcctgttccagacccttcacaaacaagaggccgtttacaagtgcacttaaaatgcctattagggaattaactgtcctcccatcgatttgtctcaccctgctattttggcagacatctggccaagtctttgctccttggtgataagtttcttctttttctctttattctttgatggcttccagggccgcctctctaccctagtatttctaaaacccgtgcttgcctcacagaagtcgaacggctgttggtttttgctgttgtgcttgccttaag

SEQ ID NO: 102548 - DNA, 1367 bp, Homo sapiens
gacaggtattgggggcaaggttggtagggaggacagactgtcacttgctgttacaggcacaggtgattaaaatgctaaatattgcaaatttaagctttgtcagtatatggaaaagttgaagggaaaatactggaatgcttcttcaaaggttaaaaaataaccgagtcttttggtaatttgaccccacgtgctctctggccctcaagcatgtaacctcggggtctgaggcccaggacccacccccctgccacccctcccaccccactccctgctcagtacctggcgttggtacacaggcaaggattggcacaaccaaaattggcctttttctccctcttaatattgaagaaattcccacatttctcatttggtaatggtgttgtggcctcagatttcttctagtatttgcttctgatgaatgattatggtctatacataaaaaagtaagactaagtattgctgaatttgcagttatgttgtcgtgtataagagctacttccaagtgtggttacaaatgaacccatggaatgatgacttcatgttcttctcgtgggtttgtgccgtgctgctttccaaataggtattgaatttatgcattagtctggtgatttcagttctgtgaaatattttgggatctataccaattaaacattttcatagttctgcctattgtccttccctgaggctccattgctgcttggtggccattctctgcctttttacagtcacctgaacaatgacccatcatctcttgcttgcttgaaatcttgctgaaatgttctcatttcctgtttgctgtatgggctcgggtgggatgtttgttggctctgttgtgtttattcaccaatttgtacattatttgttgtcctttactactgtaaacagtaaatatagtttggtattctgtctcttggcttctactaaacactgcatttgaaggttggggcatactggtacaattcagtgtttgaattgaccattccaggcagccactgcactgagaaactttgattgaaaagctagccgctggaaggttagtattcgcctggcagctcatttcccctcccctggcacatcaccaatgctagtccagccttcttcctgctgagggatgcatcctctcctcagagacctcctggctgacagctgtctgagctggcatcactgtgacatgttaccctccctctcctgggtttcgtatgtaaagaaagggtggattttagaggcaggtgagcttgggtgttagtctaggacatctctcgttttctggtgtttgaatgtaagtcagctttccttctgccatggacaacttacctatctgctttgaaactgaactgacattgatttggctttaagaatttcccagt

SEQ ID NO: 102549 - DNA, 1873 bp, Homo sapiens
actagtgctgtatagctgcatgacttttggatatgtgtttttactggtttcataagaattttttaaaaaagagatggggtcttgctctgttgcccagactggtctcaaactcctgggcttacgccatcctcccacgtcaactcccaaagtactgggataacaggtgtgagccactgtgcccagcccacaagaataactttaaaataaagatggattttctcttatttttccctagactttgtttttttctttgaattaacaatgtcagaggaccctaggcttgcattgttttacacatggatgcttaacaagtggaagttaaaaataaattctgtgtaaaaataaaaccatcacgagtgactctgaattgctggagaattttaagaattaggttggttttgatgactttaaaaagccaacaattacctaaagacttgcccattcaagtcgcggttattttgagacacagttttgaggccagtctctggtgtcttctgcaggagggtgtgaagacagagaatgaccacatcaacctgaaggtggccgggcaggacggctccgtggtgcagttcaagatcaagaggcacacgccgctgagcaagctgatgaaggcctactgcgagaggcaggtgcggcaccttgctcccccgcagagcctccccgtgtgcgcactggtcctgtgcgttccaggcatccccagagcacgagcgtctcggggctggacccagatgcagctgcccgaggtgccctcttcgtggatgggcaggcgggggcttgtgctgtaaaattagtccaggctgggcttgtcccccatggccttttataaggtggagggacctagaggctcggagaagtgtggtgggtttttcttcctgacagggcggctgcccggggtgctgtgttctccatggggtactaacatctgtgaagtctgtgatgctgaaggctcttgggggccctgctcaggtctggccattctggggctgcaggtggcgtgtgccccacgccgctgtcaccctgtcctcgcgtatgagctggcctgaccctggagagacactgccctcatgtgcggtgtggttttccattttgttaggaaaggcaagaaagcgcgtgattctttccccttcttccccagtttcaggataatgagctgccccactggcagtgcccagctgggtggatgccttctggctgctgtttgtgacgtggtgtgtgtgtgtctgttgttcttggtaacgctgtggcggactcaccctgggccagggggtccctctctaggccacttttatgggctttgcccaccagctgctgcctggtgtgttgggggcccggccctgcagccaggcgcccttccccagggagccctgcttgcctgagtgggacctagaggctgcttttcttcagccgctttgaaaatacagcaactcgttgcccttttattttactcttttgcctgtggattttcagttagatttcctcctctttccctcccactttggataccctgctcataggggcagtcactggcgactgccttgcattctttattggcaagcagcccctgacttcctttctttgtgtttgctgagggcagatcttattttcacctgcgaaaggtgagactgagcttccagacacgcaggtcccggtcttcccagcagagtgagtggcctggcgccgtgtaggccccgtgatccagcctctgcctgatgctgggccctggcccttgctggagtttgtactgcctgggctcgtggccactgtgtgtgtgacttcccgggtgcccatgttctcctctgcgctgcgggatggcaggcgtgtggggccgtgtacatgtggggggggctctgcccttccccctgctctcccggag

SEQ ID NO: 102550 - DNA, 1017 bp, Homo sapiens
gctcctgagagggaacgtcacccccagcgtcctccctcctccgccccaggtccctgcggccatgggcggcggccccggcctcacttcccggcgccccaggaacgcggcccccaggaaaggagtcggggcccgggcgacgcggggaggcgggcaagggtccccagggcccgggctccccgtaaacgctcctggcccgcgccccacagcgccctagggcttccgcgcccgacggggtcgcgcgggacccgccccgtgacgcatctccaaccgcccagagccgcggcccggcctgcgcgcgcccgacgccccggggagcgcgcctcgtgaacgcgcgcagccacgtgacccccgtgccggccaacgggtgcgccgggatttgggggataaagcgcggccccgcgcacagttgcggcgggagagcggcggggccgagagcgtgactcgcccgctccgcgctgcttcccccgcgccgcctccccgcgccgctcgcgcagccatgtccgaggagaagcccaaggtaagcgcggcgaccccgcctgcacgcgcgtctatcgcgggcgtcccgcccccagcccggctccgcccccaccccgactccgccccgcgtcccgcccctgacaggctccgcccctccccgccctctagagccccgcccctaagtgggcccgcccaaggtgcgccccctctgcccccgcgaagcgcgctgtgccgcgagctccgccccctccgggcctggccacgcctccgctccacgcccgtctcctccccagctgggaaggcgcgcgcccagcgcctccttgagcgcccggtgtcgggccccgcgctgctgctcctgcagagcgcggcgccctcggatcccgccccagcagtgtccccgaagcgtctttgcgtgctcctctcctgagtcattgctggttggggtcgccctctcccccggcatcgccctgggtgcgggatcctgtgtcgagtgcacggagtcggctcgggaacaagcgtctggggttacccccaaggggc

SEQ ID NO: 102551 - DNA, 2634 bp, Homo sapiens
tcttcgccgagcatcaggaagtaagtgcttatctcttaggatctgttagagttcttgtttctagtaaattttatttcagttttaaagtttaaagtggtttgacttcaaaaaaggttaagcactgtatgagagcctgcttacaatgcccgttgttgctatagcctcagtaaatcttcttataaagcttggtttgtatggctttctaagattttgtttctggttgaatgaatgaagttatgattcaagtttattttgtttcaggcctgtttaaagaagaaaacccgtatgctagatttgaaaacaactaaagcgctccagcacatcagtcccgacgcttcctgtgaggtgcacgctccgcagcccagcccagccgggagaccacgtggccattgcggtctcctgaccttggccagtgaacctgccagccttccaggacaggcggccggagagctgcccctgaaggacagtcctctcgtcttgcagactggtgaccttctattccctgttcatctctgtttctagatttagtcacttgaaataagaaatctttggggtttgggcttttttatactcttctcagtttgtgaaacgctaactgcacacgaagccgcctgacggcacccagcgctgtggctgtcattctcccagggcagaaccctgcgtttctctctgtccactaacaagcttcacacgcaacacagggaagtcggtttgacttttgtcatgaggagaactgaccagccctcatcattccccataaaaccacggacagcgtctgtgtgcgcatcttgagtcttcacacctgttgactcacacggcttttgctgatgacacggggctccagtacacagtctgataaggacttaacgtcctaacctcaattgtattaaatagcattggggaatagctaaacctttttaaaaaaatttattggattttcctccctgcttaaaagatttcaccagaaaaccttcatataaaaattcaggccctttttggacaatttttaaaatttgtatctttactagaacatgagaatctttttcccttggaagcttgaattataaatgtggtgtttggcctgcctcagcagcaccagttgactgctcgtgtgccagcggtgtggggaggacggggcaggacgctgcagctctctccagccctgttggcatcctcagtgcctgcaggcctctcgctgcctgttgggctgtctggggggtggccatttagggatcgtggggacggggtccaccccaagaagaaagaaaggcccgtccacaggcccggctctgggccacgtgccccggaagcaggtgtgtccagagtcagctgagggctctccccacaccacccagcaggcgctggtgctccttctgcctcatgggaccagtccagcttccagccgctctggctcgagggtggtctgaccacttccttctgagtgggcttctctgggagctctccagtggcactgctggacctgcccacgtttctgtaaaatcaggatacgtggctttagtaagcagaccaagcgcttcgtggcagggaaagcagcgtgcggggaagtcactgaaaagtgctgcctaaggaagtttggaaatagtccctgttccagattgccttgaattttaaaacattttgctttgggaaagtaggtcagcagcacctaagatcaaggatgcgttccattttcacacttcacagtcatgaaaactgagaagactgtcttcagcgtgaactaaagttcacaggcagatcactgatccagaacacttcaagaactcgtcaaacagctcgataagcctttttgactgtgtacatctgtaccgggaataacattcctaggctgaaatttccacaaagaatagaacctgtacccagttcttcaggctgatttccctgacctcttgggcatttgtatttgtagtaaagtattgcagagattcctaagtattttatagcagccatcaaaattggactttgtattgtttattcataaaagacacttggtaatagacttcagtgaactctgtatgaatgcagtagtgtgtgtgcaaaatccgcttcctgagcgtagggtgctgagctggcgctagggctcggttgtgaaatacagcgtagtcagcccttgcgctcagtgtagaaacccacgtctgtaaggtcggtcttcgtccatctgcttttttctgaaatacactaagagcagccacaaaactgtaacctcaaggaaaccataaagcttggagtgccttaatttttaaccagtttccaataaaacggtttactacctgcgtgtgtttagtatgctgcgtgttcctgtgttccatctcagtggtgtcgacatgaccgcttggaatgctgggaggcaggtaggcttttttgggtaaagtgggcctctgacccatcgtgggatgcctgggcagtctccagactaaatgcctgtggctgtcagaacggaccaggctgtgtcctaaaactgtgcccacgggcctgcctcgcaggggaggtcttggctgtctctgccctccacagctgccctgcgcaccgcatgccctccactcgcgctgggtgccgagggccgggggagaaggcagggctgcctcgggaagggcgaccttggcccccccgtgtgaa

SEQ ID NO: 102552 - DNA, 1050 bp, Homo sapiens
tggtttaaataaaaaaaaagaaagctgcatcaggcttaacctccatttctgtgagtttagaatgtcttacgagagtctgagtatgtagcttggaattttggttagttaacttttctcaggcttgaaataccttttcaaactcagctgagacagactaccctgtcacttcagttcattatggttaatattataaattgttaataaattctaagtcacagataggaacgtgtggctgaaaggagacttggagagggcgggaccctgtggggtggaggcagggccacaggctctccacacgccaggagccagcagcctggccgaggcggctttcctccttatgctcctgtgtcctgaggttgttccccaggggcgagggaaggctgctgtgctgggtgggttctgtgtctggggcggccctaactccaggtgcttgaatctccagtgaactttgaggcgctgatcatcaccatgtcggtagtcgggggaaccctcctcctgggcattgccatctgctgctgctgctgctgcaggaggaagaggagccggaagccggacaggagtgaggagaaggccatgcgtgagcgggaggagaggcggatacggcaggaggaacggtgaggtggtggtgatgcccgctgggaaggttacttcgaggggattcagatctgcaaggccatggaaatcacatggatacatcctgagttttcctcagtttttagaaattaagaatgtgtatagtgcccaggggatcttctaggtcgtggtagagagcgagagactgtgatgggaacctagcagtggctgcgaaccttgcttctataggcttcctcgcccggtgtcctcccatcggtgcagtaaggctgagtctgtgcgcggtgacacgggtgtgtgacggctgctaaggcggctcgtccaggcccagcatttgccaagagcaagctgaggctcagaggggacagcgtctgactgtggctgggtcagctctcctgtcgccctttccctggtgacacagcactctcctgagtgcttgctggggctctggggcaaccc

SEQ ID NO: 102553 - DNA, 1051 bp, Homo sapiens
tggggtcagactcaatccaagagcttcatctggaggaaagacgaccccaaaaaggagctcagactgctgtgtgagggctggcgcagtggtggccagtgcaggtccccgaggtggtgggtcccactcagctgctccttacagtggggactcctgatgtggagttctgcccctgtcaccctgagaaacgtggctttctaactgtacagagtgctacagtgtacatagggttcacagtgttgatacatactcctagtcttcaactctttcttttgaaatagtggagtttccaagaacatttttttgtctccatatctgccctcttttctcacctggaattgacaatgtagttgttctccatgcctctgtcacagtgcagagtgggcaccatgcccgtttggctgctcgttctgctgatgagcatggagactgcagcctgtggcctgcggtgtgacaggagcatgacaaggaaatacgtacacttgctggtgtgttcctttgtccttagtgtgtttattgactcacctgaaacttcaggaaagcactcaaatgggtcatggagggttggtgtatcctgacagaagaaaacgttatttgttgttgttgttttttcctttaatttcggaaacaaatgagactgaaaggtctttaaaaattgataaatggagtctaagttgaagccttgcagtcataggacccagaagtcagggcagtcacattcagtgttagacttaagcaacacaagggcagtttttatctctggttttctagcacatgttttttctgtatcttgtgatgagataagagatagtgatcacttagagaaataaacactgcttgtctttgaagcagtaacaaatgattcatgcctttctttttttttttttttttttttttgagatggagtcttgccctgttgcccaggctggagtgcagtggcgtgatgtcaggtcactgcaacctccgcctcccaggttcaagtgattctcctgcctcagggattacaggcgcatgctatcacacccggctaattttcgtatttttagtagaaatg

SEQ ID NO: 102554 - DNA, 1082 bp, Homo sapiens
gcggggctgtggcaggaggcagtgccgagtccccactggccaccatgtggggcacgcaggagcagacaccagccactcacagagcaccggtatcgcagcacaggccatgtgcatggctgcaacacagctccacagtgagcctgccgagccactgcatgcgcaggccaaggccaggtgtctgctttcccctcgggacatcctggggagggaacgcggggcccctgcacgttttgagcacatttagtccgtggcaagtgctcagtaggcctcgaggaaagcaaaatgtgccataggggtgttctccaccaagggcaaggggcctggaggacagggcggctgtcccttgtcccacatcactggggggagcctgaccttggggcccctcctgtccccaggtgtgacactggctacattgggaaaaactgtgagtgccagacacagggccggagcagccaggagctggaaggaagctgccggaaggacaacaactccatcatctgctcagggctgggggactgtgtctgcgggcagtgcctgtgccacaccagcgacgtccccggcaagctgatatacgggcagtactgcgagtgtgacaccatcaactgtgagcgctacaacggccaggtctgcggcggcccgggtgagcccgtgggtccctgctggacaacggccgtcctgcggcacagacttggtgttggggggtgcgttctggaccattcaacgagtggaacagaaaggggggatcctgaggacagacagtgcaagtctcgcccagccaccgggcgtcagcaggaacttggatggccctgcaccccgccctgcctcagtttctgtgtccatgaggacaaggcgtccttgtggggagggcccacaggaggaacggtcatagccctattgaggtcccattcacagcagggcaggggaggtccagactggccaggaggcggccacgtggctggcgggggcagaagggcctggctagtggccccatgccttttgctcaggaacatcccccaggctggaggaggcaggcgggccggagggagcaaccgcagtggggtttcgggcgggtctcggttccc

SEQ ID NO: 102555 - DNA, 1003 bp, Homo sapiens
ctgctgagatgactagttctgatgggatgtggtcagtctgagctgaaagagctgtcaggctgggagctgcctatccttcatctgctcagctgcaggtttcttctgtgacacaggagaatgttgtagaaagagtaagacgaaatggttgggaaggaaatttggttcttgagatactggtcctgactcctgaagaaccaggagtgaagcccgtctggtgattgaaggcagggagcaggtgggcctgggcgctgcgggtctgccctggagctctggaaccggaggcttctgctctgggaggtgagggttgtttcccccaggtcctcccgggcagagaagctggggaatccaggttcttgtcttgcatcttctcctcacctttaacgtccctctgaaaccacagagcaagtctcacacctcttcttttcgtccgtttttgttggggacattaggactgggcgttcatcaacaccaacatctttgccaggaccaagatagaccccagcgccttggtgcagaagctggagctggacgtgaggagtgtcacttccgtcaggagaggtgaggcaggctcgagtgcacggagcgtcccttccatcaggagaggtgaggcaggctcgacgggttaccatgctgatacccagcaggtctgggattgttccctcaggcacccgaggtctcagcagctttccagctaacctgtacctgacaatgtccttgagcaagggatgcccctggctgtttcttggggcgattccccagagtagattacagctgtggttttgcccctgggctgcatcatgtctccgcagctctgcaagaactgctctgcgtcctggcagccacgctgaagccacaggaacttgggctttggtgaccaacagggtttgaactgttttctccgtgtgtgctgattctttcggtctgtctgtatgtttggggcagttttgatccttttcttaaacaagtgctttatgtgttgcagaggttagctgcttatcatttt

SEQ ID NO: 102556 - DNA, 1082 bp, Homo sapiens
ggcccgttctggcgctccccagccctgagctcgtgctgacagtagcgtggcccgttctggcgcttcctgcttgtgtgcaggtgtttcccatagcccgccttgaggggcacgaggatgggaattatttgagccgtgcggcagggtcagggttttgggtgttggggaggagccttggcctggggaggcacttagtgcttctggccaggagccggtggctttgtgcactgcccatggctgtgatttctgccttggtgccccagggggattcaggagaaggtgctccaaaatggtgccttggaggttgtccctgaggtgtgttccaggaggctgtcctgtgggaggggcgttctgagctcatcgccgcgggcccccattacagccctcctggagcgaggcctctggccagccgtctctggctgtggctctcagcccagggttctggtgcatattccttccaccgccctgctgtgggttttctgcactgaagagccccgggctggatgaaggggaccatgggacctcacagagggctcagacggagggacaggcctccacttcccctgccctgggatgtgaagcaccagcttggcagggtggcagggcccacagaccctcatgggtgggacctgcagacccttagaggagtagccccacaggcggaggggcttgccctggtctgggggccccagccccttttcttcaggcctccgaggtatccaggcgcctcagtggggtcctttgcatcttggctgctcctcaccatgttcctccctctctccaggaacagttctgtttttttggtgtggtctcctcagctcctgattggctggtgccctgcgtccctacccccaccccaccccgggtttgtgctggggcctgagtgcccatgtcatgcagatactgcatcctgtgacttggccgccacccttcaatgacccgcctggctatggaggtgaggtggcggcctgtgggtgcctgtctgcctggcttagtgcaacaccgccttcccaagatgtgtctcatcgtccgtgccctgcctgagtcaggaatagcactgcatgctgcgtctctggccaaggagc

SEQ ID NO: 102557 - DNA, 1029 bp, Homo sapiens
cattttacttccttcttactaaccattattgcattccgttctcgaagtataacgaaaagtggcatgatatcaaacttgtttctttaacgtttaactccataattaagatgatagaaccgtagtttttttaattgagaatacaaatatgtatttaatcctctttgtttcctcttaaattttgccgtatgttttattgcttcgaaaggtgccacccagagctgcattttccaaaacgctaggttgtcttaagagcagttgtttctaggagatagaaaagctaattgtcttttgatgaccatcttttccttggggttgagactgctgtatcctttttgcctgctgagggtttcccagaggggaaagggagaaggaagaaaggataaaagcttggctgatacagttccttcttggataagagaattaactgtctctcattgcgcggttcctccggaggacagggtccagtatgcatggacagccacaacgggggctcggtaagtatttgatgagacaggctgagctgggtgcctatatcttgcctgtggtggagaggatgaactcacacagactctgaaaggaatgcattgtctgtgagtgatgccctgttagatgtctgagggttcctaagactgggtatatcccactacatctacatcacatttgaagctgtagttggaaaggaaaaaaggaggccctcctgcagggacaggggcttaaaaataatcgatccagctctgagaaattgatgacacatgtgtctctggtgtgacgtgctcatgcagttgttactgggaggccaagggggaaggattagctatgaagtgataacatcatccacaaaaaacatcttggctcagaggctaatttcacttcctcgtgaatttatgtattgtaaaacatttgaattcttttagatttttggaataagaatttttttaacttctatttgtccagtgaatgcataaaacaaacttaatccatttgacaaatacttgtctgtggcctgttatgtgctaggccttccctgtt

SEQ ID NO: 102558 - DNA, 1180 bp, Homo sapiens
tttatgattagttatctgagtagagaaaggtgaatatggatggaaattcaaggtcaggttcaagaagaggttggggccaaatatgtaaatttgggagtcatttgcatattgctgatctatgaggcatacagtatggatacagaggagcaggagatgaggaatggcctgggagcttttggcaagcggtccacattgggagggagggtctagcaacgccattgaaaaggactctgtttgaagaaggaagaaactagtgagagtctagtggcctggaaaccaagacaccgaggggttcttttcttcttattcttcgtgggctggagagtttcctattggctttgataagaggtggttgtgagtgaccttgataggtttggagtggtggggagaggaaacaaatagagtagaggtgggaacatcagtgtagacgactctctagaggagttctgttaaaagggaagagtcatgggatggtggctggaggggacatgggtacaggaagtttttagttgtatttttaaatgagagcgatgatagcatgttatgagctaataggaatgatccagtagagggaaacatttataatatgccaggaaagaggataatgttggagccaagtccttgagaaggtgagagggaggcaggaagagcagggatgctcagctctagaagggaggcgggacttcaggagggaggcaggacttctgcacgtgggagcctggactcagaaatattcctcaagacatgctgcccttttgaaaggaggataggaaataaatcatggttttgtcctcagtcctaaaaagttcggaatctcaccctaggactcaggatccagcttcttaccagcttgtgctgaacatgccatggggcgtacttacggaaagatacatgtggaaatggaattttttatttatttaaaaaattcacttttctctaaaagtattgttacctggaggttggcacctttattcaccaaattcagtactcagaggactagaagactcggtgcctgatttgtgcttgatttgcctagctgggaatttcagttttgcatttaagacgactccctcaccaaccctacccccagaggaaagcaggtattgttgctttgggcctgttgcatgtatatgtttatgttccactgggtcagcagcattcagtgaaacacagttgcctg

SEQ ID NO: 102559 - DNA, 1003 bp, Homo sapiens
cattagcaagcatgtctgcgtgtggatgtgtattttcatttgtcataggtagattcctaggagttcgtaggagcttcgaaatggagtttaagacagaagcctttgtttgatactgataatgctagcaagggccatttatttggcttgctcttgaagtctgtctctgtgatgtgcattgtgcttcttgaattgtatgagcctactataggatgaaatatggttataatgtcgagcagaagctattagcatttcttaagctgaccacctgtgttgtgcacactattaggtcctcagcagatgagttcttaccgggtgtttgatgttttccccccacttatcagaagaggaagtcggtgaagtacggttgggcatattaaaaccacattcagcctacaacaccacagaaacacttaccctttgacccagcaattctgcttctaggaatccttccagaagatagacctccaacaatgtgaaaatacattcggaataacctaaatatccatatgcaggagagggttgagtaaactctagtacagccacacaaccacatccactgttgaggatgacctctgtgaattggtttgaggtggtttccagggcacgtggatgtgaatgaggcaagtaccaaagaacatctaaatgctgcccttgatgtgagaagaaggggatgcaggaagacacacgctccctgcacacttgtgcagaggagatacaggagggcagagccagaaacaaaagagatggtgactgcagagggccaggggacggaggaggagtgggtgccaggtcataggtggggtgcagagggcgagggggcagggaagtggagtgggtgccaggtcataggtggggtgcagtgctgctctcagtacaccttttagtgtggcccagctcttgaaaccacagcaatacttcatatactccaaagtaaaatagatggttaatatcagccaggatgtgggggacccaaaatgaaatataagcggaaaacacacatctc

SEQ ID NO: 102560 - DNA, 1053 bp, Homo sapiens
tttatttttattttatttttttgagacagagtctgtctctgtcgcccaggcggtgcagtggcactgccagctctgcctcccgggttcacaccattctcctgcctcagcctcctgagtagctggaaccacaggcgcctgccaccacgcccggctaattttttgtatttttagtagagacggggtttcaccgtgttagtcaggatggtctcgatctcctgaccttgtgatccacccaccttggcctcccaaagtgctaggattacaggtgtgagccactgcgcccagcctttctcctctttttaaatgttctcaagtagcttcctcttcaagtccggtttctttttcttgttttctgctgggaactagatgtagttcccctccttcctcagcagcaccctttaggtacgagatgggtggggttggccctttccattctttaaggagagtattttccactgtgagatggtcacataccttctctttggtaacaggacaaaagagcaaatgctggaaaaactaagcttatgagctttggggaagcctggtgtgcaaatgagggaggctaacatgattttcgggctactggattggtgctcactcccaatttgaaaactagtcaggagataccgaggccctgtgtgatgtggtacaaagtataaggcgttggccatggtagagaatcatgatttttttttttttttctggaggtgggaagccattgtggttgggggcatgaactcagagttgtgccgtggaagggtccctgtggcaggagaacaggtggagagcagacgccgaggggccgctgtccaggcaggagtgatggagcatggctggtggggacttcagacacatgtgcaaggttctgaggatgcctgggtgctggccatgtggcaaggtggaaggcagtgcctatgactggacagctgggagggagcccactgtggtgatggggagggtagactagcaggtctgtttgggtatgctgacttgggggcactcaaggggagctgtcagggaggccattgggtggaagcaattccagagacaaac

SEQ ID NO: 102561 - DNA, 1055 bp, Homo sapiens
ctgccccagctcattatatgaccgttgtctcccatcccgtcctgacctgcctgtttatggaggcatcctctaggttctcagtggagggtgcctggcccctggaacaaaactgttgagtttgaatcatccccaccctgcctcttcctagctgcagtgctgggcctcagtttccctatgtgcaaaatggggacactcaaacctgcctcattcccgtgaggattacatgattaggtaaagtgttcgtggcagtgtgggggatggcgagtgctaggcaggagctggaggctgttctctttgggctatttgcacacatatgctcttagcctcctttcgagcactttcctcagccttcaatcttgtgtatatttgtgtgtgtttctcttttaggagagagacttctctggcattgactggacaactgtcagagcttatccttgacctgagctcactgcctctgcctcagaattgggggtcaggttattcttagtattctaggtttataaggccagacagagtccttcttccctgtagagcagaaatgacccctaatataggagcatattgttttccctcagcagagcaaatgcttcagtagtagtgttaccagcagacagatggcgctttagaggtgacatgtgatagatgcttgggactgaaatttagccgtggatcatagcctgaatgggattttcacgcatgtcttccctctcaggatttctcttaagggttgttgattccacatttctccttgaggagggggtggtggtagggctggtgaccggggaactgtaatttcctgtgggagagcagcaatttcattattcctttaatgaagctatagttgatcatccttcagtgcctagtatacagcctgttaaattagggtcttcggattgctctgcaagcctttttaaaaaaataatttacaggctgggcgcggtgggtggctcacgcctgtaatcccagcgctttgggaggccgaggcgggtggatcacttgaggtcaggagtttgagaccagcctggccaacatggtgaaaccctatctctactaaa

SEQ ID NO: 102562 - DNA, 1033 bp, Homo sapiens
ttgagagaagttgtgacaaatactaaaatcccagtaaaattagtatggtgtcagattaatttacttatgagcagctgagtgactaactcaggaagtccagttgtacatttccagggaagctttttcatgggttcagatgagatgaggggaaagagaaggtgtcagagggctgctgctggctggaggaacgcaggtgtgctcctgtgtccatttgctctgtggatactgacgagcgcccactgggcctcagatgccctctgggcatggcagggaccaggcgctcgcttggcagctctcatgtgagccgctcactggacacagccgtgctcccgcctgggagttcgggatggcatgcagagctgtggggagggagcggtcaccagggcgtgagtgtggacagatgggagtggctggtgcagagccataggtagggggcggtcaccagggcgtgagcgtggatggatgagagtggctgggagcctaggggggacgccgtctttggggagtagagacacacccatgtctgactactgggttttgagtttgtgccagcaaaggtcctgcttgccatttctgtctgtaaatgtcaggaatttcaggtaactggttccctagcgagacctttaaaggaggctttatcttcaaccgatgctttttttgggggggtacacaggcagtccaagtatgggaaggtcaaaatcaggtcacctttatcatggcttgtgctgtgggatgggattttattttcagccacagcgcttcttctagcttaattagtgataggaaatcagcttctctgtaaccagaggttattgaaagaatgaggatcccagagttggaatgagtctgaaagagacgttgtggtttaatattgctaagttaagtgtcgatttgtgactacctatttttaacatgccacagaagtaaaacattgcattaattatgccatatatgtgaaatagcaagtatttttatataatataactgtgcattggagaaatgaattatttataatcctttgcaccaataaatt

SEQ ID NO: 102563 - DNA, 1032 bp, Homo sapiens
gacactcatcactaattatttaagttgggaaaaatattgagaagtacaagaataattctgtcatcattcttttggaatttactgtgattcaagcttaaaatgtctttttcatgcattccataatctcattctgcagtgggaaaaccactctcaaatatgttgcattttcagaccaaggttataagaaattgagagggttataagatgtaacaatgaggcccacatattaaatggcttgtgttccttggtcattcctatgtgagtaagttcattgtgagtgttactaaacagtatcatgttatgtgttagttctcgctgttggtattttgtaataagcattatctttgaaactaataaaaatacctttgaaattatcgatattattaagattggccatcacatttataccaaactggcaaagttttataagatgtaaaatagtcttttatactgtatatttctaaggtactgtaaatcatgtgtattgcatggttttttccctaagactgatacaatgtacgccttttaaaatgtaattctttgatgaaaacaatgtagtagcaagttacgggttttagttggcttcagtggcaatataatttcagtgatttttttcatcactcctggattatacttgcagttactgccttccacagggcaaataattgactgttgactgtgtgtgagcctcagatgggttagcttaatcatcaggaaaatagggctaaagaataatgtaccatttaaatactggccagagtccccatcaagcagacactgccaccctggcagatgctgccagcacgagacctgggagaggtctgggagccacagggcaggattctgagtagcagttagtgcccatatatggagcgcttcctgcacccagccagtgctcagtggctgctgctgtagcctcattcactcacagcactgctgctaagttcatgaccagtgggaggggagagagatgggaacaaagaggcagtccttcagtccccaccctcctgctgtctgaatagcatcctgtat

SEQ ID NO: 102564 - DNA, 1038 bp, Homo sapiens
cctcccacatttttctgtgaagagaagccgatgttgtagtgctaaaacgtggacattctggtcctgtatttgtatcattttgaaagcaatgcaaagccctgtcatgatcagtatttacatttatgaagtgtagtagcatgatacagaaagagaaggcatctgttgaagaaaagctgtgaaagtggcatctttctctagttttagtattttcctttatgatagtagcattttcagtgacagtgagagtagtatttcagtgtgcccctgaggtgaataagaatttagaatgtatggaatctgtatcacagaaagtgtattcttctcaagattatttgtcaatccaatagtaattatttttatttctgaaaggaaagcatttggttatttcagaggttataaatatttggttaaatgcatgtccaaatacatttataatgatttgatttttgatattgataattgtttagcaacaaagtcaaaatgtaagcagtaatctagtatgtcatgttcttgctcagtttattaatctctgaattccatcttggctctattttttttaaccttttgttccctttgagcaccgaaaggagtaacctatcgagcttttgctggaggatgttataaatgaaaatttagtgtccattccatcagctttgtcaactgggagaagtggtgtgtgtgtgaggattattttggagaaataatgtctgtagagaaagttttaaatctcttagcctctaccacagtgtggcatcagttttcccatggattgtgtctaaaccaggtttatgctctgctgtcttggccgaatgatgacagccctggaattagagatctttaacctcaaagattggcagccaagggcgaggacttggtccctttaaacattcccatggatgaagctgatgaatattttcacaacttttcagtttgcttaacgtaatgagaatctaccattttacacatgtagtagaaatagaccctaaagccaccatatggggcactcgtaaattggtttacaattttagtaatattttg

SEQ ID NO: 102565 - DNA, 1047 bp, Homo sapiens
ccagcctagcccagcctcctctccctgtcttaccaccattcccacccccgagtgggaagaatcccgtgatgatcttgaacgaactgcgcccaggactcaagtatgacttcctctccgagagcggggagagccatgccaagagcttcgtcatgtctgtggtcgtggatggtcagttctttgaaggctcggggagaaacaagaagcttgccaaggcccgggctgcgcagtctgccctggccgccatttttaacttgcacttggatcagacgccatctcgccagcctattcccagtgagggtcttcagctgcatttaccgcaggtgaggaactatgctgctgctttaaaacacggggtcattgctcttggtaatgcttctagacagcattttagtttcaggattactgttgactttccaccttgacatcactctgtccccaccaggaggagttactggtaagtctggctgcttgatttccatggccatgtggccactgagaagccgtctgcatcctagtgcatgctgggtctgtcgcaatgcaaggcagggacacctgagaccccgtccaccagagcagtgtttacaacactatccataactcccttcccgttaggcaaccccccccatgaccctcatcccacagcaagcctttagcaggagagacggaagaagagcccagtctttgaaaccttgcccccagttcagcaccattttccttcaaaggtctcatccaagaatctcacattcaagataagtgacaccagcccgtcagcagctgaaaacccaagtctgggtcaagatggcagcctctgggctcccacatgactggctggtggctgtttgctgttcctaagccgaggagcccatcaaagcagcgaatgagccagcacagcagtgagcacctatcagagcgcagggagggaggggcctccaacaactgttctagggcctgccagttgcctgggagtctctactttgaatttcctacatgggctgtatgaggacttccccgcatgcccaggctggaggtggacagccacccttccat

SEQ ID NO: 102566 - DNA, 1050 bp, Homo sapiens
aggacctgagtatgcagagcagtgcctggcagttgcagggttcttcagtaaggcacagaaaaccccaattataaagaaaagtgaataaatttgactaaattaaaatttcaggaattatttactataacccacatatttggaaaagaaaagccacatattgggaagagatttctgatgtctcatgtgaccaacaaaggattcgacttggttacaggctgactcctgcacctgcatagcacaaagccatccatttggaggatccttgctggggcgtggggatgtcacacacataaatgcaggagtcggggctcatggacctgaacccttcagatccaagccttttattatatagtaattagactttacctcaaggaagaaacaaacacaagctgatagaacctagcatgggtgggccaagaaatagcaaatggccagaaaagttgcccggaaagagccctggtggccaaaatgatgccagttggctgcagctgtgtccctgctctgggagagttgagagtggggagcagccaccttggagggccaggtggatggggctgggtgaggctgaactgttccccttacacaggacacagtgacaggcagagggcccagggccatggtaggttgggggtggggtgggagccacagcactgccattggaggtcaccagggtgtccatcccactggcaggcagtttggcggtgaatgcagccccagagagttgtccacaagaccatggggtgagaggctcccatggggttggccaccccacggtgattatgttggcgcgggagccgtgggaaggaacgagagtcttggttcagatgacctcggcctgtgtcctcagctgcacagagctgtgggaacaaacaagaccatccagaggaggaccagcagcctgtctattcagagtcggctatggcaagggggccagagcactgtgttgggcagactcaaaggcacgcacaggaagggggatggctttattgtagggaaagggggaggctttgggtatgttctgatggaggtaggggaagccaagatgggctc

SEQ ID NO: 102567 - DNA, 1083 bp, Homo sapiens
ctaacctgaaacacgtttattttggggtgtgtgtgtgcttgtgtttgtgctgccttgttttctagtgcctggcaactagcacgcctttaatttgagaaaaagcagtgtggaattttatttgaaagcatgcctgtcagagcacatgaaggaggcagggatggggaaaaacagttgtctttaattaaattttacagttccgtaacttaaccattgtgttttaagaaaaacaaaatagataaaacttgatggtaggtaggttgaaattgtagcatcaatgtcttttgaagtattttgttgtgtattggtgtgtgaatttctcatgattcagaaaatttccctctttgctctctgtcttctgtacttgagcaaagagtgctttaattttagctgtcactcatcttttatatgcatagatacttaaaacattgcatgtggaatatgggacacataggtgatactcaaaaatagttgttaattagggccttgttgaatagcgctgtctaagcaatatctcatccgtaactaaaatctgcaaagacagaatcattttgctaaagaaattttctaagatattgaaagtagagctcatttataaaagtcagtgtatttttatcatatttcacttatgtgaaaagcatctatatctgttaaaagaccttgaaagatagtgtctgcaagatagagacttcaaagttactgatgctgctgtttatcctttcctcctcaatatcttctctggtctttttttttttttttttttttttttttttttgagacagagtcttgctctattgcccaggctggagtgcagtggcgtgatcttggctcactgcagcctccacttcccaggttcaagcaattgtcctgcctcagcctcccaagtagctgggattacaggcgtgtgccaccacagccagctaatttttgtatttttagtagagacggggtttcaccatgttgaccaggctggtcttgaattcctgacctcaggtgatctgtccacctcagcctctcaaagtgctaggattacaggcgtgagccaccgtgcctggcctccgttatctctaatcttgatagcctaaa

SEQ ID NO: 102568 - DNA, 1078 bp, Homo sapiens
taggccagacattgacagtcctgacgggagctcagggctgcccagcgcccagcgtgcacgggacggccccacgacagagggagtcagcccgggaggtcaggagcgcggcgggcgagggccctgtgtggaccacctccaccaagctcagagatttgcaccaggtgccttgttgcctccgctcaggatgaaagaggagctgagagaagtgctctgcctgccagtgcagtgcccagctccaaggctctagagggtgttcaggtgggtctcctggggccatggggagagattggtgcagaccttaccccacagcatacacctgccacagcgaaatccagggtgttggcacctgtgtgtccgtgatgagcctaggaaaccagagcaggggcagaggggcgtcatcctcccaccggacgctgggagctcagaccccaaaactgaaacaccgtggcttcggcggggggtgtgcctcctgatgtcaggagccccatccacgtgtgtccacacagatctcgtcgcagcacggcaggaaggggtgctgcttagggctcattgttggggacatgaccgggttcagcggctagaacatctgccccacagcagcctcctcctccaccgaagagggtagttgtctccctgaagcagtcacagcaggcgtctctgccgctccgtcaccacagtggggttttgttcaggcagatcgcgctggggttctgcacctgcagaaggagaggggtctgttgtcgctggctttcccccaagcaggctcttgcacactctagaaaaaacaccttgtaagtctgtgcatttttattgtcttgataaattgtatttttttctaatggggattgggagatggacttcgtttttaaaaatatgtggattttggttaccaagtttagtgttaatatattccatatacatacaaaactacccggtatgtctggcttttcccttctgtcaggtaatagctaaagtcagcatgattgctccctgtaccaccccaaataagtgagtgcctcaccttgtggggcctgagcagctaccttgagaccatgtgaggtggcacctttccggggtg

SEQ ID NO: 102569 - DNA, 1112 bp, Homo sapiens
aggaatctctcattgttcaccatgtgacccccaggaggtattcgacctgcactggcgtgcctggcctgggatttggtgacggagaggagggctcccagggggacatgcggtgggacaggagcgtggcggctgctgactgtggggtgtggatggggctgcagcaccaggcagagcccctcagggcgccgatgtcgagggcacctgagcgaggggtgccagcaagggggcggccggctggtgggtgctcgggggacggccgtgttggttccatgtaactgtggaactcatttcactcagctgctcctctcagttctccctgactctggaacctctgtgacgccagttctccctgactctggaacctctgtgatcctttgcaggttttttattggcacctcagtctcaacattttcttttcggattcatgaggaaagagaaatcctggggttggaccccaagacgacgtacaacaggttctgcggagaccaagagaaggcgtgtgagcaacccacccactggaagatcacctactgaggaggatcctccagggccgctccccggacccgacaggcgcgggtggatgcaggttctgtcgccgtggagtcaccgtctactgccagccgggagctgggcggacaggaccgtccctcgcagggtcccaggcccagaagaggccccacgcctctagagctgggctccgtcctcggcgttgccagccgccatggctgatgaagaggctccgctgctctcgggggtggcggttgttttcaggcagcgtctgtgaacccacagctcggttgccagcagtgcccgcgtggtgacccagaagcaggagtgtttgtcaggctcccgctctggcctttccagccacctttcatgtcttcatattttaagtgcattgaggatagatgcaggcgggtgagctgccctccgtcaggtggacccgggctgacatttccctgggagctggtgcaaggagaagcgtcattttaaatgtctgcagagcgaccaggggcctcatgaatctctccgttgccctccgcgcagcaggaggctgcctgtgtgtttcctcctgggatgcgtgcaaggcagacctggtgctgcaaaggaaa

SEQ ID NO: 102570 - DNA, 1153 bp, Homo sapiens
ttcttctaattcattttttaaaatacacttattttttatttaaatatgtggtttttgttaacatgtaatggcttcttatttttagctgaattaaatacttgtagctttaacgtctaacataggacgtatcaatagacatagtgcacataaccagccgtcagtcattgtttccagtgtaaaggggtctttaaaccaaacagtttgagaaccatgtgggtactgattcttgggttccagtcactgggattcctctgccttagtgttgaactattgctaattgttaaaacgatgttagcatgtctgctgcttctgcttacaggctccgtaagtaactggtcatagagaaacaggccactcactgccttcacaaactaggaaccattgttaagtgcctagagtcgggccacgcgctgagacttgtgagcagtcgggttttccgtgcagaaacctcagcatttgagacctgtggtcctccttctccctgctcaggtatcttctgtatgacgtcaaccccccggaaggcttcaacctgcgcagggatgtctatatccgaatcgcctctctcctgaagactctgctgaagacggaggagtgggtgcttgtcctgcctccatggggccgcctctatcactggcagagtcctgacatccaccaggtccggattccctggtctgagttttttgatcttccaagtctcaataaaaacatccccgtcatcgagtatgagcagttcatcgcaggtgaggccgagcggcacgctgggaggccgtggttgcttaactggggccaggcagtcatttctaaggtagacatcaggttgggcttacgattgcatccagcctcaccagcatcctccagtgcccagtgctgctgcctgaggcctgtggcagcacctcctccgttcaggagcacagtccctttcccacgctgcagtgagcttcccaaaatgtttctcggaaatggacctgaagtggatgagctttgtgccccctcagttagagccgcccttacaccctaagaaagcggccacccctgggtgttatagtgacaggactcggctccctgtgcgaaaggctgttttacgttcaggaagacgcactgcgtgtggagtatgcttcgtggtgtctcagtgcagcgccagggataaaggtct

SEQ ID NO: 102571 - DNA, 1054 bp, Homo sapiens
gccaggagcttccatgcagctctcacacacaaggcaggtccccagctggctctctgcagagcctgacctgaggcacccattcgatgagagcaggttctctcagtgtagaacccagaccagcagaagccgcatcacagggacgcttcagagacgcactgctcagcccagaactgccaggcctggcagccggggtgcggggaccctgggaccctgatgttgtgtgagttcaggaaaaacagcgttgccttcctgaatgctgttccatttacttctagctcctacgtgtttcttcaagtaaaacacagtcgagcctcattattcatgggcaaatttgcctacttactagcatttaccctaacccagattcaatactcagggcacctccacggtcattggtggacgtcacagcgtcacagcaatgagacgtgagtttcctgacacggtgtctgggcgggggcagaacgagccatgctttggtgtctcgtttgtgtgtgcgtgagtgtgtgaatgtgggagtatgtgagtgtgtgttcatgtgtgtgttcgtaagcgtgttctcacctcaacactaacaaccctgactggcatgtgatggcagcctcatggggctccaagcccatgtgtatgggctccctgtctgtgctggaaggttctacagcaaaaatcagcccctgctcaccagaggcaaactgagcatgaaaggaaatgaaagacgtgaactttaatgcctctcatgtgccgggagaacgaggtcacacagcaaatcacggctcttgggaatcaggatgtgtttgaaaacttcaggggctctgagccctcatgaacccaaccgatgggcaagcagcccaggcccaggctggagatggggatggggctggccatggtccctgccaggagctggaagccactcccgcccctcctgctctctccatgtccactggacactgtccctggtcctgggagaagagggaaggcctctcagcctccactggagggactgctgggcgagcctgatctacaccacagcactccccaccacaggagcgacttcact

SEQ ID NO: 102572 - DNA, 1572 bp, Homo sapiens
cttaaaaagcacccttgagagttgaaggcctgaggcccagtttgctgatttgcacatttttttctggccaagaatgatgcatctttccatgtctctgtgctacacttgatccctagaaaagtcttttgcttttttgtgtcaggattggtcgctgtgatgctgaggttcttgaatggtgtttgtgcctttccctgtaatcaggaacctgggctcagtggtcacttggccgcttggttgccacccagctgtgtgaggtgccgcagtcttacctgcaatctctcctctggtggatttgtgtgtgcgaaacagccgtgacccccaagaggtgcttgtagtcagtgcttcagagtcagagtggagctgaggaagaggactgtgtcaccggggcagttgctgatgcccatggccacgccaggagcctggtctcatgagtctccttgtctctgagcctctcctacactccaccatggcatcaagctctacccctgcctccctgcagcccccagaagatgcatgtcctgcccctgctcaccactaggacctcctcctgtctggtggtcagcacagagcccagtgatgtgggtacaaggcagggtccctgcgcctcacttcccactccctctgaagccctgcagggattgggcttcagtgacctgggttccgtgggtgtggctcaccccagggcacacggcgcctaggtaacgagagaccctcccgcgtagaaggtggtcttgtttctgggctcacccactggggagtcttcaggattcagatgcaaggactttggaagatagttttgaatttcagcaaaacttgtttttcagggcactcctgttttcctgtaaatgaaagcagagcaggggaagtcctctgtaggaaaacctagaaggagtgaactgccctgctccagagtgcaggcgccagacactgggggccagtccaggagagccccacttcacctgctgctgctccatttaaaagtgcaaggcacatgcatacacgggcatgcacaattgtgcacacaggtgcacattcccagtcacgcgaagtgcaggggcacaactgtgtacatgcacacacacacaaaagtgcacatgtgtgtgcacacacatgccccccgcaggcgtgtgattctcacagtcatgctgcatccacacaaagtcttcctccctcagagtgccttgttctgtcttcacctggattgttgaaaaggctgggggctgggttctttgggccccgggagtgccaggggatcctgtggtatgatcaacagcaccaccgccctgggagcagctcctgattgctgggaacagacagtaggggctgggctggggtagaagctgcagcctgcaggcagcccagagagaggggcccccacaacaccctccccagcccccgctgattgtgtgggggcagggagtatgcaggcagctcggagagaggggcccccacaacaccctcccacccccgctcactgtgttgggggaggggtgcctgcttctgctcaggaaggagacccggctgggtctggctgtggagcgtatgttggagacccgaggccaccctggaact

SEQ ID NO: 102573 - DNA, 2564 bp, Homo sapiens
tctgggcttgggtgctcctcttatccaaggcctcccaggcctgggagtttggggtctaaggcccttttcaaggcccaggcacctgcccagaatgactgggcagctgagacccgcctgctgggagccttgccagggccagcactgggcggtcacaggccagagccctgcaccaggcggtcataggccaggacctgtccaaggcagcggagtgccaggcaagtgaagccctgccatctggtgcctgagcgcagaccctgctccacggccagtggctgtcaccagccttgctgcctcagtttcccctccttaaccccggggcgggagtggctgcttcctctaggggttctgtgagcggccgctggcaattgtgtaaaagccacataccacacactggatctttgtgccagatcccgtgtcacttgaggagacagccagcccaggcagggagctgatctgtgttgtcccctggcgctgcccggggccacagagagtgagggagcggtgcttaccggccctggcggtaacgttttagatggcgagtttgggcctctgcagaagggctgtcaggaggagcttttgatcacggatgcgctgagtcagatgaaatgtggaggctgcaggggaagtgtctgtgccccgtgcctgcaggagcacgccttccccccgcagctcctccggcgcgggcaggccccggcacggcctttctggcttcttccacaggagccgtggaaaggggaattattctcaagcccctgcatctttctggcactttctggcatttcatggtggcagatggggtcacctcgccacctcggggctgatcccctgtgggcccctcgttcccacaggagccttgtgatgggcagggcaggcaccagcaccaggctgggtggcggtttggctctcaccacgccggcttccagaaggccagcaggcttgcgagtgggcacacgctggtgctggggccgggcactggtggggggtcaagggctgaccctgcggggacccctgcagacagacactgggccagagccacagggaggaaggccagtgggaacggcaggaggagggagcgtgattggttacggtggcggaactcgcacccacccccgcagccgtttgttcgtttgctcatttatttttggtctgaagtccatgcttttgtatttccccaccgttccgttgagcagcttcaacatttgccgcagttaggcctctctggaatctgtgcttagagattgtgagacagggtcaagtttcagcagctcggactcctctgtctgcagagaacctgccagcacagctgctcctgggggcaggagaggcactgtctgttttggggtgacgtgagctgatgggaaagccaggctggacatagctcctgggccggcagcccatcttggtggcggcttcacgccgtctggcatctccggtcctggagcatgagggctcaggaagagcctctgattcggctgctctggaggcctcgtctggacacacctgggcaggcccgagtccacacaccctatggcctcaggaaccgagagagaccttccttccatgtttcaacttagacaacaggagactttgttttgggaggaatcactcaattcaggtggacgctgcagctgggcgggacatctggcctctccctgtggcagggaggggcatgggagagacaggggtagtgtcccaggaactccgtgggcctgtggcgaagtcccagccctgcagctgccagtgcagggtgttatccaggggcaggacatcgtctgcagtggctctgccttccccgatgccaggtgaccccatggagccagtgtctgtgacctcttccatgctggggctaaagaggccagcaggattgggggctggcattagtggagaacctcagagcccagggctgtgggctgatgggtggcgaggcccccgccagctgcttggggatagcccagccactgttcttggtccacccggcctttgattcctttttcctgtgtgcatttttgagcaccttctgtgtgcgagaggccgtgcctgcccgagaagagaaggaaacaccacaatgagcctcggacacccacagtctgaagggcccggagtaagcctcagacgcccacagtctggagggcccggcgctgtgaacgagcagtcacagggaacagcgtgcccttatcgctgacacaggctctggagggcccggcgctgtgagtgagcagtcatagggaacagtgcacccttatcgctgacacaggcgagggcttcgtcttctcacagctcttatcttgggtgtcaccccagccagagtcagggctgatggcggggggtggggggggggcaggctgtggtcagggacctgcaggagaggggagggcctcgcttctgatgggcgacgttcatttacacacagctctgcggcccaaacggccaggctggatcctgtcttttaaaaaccttgctaatttggttgatggaaaatatcatctcagagttctgttttgtgagtccccattgccatgcgggcaaacattttcatccactaaggggccgtcgtgtttctctgg

SEQ ID NO: 102574 - DNA, 2114 bp, Homo sapiens
ctctctgaggccgcccatcactgttcgggccctggggtgggagctgggctgcaaagtggcctggactttatgtcctgccaggtacagtgtttccctcagcagatttatcaggcgttttgggtgtaaatgccaggaagcctggctggcgctgaaggaccctcctcaaagccacggatgggcaccatgcttaggggaggacctggggccacttggttgcattgtgaaatgttcatgatttttaaacagttttattttttaaaattactgaagtccaacaggagcattattcagcatttgaggccccagccagtacagcgctgcctggaataaaaagtaaaatgtcccccggaaccccagccctcagttctccctccctggacccccctcctgagaatcttctcacaaccttggcttactgactccacattacggccgtgtccccgctctgtggcccggtggacgcaggtagctttgactcaaaacaggaatttgtttccatcctttcatggtcacaaataataaaaagcagcttctggacaacaatgaagttgagataaataccaggaccagaccggccacgggagccgtgggtgagccgagggtccccctcaggacccctgcatcctgcctgagtgtgcagcagctccccccgacaggagcgtcagggccggtctcctccgagtctcctggcagaggcgttgctgtcgcagctggcactgtgcatggctggcagcagaagtctgtgcttggcagccctcgacacctgctggatgtgtttgcagggctgggcaggcacctgtcccacggcccagccccgagggtctcgtggcaccagcctggcaggacgggcagcagggagttaacgggagccactgcgaggacactgtgatctcagagctgcgtcatcgctgatggaagaggtgacgtcccctccacagaaagcgcctttgtgggcgaccctggctcgtccccctgcagcccccacgcaggtagtgggctgccctctccctctcccggagtcccctcggggcaccgagaacagacccctccttcatccctgctgtcagctcatgacaccggacaatttgggtcccaattatatctagagaaccaggggaaaggtcacgttgtctagacattaatccagcactgtggcattttttcctgggcctgtatcctggcaacaggagggcgagtgggggccccagctcctcccctcctcagaaccttctggggctggaggtgtggcatgtgcagggaaggcagcctggagaaggcggtgcccttgggctgggcctgcagtgggcagccatgcaggactccatgggaggagaaaccacagctctcggctgtgctggggtggggtgaacagtggcggggaaccttggggagctgtggatggcccaacctcattggaagctgtgcgtggccaagctcaggcacctgctctgcctctcccagtcctgcctgtgtctgtcctggtcacggattcctacctctgtcccaggagggtgtgaggacagtctgtgccactcacccgtgtctgctccgagccaggagactctggccacccccaccccacccagccctgcctcgaggtcctgcactggtccctgcccggtaccgggtcagctggtgcctgcctgtcctgccctgcactcctcaggctcctcaaggacagacggacagacaggcactctagagaagggaccttggccagacggctttgccgcccccacccccataggtgcttgctttgagccccttgcaaaggtgaagccagatctgggatcccagggcctggtgcggctggacatgggaggagggccacggtcacgcttgcacggggcagagactcccagaaccacaggcctcaggagagctgggaagggaaggagagggcactgcggtgcctggagagccagagtccgcccgtgtggaagtgttgggggctgtgttgcagtgacagccctggcgtctcaggagcggagcaggacaccgcgtttctggctgtgcaaggctccacgcgggtcagcagcccatcctggcttgtcatgctgttaattagattggaaaacctcggccttccatttcttaaattgctcactcctgca

SEQ ID NO: 102575 - DNA, 1095 bp, Homo sapiens
gtttgaggctgggggtgacgctcctgtgcgggaggaggtcgcattccattcatagcggcttatctgggctgtcaggcaggcctgggagggagcctgcctctgtgctctccaagggtgggcgacggacagacagggtgtcccaccccttctgggccaaggacagagggtcagtgtttgcagagacctggggaggcccaggtgacctccaccgagcacctgctgtgtgcagggccagtgctggctgcagagacagcggagcgtgtgtggacccggcggcccaggggaggggggcaggcaggacccggcggcccaggggaggggggcaggcaggacccggcggcccaggggaggtgggcaggcaggacccggcggcccaggggaggggggcaggcaggacccggcggcccaggggagggggcaggcaggacccggcggcccaggggaggggggcaggcaggactcggcggcccaggggaggggggcaggcaggaccaggcggccctgggggtcaggggtggaggccaggcctagacggcccacaggagggtggactcattctgaccgattcctggaagcccccggaaagtggtgatgttctggagggcccagcagaccccaaggcccccaagacaatcccagctggctctctgcggctctcggtgtctgccatttgagacaatttgggcacaggcagggcaggccgtcgcggacggtctaagccgcgcgcattggtgggggcagcagagcccctgctctcagctcctcggggtacagcgggggtaccaggcgggtgagtgggtgggtggtcactgctcctgccaagggcagccctggtttggtttgcacttgctgccctggtgacggctgctctcattcctgccccattgctaacaagggtgtcataagctactttcccggcccacatcctattaagcccatggagaccctcccacagctgagcctgctgtgggctgcaggccctgggcggtgcccacctcggtccccactggcctccttccagcactttagagcagacacaggttggagataaggaaagttccagagcacagactggaacaagccccaggcctctcc

SEQ ID NO: 102576 - DNA, 1058 bp, Homo sapiens
tgtgtatgcatgagtattcacatgtgacatgtgagcctatatgtatgtgtgtgattgcgagtattcatgtgtgacatgtaagcatgtatgtacatgtgtgagcttgtgtatgcatgtgagcattcatgtatgacatgtaagcattatgtatgtgtgtgggcttgtgtatgcgagtattcacatgtgacatgtgtgagcatgtatgtgtgtgtgattgtgtatgcatgtattcatgtgtgacatgtgagcatgtatgtacatgtgtgtgcttgtgtatgcatatgagcattcatgtctggcacgtacgcttatatgtacatgtgtgggggcttgtgtatgtgagtattcacatgtgacatatatggcatagctaagcatgcatgtgcatgtgttcatgcatgagcaggagtgagcatacatatatgtgtgcatatgtgggtgttcgtgtgtgagcatgtgcgtacacatgcgtgcgtttgagtgatgatgtgaggaggcttatgtagtagccacccttgccaggtgcttcctggtgggaaccagatcccgggggctgagctgtggagccgtggcagagccgcactaggatttccaggaggttaaacgtgcgatgctgtggaggtgcttggaggtgagggaaccccaatggtggacaggaagctctcaaagcacttagaggtggaggagtcctggacagtgggcaggaagggtggggtcaggaatggagtgggcaggggaagggtggagggagctgggcaccctgcagatggcagggtgggtgctcagtgccatggggctgccaccatcctccaagtgtggccccgagggccggagctgctctccctccattgctaggcgtaatcagttccttgtgcctggctctgcccaggaggtgtatattggggggcatgaatgtagggccagcccagctggccagtgaccctctgagcacagagccttcgggatggggctgggggtgtcccccacaacagagttcccttcctgagatgcgctggtggaggagggggcagtctctggaatttctgtttggagacttt

SEQ ID NO: 102577 - DNA, 2544 bp, Homo sapiens
gtgaacgtgtgtgtgagtgagcacgcctgtgtaaactgcctggctccacctctgatgggctccgtgatcttgagcggggtcaccaggctcatgcctcagttttcttcatctgtgaaatgggccgatggccaggctgcacacaggtcctcagagggcataaggcacactcagcacccactgctgtgcctgggcagctggcgggggggcacagcagccactcacatgccactcacatccctgtgggttaccggctgcctggaatgttccagtctaaccggatccttttgtggacggggagactgaggccgggaaggagtatgcattcctgccctggtcccgggctccgtctctgctgggtctcctgggcagaaggtcaggaagggctgagagggacacagtccaaggcaggtaaagccccagctttgaggggaggcacagcagctctgagagggtctgagcccctcgagaccctccccgggatgtttaacgacttgggcagccattgcaacagtggaattggcactgcagcaagctgagcattttttcggttccaagtttcccacaacacaatggctccaggccaggcgcctctgggcgttccaggtcagagggggagcaggggctgggggccgctgcctcagtgcttctgggatggggtcctggcttggagccccaatccagagactcagcagccctgccccggcagagcctagcggagcacgttgggaaccctgtggacactgcacacagcaccctctgtcctcacggagcctggggctgctgcagggccgtgggaaagaagttataaatccttgggtgctggaacccccgggtgctgggcaccttgattccaaggctggtgccttctttccttctgcaagagtggggggtggaagacagccggccagaggctgggaagcctgcacaggggagggcaggagggcgtgagcctggctagccccacctccaggcacagaggccctcccgccgcccgcagctccagccgcactgccccgatggctccctacccctgtggctgccacatcctgctgctgctcttctgctgcctggcggctgcccgggccaacctgctgaacctgaactggctttggttcaataatgaggacaccagccatgcagctaccacgatccctgagccccaggggcccctgcctgtgcagcccacagcagataccaccacacacgtgaccccccggaatggttccacagagccagcgacagcccctggcagccctgagccaccctcagagctgctggaagatggccaggacacccccacttctgccgagagcccggacgcgccagaggagaacattgccggtgtcggagccgagatcctgaacgtggccaaaggcatccggagcttcgtccagctgtggaatgacactgtccccactgagagcttggccagggcggaaaccctggtcctggagactcctgtgggcccccttgccctcgctgggccttccagcaccccccaggagaatgggaccactctctggcccagccgtggcattcctagctctccgggcgcccacacaaccgaggctggcaccttgcctgcacccaccccatcgcctccctccctgggcaggccctgggcaccactcacggggccctcagtgccaccaccatcttcaggtagagcttctctctcctccttgctgggcggggcccctccctggggaagcctgcaggacccagacagccaaggactctcgcccgccgcagccgctcccagccagcagctccaacgccctgacgtccgcctgcgcacgccacttctgcaccccctggtgatgggctccctgggcaagcacgcggccccctccgccttctcctctgggctcccgggcgcactgtctcaggtcgcagtcaccactttaaccagggacagcggtgcttgggtctcccacgtggctaactctgtggggccgggtcttgctaataactctgccctgctcggggctgaccccgaggcccccgccggtcgctgcctgcccctgccaccctccctgccagtctgcggccacctgggcatctcacgcttctggctgcccaaccacctccaccacgagagcggcgagcaggtgcgggccggggcacgggcgtgggggggcctgctgcagacgcactgccaccccttcctcgcctggttcttctgcctgctgctggtccccccatgcggcagcgtcccgccgcccgccccgccaccctgctgccagttctgcgaggccctgcaggatgcgtgttggagccgcctgggcgggggccggctgcccgtcgcctgtgcctcgctcccgacccaggaggatgggtactgtgtgctcattgggccggctgcaggtaactggccggccccgatctccccaccctttcctttttgccttgccaggtaagtgtgggcggggctgacgtgagcctggtacaggttccccccacatcgaatctctacgttcaggggcccgtggccctcgggaggtgggagagctgggagtgaggcctcctgtgtggggaggaggc

SEQ ID NO: 102578 - DNA, 1005 bp, Homo sapiens
ccccagggcagctggcactgccacaagcagccagattcctgggtcccactcatcctccgtccctggaacacccaaatgcccagcaagcaccagccgccttgcaggcaacccccccggagccacaccccacctggctactgttccccaccaagcatgtgggtagggcagccttgcaggagccgtactgactggagggacccgggtccggtgtcctggagccccgggaggctccagcacagcccaccttgtcctccactgcaagcccacggaggcagacaggacagcggtgggctgggagggctgcagcctgtgggaggggaaacgccaggcctgcacacctgaccctgccctagccctgccagcccgagactgtctgggatcagctgagcactgtgagcaagcttcagcctcagggaaggtgccggtctcctgggagttggggcacagctgcatggcttgggggctggggtccgagtggggctgtgagggcgaggaatttctgcaactgcagctggcccggtcggtggcacagcctgatggggacttttcactgaacatctggacagcttggtagcgtccccgtgcgagggaggccgtgtcccgtgcagggtcctgggggactccatcagcgttcctggcctgcattgcctctggccaggggtgggcctcaagctttatcaaggagccccttcccaggtgtggcctggccgggagggtcctgccccctcttctggcctctcagctcctccccagcccaggctcctcttgggttagccccaactcctgccggacccctatgttgggctggacactcccagccctgggtgaggggcaggaggaggagggggagcccagcctgacccctcgggcagacttcgaggccccgaaagtgggggtgctgggctgtgatccgggcaccagaacagagccctcgaggcccacagaggtccctggctgcatctccagggatcagggagtatgtgcccctgaggggaggggagctgg

SEQ ID NO: 102579 - DNA, 1440 bp, Homo sapiens
gccagccccagcccctcacagctccttgccccagcgggggtgccggccagtccctggtcccttctccccactggctctgcccatcaatgctcaaagcatggaaggggaagcctgtggacaccatgtctgctgtgcccatccctgctcaaagcatggaagggggcctgtggacaccatgtcccgtgcagacaccatgtctcctgcagacaccatgtcccctgcacacaggtttctgcatggagcctgcctgtcgtttgggaatgagtgaaccagggtggccgttgggtggctgagcccaggggatcagggcaggctgccaggcacgtggagagccctcccagactcagtttctcctttctgcccctgcctggctgcctctccaggccgcgtcggtggcccctggttccgtcctgcacagccacctcaccagctgtctttctttttgcagagcgcatcagcgaggaggtggggctgctgcagctccttggggaccccccgccccagcaggtcacccagacggatgaccccgacgtcgggctggcctacgtctttgggccagatgccaacagtggccaagtggcccggtaccacttccccagcctcttcttccgtgacttctcactgctgttccacatccggccagccacagagggcccaggggtgctgttcgccatcacggactcggcgcaggccatggtcttgctgggcgtgaagctctctggggtgcaggacgggcaccaggacatctccctgctctacacagaaccaggtgcaggccagacccacacagccgccagcttccggctccccgccttcgtcggccagtggacacacttagccctcagtgtggcaggtggctttgtggccctctacgtggactgtgaggagttccagagaatgccgcttgctcggtcctcacggggcctggagctggagcctggcgccgggctcttcgtggctcaggcggggggagcggaccctgacaagttccaggtaacccccactgtgccgtcgctgggggactggagcagctgggatggggtggggtgggggtggccactgggacagggacggagctgtggccggaagaggagagcccccaccccagctgtggtcagcccgggcctccagcgcaggcctcctgggttcttggctgctcagccctggcctccggcgcaggcctcccgggttcttggccggcctggctggggtggcattcactttcttggctctctggctcctgcgcccccaggaagggtagccctgggcttccatggtttctctgagaccccgaggcccagcccaggagggccctctttgaacgactttgtaactagacatccaccccagccgtgaccccgtgacccagagacacccccaggcctgtgccaagccctgtggtgaagtggggctcccggcctctgaccggccggtcgggta

SEQ ID NO: 102580 - DNA, 2587 bp, Homo sapiens
gggttttgtttttgatgaaaaggtgaagttcaaagaaagcaaagccatggtgccacctcggttggtccgagtcgggagatgaggccgcctggtgcttgcgtaaagctcccgggacttggggttgggggacttgacctgcagcccctcgaatctgcccgccctcccaggccttggatcgagccacacctgctgtggttctaaacccgtagccctcaggtggcccatcagctgcctcagatgagccaagtctgagggagcagcctccgcccagccgggtgctttccacatgaaagcgcccaggacgcccctgggtctcaccacttcttcctaccatgaggcataccgcacccccagggaggctgcccgagaccccttccctctccgagactctcctgccctttgtgggccccccgaaatctggagctcaagcagcaccggggttgccactgccacctcaggaccgctggtgacccctttctctgtctgcatttagggggtgatcgctgagctgaaggtgcgcagggacccccaggtgagccccatgcactgcctggacgaggaaggcgatgactcagatggggtgagtgacatctggggcacgggtggggtctcccctcaatccctggcacgcggagttcagggccaaggtctatgacaggaaaagtcccaaaatataccacttggggcactgggaagctgcgataccatttctgtgctctcctgtagcacctcagagcccttccttgccctgaactttcccataaaaacaaatacaaagcatgatataaacaccagaaaccaccctccatggcagctggtgagacagaggatgtgaggcagctcagcaaagtgtgtgtgtgtgtctgtgtctgtgtggtgtgtctctgtgtcttgtgtggtgtgtctctgtggtgtgtctgtcttgtgtgttgtgtgtggatgtgtgtgtgtctgtgtggtgtgtctgtcttgtgtgttgtgtgtgttgtatgtgtgtctctggtgtgtctgtcttgtgtgtcgtgtgtgtctgtggtgtgtctctgtgtgtagtgtgtctctgtgtgtggtgtgtctctgtgtgtgtggtgtgtctctgtggtgtgtctgtcttgtgtgttgtgtctgcatgtctgcatggtgcgtgtgtctctgtgtctgtgtctgtgtgttgtgtggcgtgtgtgttggtggggtgtgtggaatcacgtggtacccaaggggagaatcccccagccccaggtgtgaggaacagcagggaattctcactcaggggcccagatcacaacatgccccacgtgaacatggacccacagcctcgctcctgggggcgtgggcaggagacgccgtggacgtggacccacagcctcgctcctgggggcgtgggcaggagacaccgtggctggactgtgggcagtgtgtgaacatccatgttactttcatgctttttctttattttgcccaataagcccgttgtttttgcctggaacatgccagaagacgccagatcgttcacatggcggccatgacaaggctgcgccctgggacagcttgctgggtgcggggggtcgccgaggcgccgcacccctcccctggcctgtcttgccctcaggggtcagtagcggtccctgaggatgtttctcctccgggttttcctgaagtttaaaacatccagccgccttggcgcgtgttcggcccagccgggcgtgcgctggggaaacctgtgcggggagcatctgcggtgcggcctcctccagggcagggctctggccagaagagaggagcgcgttccccctcccgcctccgcatgtctgaccaccggccgaggcaggttcagaagcgtcactgtcctcgacccgattggacacgacttactgaagctcagatggtgcctgggcagggaaggccagcgtgcccaccccagcggccccccggagagcaccagagagggctggacgaggcgagagggggcctggaggaggcgagagcagcgtcctttgcttcccaggcctgccgggctcggggcctggcctggctgccatctctccagcctttcccttttcaaactcctcaggcatccggagactctggcagcgggctcggggacgcccgggagcttctcagggaggagacggtgagtagccggacggggcccagcccacgctgcagggtcccgggagagcccctcccagcagtggggtgacacatgtgcacacgcaggtgtggctccaagagctccctctatgccacgaagacatattcctggctggggacagggatgctgggctgggcagacgctcggagcctgggcacaggccccgctccggccctgcctggccgccgcgtgtctctggtgagaggatattcctttaaaacgaggtcctgccctgcacactccttggtcttcgaggcaaccttggccttcccttcgccccatccctccgttagctcgtgcgtggccatcagggaatgaacgcgtgtgtgagcctgacgaccaggaggagaaggcggcgcagggagcgcgcggaaggctttccccagctcgggccacctgagaaaacacaggaggggcggggagtggggaggc

SEQ ID NO: 102581 - DNA, 1932 bp, Homo sapiens
ggcagcagcacggaagattccagaagtgaagaagtcgaggagcagaccacggtggcttcgttaggaggtaagctcttttctggatgtggtgtgtgtgtggtgtggggtgtgtgtggtgtgtaacgtgtgtttgtgtgatggtgaggtatgtgtgtgatgtatggtgtgtgtagtgtgtggtgtatatggtacatgtgtgtgtgatatggcacgtgtttgtgtgaaatatatggcaggtgtttgatgtgtggtgtgtgatgtgcatgtttgtgacatgtgtgatgtttatgtgatgtgtatgtagtgtgtatggtgcatgcatgtgggcatgtgtgtgtgcagtgtgtggtgtgtgtattgtgtgtggtgtggtgtgtgtgttgcgtgtagtgtacgtgtgtggtgtgcagtgcatgttgtgttgtatgtgatgtgtagtgtgcgtattgtgtgtatgtgtgtgatgtgcatgtgtaatgtacatgtgtgtgatgtgtattatgtgttttgtgtgtgtgtgtgtgtgtgtgtgtgtgtggcaggtggggagatgccgaggcccggatggtggctctgggtacaggctctgggtgttcactgtgcttctcttgcaggatttctgttggttttcatttttattttaagtaaaagttaagagggaaaaaggaaaagggacaaagcatgctgggtgataagaaggcattctggggggccagggtctcttgtaacaaattcaggaagcatctcccagacttcagctgtcattggcttagatggccacaccggcctcactgttgattttaaattctgtctccctgttgcctttgcctgggagctggagctcaggggagtgcggcctgaggctggggatctgacagtgtccagccgggctccaggactgaaagcgtttgggctgccggggccgtctggggtgccgagagcagagctggggccacccggggggcgtgaccgtggccacctctgcttctcttcccagctcagacacttcctggctcagattctgtctccacgtgggacgggagtgtccggacccctgggggccgcgtgaaagaggtaaggccacctccctgtgctcctgaaccattctgaaccagagcacctgtggccttttgggccactcactggtgagccctgatgaagcccctctgtgcccgtgcctcctttgtgcccagcactcggtgccagcatgcgtccaccctgcgtgtccactgtgggaagcagcccagcctgggactctggagggcgcagcgggacacgtgggcagggtgtgtggggccccaccccagcccgagccctgtgttctgtttattcccagggcggcctgaaggggcagaaaggggagccaggtgttccgggcccacctggccgggcaggccccccaggatccccatgcctacctggtcccccgggtctcccgtgcccagtgagtcccctgggtcctgcaggcccagcgttgcaaactgtccccggaccacaaggacccccagggcctccggggagggacggcacccctggaagggacggcgagccggtgagtcctcacgtccccccgagtccggcccggtctggagggtgggggcttgggtaggagggggagaggctgcggccgacatgggagtgagctgagctgggatcggggcaggtcagcagcctccttaggcccaccgttgctcggggttggtgctggaaggtggtcagacgtgggaggcggagctgctcagacacagcccttgtgggtgtgaggaggctcctggcgcgggtgcgaggacatcgggggaaggcgtctgccgcctcgtggggacttggagcgtggggtgcatttccatgtagacactgtaggtggcgccggaggagtcatttcccatcactaatggcttctcttgcacacccagggcgaccccggtgaagacg

SEQ ID NO: 102582 - DNA, 1050 bp, Homo sapiens
cttgcggggcaggggccaggagtaggccaggcggggggccgagctcagggcaacgtgtctctccggctcttttcctcagaccttcattgacatggagggatctggcttcgggggcgatctggaggccctgcgggtgagtggcccttaaactgcagcgctgcccgatgtctgtgcccatgaggaacaggccatggacccccaagattcagctggggtcctgtggggggtggggatgaggcccgttctgggggtggtggtcatccctggtgggtgccacatgggctgtgactatctgtgttcgcccacgtccagggtcctcgaggcttccctggacctcccggaccccccggtgtcccaggcctgcccggcgagccaggccgctttggggtgaacagctccgacgtcccaggacccgccggccttcctggtgtgcctgggcgcgagggtccccccgggtttcctggcctcccggtaagtcctgcctccaccgtcagtgtcgggagccctgtctgctgggagtgaggggtgaacaccccacatgggagcccctgccccgcctcaggcctccccagtccccgcctcctcacctcatctcctctaggagctggcgggcagttgctgactcggggccaccctggggtgtgcggaagcacctgagtggccaccccatggttctaggggtgctgaccagtgggggtgaccgcaagcaaggcctccgacctctctggccctgtgggtccacggactgcacagagagcgtctccatgagcaattcccatgggtgggtgtgggagggccgaggtcagcattgctggagggccaggggagggaggagcctgcttggccaacgcggctcgtagggtctcaggtccccacggcaggctccccaccagctctgccacacatgacgggcagcaggtcatgactggcagcaggtgcctgccccaccagctgtgccacacatgatgggcagcaggtcatgactggcagcaggtgcagacgtggctgctgtaattgggtcatgctgcactggcatcccgtggcctgggg

SEQ ID NO: 102583 - DNA, 1357 bp, Homo sapiens
cccaggaccaggactccccgctggatttgtgagtaccgcctacacctgaccccctggagagccgggggctgccgttgccccagccctactacccctggcatctcactcacagagcagcacgtcctgggcggtggccttgctggcactgcctcatcctgggattccatattccgcatggtggggctcgagtctctcgcccgtcgcccgtgccccacggtgctgatggggatcttggcccagccatgccccagcacccgtgccctgaccaagagcgaatgagctgacccgagacgggctgccccgggggggctccacccaggccctgccaccaggtagacagtccccatctgagaacggcggctccccaggccaccgtggccccaaagcatgtcccaccctcctctcgggcagtgccaccccagggaggggtccttccctaagaagggacacaggcccctacgtgtctcgtgtgtctcttccaggatgacatggaaggctccggggggcccttctggtcaacagcccgaagcgctgatgggccacaggtagtgttgtgagctgggcgtggccggctctgaggggtaagggggtgttgcctggggcaggagagtgtccctgagagccaccggccttgcatgggatcggaagccgccctgcagagccgtgaggaccacgtgtggcgggcgctgtgccccgcgggccacccttgttcttcggagatgccccttcattgaactaaagtcacggggtgagggcctggtctgcaaagtgggagacactgtgagtggtcaagacaaaggaacacggggccgcatgccccctgaaaggcctttctggggaaattcaagtcatcacattctttttgtggccccaatttttggtagtaacaaatgtttggcctgagtagaatctgaaattcctatgaaatctccactttcttctactgttaacatgtatactgctcagggttagagccagcaaggagtgaccaaaatcccaaaacaactgtgctcagacagctcagacgtgccaggggcagacccaggggccacaagctccttcctcccctgcccccactgtcccctccacaccaccagcgctctcgtggcgccagcatggaggagcccccggggccacagccctgcccaagagacacgtggggtggctgaagccacagcgtccagcttcatgctcagagactcagcctgttgagagcacgggtggctgggacacatttcttacttggagcaaaacgaatgagaaatttcaattaggcagaaactaattgattccatagtaagttagaatggctttaccattttaacttagtacatttccttttacacacgtattttga

SEQ ID NO: 102584 - DNA, 1033 bp, Homo sapiens
acccccaggtttgactgcgtcaggaacatggccttcctccctcccggctgtctggctgtgcaggccccgtcggcccctgccaccggcctcccgcctctccctccttttccccgacttccccctcccccacactgcctcccccacttgcccctcccccacacctcctccccgacttccccctcccccacttccacctgccccacacctcctccccgacttccccctcccccacttccccctgccccacacctcctcccccacaccctcccccacttccccgtcccccacacctcctcccccacaccctcccccacttccccgtcccccacacctcctcccccactccccccgactcccccctccccccgactcccccctccccctgactcccccctcccccactcctccatccctccacagcccctgctcaggcccacaggggtgagagagagaagtccaggccatcgccacgtccacgggtgccccggactcctcgtgggggtccctgcattcctgggcgtgtggccaatgccctgcgtcctccatgtgaccctttcagggagaagttggagcagatggagtccccgggttccccggcctccctggcagagagggcattgctgggccccaggtgagttgccttggtgggcccagggtgcagggggggcgtggagccctgaagggactatgctaagatgaaagctggcacgagatgtgccctcccgggtccctgggtctccatgtgccctcgtgggtccctgggcctccgtgtgccctcccgggtctctgggcctccgtgtgcccactcccgggtctctgggcctccgtgtgccctcctgggtctccgtgtgccctctcaggtccctgggcctccgtgtgccctcccgggtccctgggccttcgtgtgccctcccaggtctctgggcctccgtgtgcccactcccggagcgccaggagttaagtataagtctccgtcagggctcttggtggctgcctccctcccaggccccagccggtcgggaaataaagaacc

SEQ ID NO: 102585 - DNA, 2726 bp, Homo sapiens
atttccttcctgtctctccaggggccaaagggagacagaggcagccggggagaaaaggtgagtgtccctggggcgggtggatggggatggggggcgctgggacatcccagaaggtttggcctcagctgccccaggtccgtgcccctgctgcccatgtgacctcagagactcagggcaaagaccctcaagttgacaggggtggctttcaggctgggggcagcgtgtgtggctcaaccgtccctgttggagcctgccctgcctggcagggggctccaaggccacagtccacagccccgggcgcctcctcacccaccgtgggctctgggcaccccctccagggctgggtggactctggggtcctggccagagcggttgagatgaaatgccggacgcgtggcctcctcttccagggagatccagggaaggacggagtcgggcagccgggcctccctggcccccccggacccccgggacctgtggtctacgtgtcggagcaggacgtaaggacgctgcgtgggtgggcacccaatctgtccagaccccccacggggtgcagagatccctccccgagccccccccacacccccacatcccccaggtcaggacaggccctgactgccagtctacactccacctcctcggtgggggctgcagacgccctcggtcagagacgcctggggagcccagctccatgtggtgttggagacaccgaggagaggggagggcctgcacaggggccagtgtttttacgtcaaaggctcccattgggctcactccctgtgtccttgacactgtggccccaaagctgcatgtagtcacccagctgccccgtcagaagaagcagatgcacccttggcccctctggtgaaggttgtgttggttccggaaccttcctcccccactgcggcccgtccatcaggcctctcagctgcaccctctgcgcctgccagcagtgcatcccactggtccctgtgccaccctggcctcacagaggcagacgcatctccgcccagccacatggaacacagggaccaagccccactctgggcagggagctgagccctgggcagatgcagggcccagggcagcagagctgggtgtggccaggggttcagatccctgcagagttctctgtggccaccagtggaaggggggctgcccggggcagagctgagagcaggcaccgtcagctgtgtgacactggacaagttacctaacccttgtgctccagctccccacctaggaggtgggactctaacagtcttgagaggaggggtggagttgggaacaggcaggagagggcttgccccagcacggctttgctaggagcaggcagacaggcatcgggaggcaggggcagcccgagaggccacagggacctcggcgtgacggtcaagacatcagaacatcagaaaagcctcccgtaggccgagccacctccgccggcaagcaagggagcgtctagcagaggcaggagcattttaaaacaaaatggaagtaaaaaccatggcccttagggcgtctggagtctgcatccagctgctctgagctgaggggcgtctgtgctgcaggagggatgccccaggcccaggaagactggaaagcaacattttccttgaatttcctggtttggtgttttgttgatctgtaagtcgctcgagtccagttgaattttaaacgcggctctttgtttccgatttttccttttgctcgtggacagggatccgtcctgagcgtgccgggacctgaggtatgtgcctgcccagcttctaagagacgggcctgcggggacctgggtacaaggctgggtggggtccgggcaggcgcgagggtgcgtgatgaccccagctgacgccgtccctctttccccagggccggccgggtttcgcaggctttcccgtgagtaacctggtgccagagctgcatgctgcccggctggggaggggtctccacctggtagcacagagcagcccggtcgagctggggtgggccttgtcaggcccgagggatagcgacagtcactgcccccaaggaaatgatgggagtgggatgtgggcgagagccgctggcaggccctgtgctgggtgggcacccgtgagggtgaggcagctccttgcacctgcagaggcctgcagtgtccagagtgaggctggggccgggaggtgtcctggtgggggtcacctgcggaggcctgcagtgtccagagtgaggctggggccgcgaggggccctggtcgggctgtcgaggcaggcatattgcggggggcagctgtcgggggagatggagcagccgtcggggatgggggagatgccagccgctcgggcctcacggcctggcctccattccagggacctgcaggacccaagggcaacctgggctctaagggcgaacgaggctccccgggacccaaggtaaggggctcaggtgctgtccctcaaccccctttgtgacccaggggtggctccagcctgcccagatgaccactgttgggagggacctgggaccccccggctgctgctgtgacacgtgaggggtacatccctgctcgggccgtccctgtggtcacctcccgtgaaaggacccagcctgcgaggcccagtcacagcggccctgccttcggggctctgggtgaggctttgtggggaaggagctggccctgactctgctggacctcctgccattccagggtgagaagggtgaaccgggcagcatcttcagccccgacg

SEQ ID NO: 102586 - DNA, 1172 bp, Homo sapiens
tgccctccaccctccaccctccacccctgcttcagggtcccggggcatgcatgcacgcaccaacctggacgcaaaccccaaacccgaccctcccctcaccagtggctcctgtcctccccagggctgcctgcgccttggggacggcccagtgcacccaaagggaccacagcggcccttagggaggctatcaggtggggcacaagccgccacctaaccgtgccttcgccacaggggccctcagagaggctgccaggtggggcacaagctgccacctaaccctgtcttcttgtttttttgctcagggagagccgggcttccgaggacccccggtaagtcggtccctggctttctctgcactgagctcgggcatgacggcccccaaggacacggtcgcccgcggctgctgagcttgtgctgtgcggcccagggctcatctccctagtgcagttttaaagcgtgtggggcaggtgtcggcgtgaggctgcagtgggctcctccgagctgatgggtggcccagggtgctgtgctctgcatggcccctccccttccccaggaccccccaactcgtggtcaagggccagggtctgccccactaagcctggcccccttcctcttgcagggtccatacggacggccggggtacaagggagagattggctttcctggacggccggtgaggacctggggtctccagtgggggcggcagatggggtctggcaggtggggagcagcccaggcccacgggggtgacatgcccagaggggagtggacggccgccgcacccactgtcctcccccaagaaccggccctgcctgagcgcagctcttgtcctggatgtggctggcagtaccccacgaggggccagtacccaggaggaagccctggaggcagacagggcagtgggcctgtgtgtgctaggctcagtcacctcctcccaaaagggtccttgtgcaggaaaggggtgagaagggccggggtagcctgagagctgggaacgtgtgaggctgagcgtgggccggccgggcctggcgtggggctaacggcaggcaccctgcgggaaggtgtctggtaatcatcagtgcccagcagtccccaccccctgtgctccgccccagggtcgccccgggatgaacggattgaaaggagagaaaggggagccgggagatgccagc

SEQ ID NO: 102587 - DNA, 1041 bp, Homo sapiens
ccctgggccccctgggccccctggaaccatgggcgcctcctcaggggtaagtgtctgggcagccggctgggcacctgcgtcccgtgccctggctggttctgcagcccctgcccctcagagacactctcccacggaccccacagggagatatacaggaggccaagatgcggtttccagggtggaagcggggccaggccatgggggaatcaggtggacccaggaggacgaccaccagccgggaagtgcccagggcctgtacattgtccacggaggcgcaggagctggcggcaggcaggggtccccatggtgctcatgggggcagccgcctcagtccacacctgtccaaagccctgcggcccctgcccagcaccctgaaacgggcattccttccttccgcccctgccccccgccctccccgccaagccccacacctctgcatttggtcccagcaggtgaggctctgggctacacgccaggccatgctgggccaggtgcacgaggttcccgagggctggctcatcttcgtggccgagcaggaggagctctacgtccgcgtgcagaacgggttccggaaggtccaggtgagcgctctgtgtgacgggttctggacccgtggaagggccgaagccgcctcctggggcttaaggaaggcgagaggctcaggccccggacagggatgggagcaggtggcagccagcgcttcttaaactttcaaacttttggtaaagtttagtaaaatacttttgtgagcagttttgggtttaaagaaaagtgagctcaagcttctgaaagtggatgaacacatggcgtgtgaggggctcctggtgggtcatgtcacagtgaacgtttacaaagataaatgtcacctcacacacccgataataagacaaggcgcctgacgggacgaggcggcaggggggctcaggccctccagggccacgtgacgtccacagcacggccccggctggggggcaggctgtcccgtggctctgcaccccgcgttataaacaccaaggtgggatgaaatgcatcctctctgct

SEQ ID NO: 102588 - DNA, 1960 bp, Homo sapiens
gcttcggccatgggtgggggtctggcggctcagggccactcagggcggcttggctggccctgggacttgccctctggtggccaagcagtggtcatgaaagtccagccgctgtcacatccttgaggaaccggcgtacctccgcctacagcggcagctgggggcacccacgtggcccggggctgctctgacctggcagcgtatgggggctgctgcctgggcccctcagtgtgtcacttgcgcgcctcccgctcagcgcccctcggccgtgcctgtccacacaggtgcggggccggggtggtgcgcccggggcctgggtgcagggggcagcgtgggacacagcccgtgacgcgcccctctccccgcagctccacctggttgcgctcaacagccccctgtcaggcggcatgcggggcatccgcggggccgacttccagtgcttccagcaggcgcgggccgtggggctggcgggcaccttccgcgccttcctgtcctcgcgcctgcaggacctgtacagcatcgtgcgccgtgccgaccgcgcagccgtgcccatcgtcaacctcaaggtgggtcagtccagtcctgagggcgcgggctcctcggcccccacttgacctctggggtgaactcccagcggggagctcccctctagggcctctggaggccaccatgttacagacactggcgcctaggctggcgacttcagggcaggctccgggtgggtcacacccctccaggctcaggccaggcctctgcatccctgggcactgccacgtcccccagggcatcccatgaggcccccccgtggccccctgaccccccgctcccccggcagtgcccctcagagggtcccatgctgctggaccaagtgtccacacaggtgatagggctcacatacaagcctggaatcaggaaccgtcctttgggcctctagtgccatgcgggctggtggcccctctgccacagcacccatgtggctttattctgtggccccttttcgtgcactgggctgtggcttctgggtgccccggggagcacccacattccccagaaccaacagcagaggggtcagagacccagggctgggagcaggcggctgtggcctggcgttaggggacagggtcccctgccttagccaaggcctcttggggtctgcagaggctgcctggccaggcctggctcccccacgcttgttccctggcaggacatgcccaggggctgcagaaccccaccccccaaaaaaacacacacccacaacaccccacatacacccccaaacaccccccacaccccacacacacaacacaccccccccccacacatccacaccccacatccacacacccccccacaaacacccacacccatccacacccccacacaccacacacacatacacacggtttctcttccaggacgagctgctgtttcccagctgggaggctctgttctcaggctctgagggtccgctgaagcccggggcacgcatcttctcctttgacggcaaggacgtcctgaggcaccccacctggtaggttcccagtgccgtgtgagcagctctgagagccccagccagggaaggcgggcgggcgggctcctatctgcagtttccccccgagtttttggacaaatcttatacatgctcattactttaaaattacaaaatccaaaagagcattgagaaaaatgagaactgctctgagaagtcatcattagcaatgcgtttgagagccaggtagttgtaagaaggccccgaaggtgcccccggccctctgctcatggcggatagactccatgtctcccggatgtcaccaagcctgtggtcagccatgtaagcagcgcagcgagtttattcaccgagaataaactcctcaaagggcaacacggagtccgagcatgtgtgcccttaaaatgttgacagaaatttccagggtatctagaagaacgcttcgtcccaaatgtc

SEQ ID NO: 102589 - DNA, 1050 bp, Homo sapiens
tctcggggtgccacacagcgtgtccccagcagtgcctggccatctgctgtaacggagatgcacctgccaagggtctctgacaggagtgctgtgggcagggctgggccccagggaaggcctgaaagccaggagcccgggaggcggagctggttcctagcgaggcagccacaggaagcctctgctcagcaggcatgagggccaggttcacccagccaggccaagccctggcccctctcccctctgccgtgggtgtgtctggcagaagcagcatggggggcagtctgggagatgcagccccctccacaggcagccagcagggaggccatgtggccctccaggttgtgggagcctctgcagccccctggtaaccccagggctggcctcctgcctccacctttcctgcccggggagcggcctctgccctaagcagagcaggtctgggtttgactgacggcccggcgcgtcttacaggccccagaagagcgtgtggcatggctcggaccccaacgggcgcaggctgaccgagagctactgtgagacgtggcggacggaggctccctcggccacgggccaggcctcctcgctgctggggggcaggctcctggggcagagtgccgcgagctgccatcacgcctacatcgtgctctgcattgagaacagcttcatgactgcctccaagtagccaccgcctggatgcggatggccggagaggaccggcggctcggaggaagcccccaccgtgggcagggagcggccggccagcccctggccccaggacctggctgccatactttcctgtatagttcacgtttcatgtaatcctcaagaaataaaaggaagccaaagagtgtatttttttaaaagtttaaaacagaagcctgatgctgacattcacctgccccaactctcccctgacctgtgagcccagctgggtcaggcagggtgcagtatcatgccctgtgcaacctcttggcctgatcagaccacggctcgatttctccaggatttcctgctttgggaagccgtgctcgccccagcaggtgctgactt

SEQ ID NO: 102590 - DNA, 1041 bp, Homo sapiens
agcggggccaccacccgcggcagcccccggcccagggcctgaggagtgccgcggaggagaaggcagcacaggcactgagcgtgcaggacaagggcctcggaggcctgcagccagcccagagcccgccgctttccccagaagacagcctgggggctgtggggccagcctccctggagcagagacagagcgacccatacctggcccaggccccggccccgcaggcagctgaattcctgagcccagtgacaaccccttccccctgcactctgtgctccgcccaagcctcaggccctgaggctgcagatgagacttgtccccagctggctgtccatcctcctggtgtcagcaagctgggtttgcagtgtcttccaagcgacggtgttcagaatgtgaaccagtgactctcgggcgcccctgtggtaactttgcaggcggccctcagtgcatccccacgacccctgcctcgagggccgcctgccttagcaatgggggcctccgcttatcctgctagcaggccccctaggattccccctgccctgtgccgcactctggcggtggccacagcgtgctggcgacactcagggcagctgcctggccatgctgtccctgcactgtgccccgcgggctttgttgctggaagaggtgggtggtgggcttctgcgtccaccaggcctcactggctcatgccccttggggggcttgagacaaatcctttctgccccccagggctagtgaagtggcctcttggataccagctcaggggacactggccccacaggagttgtgagccctctagggcagggtgggagccgggaccctcaggtgtagctgagctgtgacattgctggtcatccttggtgctcttgcttttttgaaagatgctttttttttttttaactgacgtagaatgaagaactgcatgtggcttctctgtctctgtggaaaagccatctcaggttggcggcagacacattgtcatcagaggggagcagcggctctggtcctcggagctggttcctctctcccaccctaagggcagcc

SEQ ID NO: 102591 - DNA, 1049 bp, Homo sapiens
gcgtgttggggagaggggtcccaccaggcagtgttggggcaggaagccgtcagcagccatcacctcgggcgggctgtgtctgccgcagcggcagcattgctaacacctggtggggcgcacgcccgcctgtccgcaggtcacgaacgagatcacgccggtgctgtcgtactcctacctggccgtgctggtgcccgtgttcctgctcaccgactacctgcgctacacgccggtgctgctgctgcaggggctcagcttcgtgtcggtgtggctgctgctgctgctgggccactcggtggcgcacatgcagctcatggagctcttctacagcgtcaccatggccgcgcgcatcgcctattcctcctacatcttctctctcgtgcggcccgcgcgctaccagcgtgtggccggctactcgcgcgctgcggtgctgctgggcgtgttcaccagctccgtgctgggccagctgctggtcactgtgggccgagtctccttctccacgctcaactacatctcgctggccttcctcaccttcagcgtggtcctcgccctcttcctgaagcgccccaagcgcagcctcttcttcaaccgcgacgaccgggggcggtgcgaaacctcggcttcggagctggagcgcatgaatcctggcccaggcgggaagctgggacacgccctgcgggtggcctgtggggactcagtgctggcgcggatgctgcgggagctgggggacagcctgcggcggccgcagctgcgcctgtggtccctctggtgggtcttcaactcggccggctactacctggtggtctactacgtgcacatcctgtggaacgaggtggaccccaccaccaacagtgcgcgggtctacaacggcgcggcagatgctgcctccacgctgctgggtacgcatgccctggtccccgaggcttcttcccgcagaggcttcccgtccacctccgcctgccccgtggatccttcccccggaggctccctctcccgccccctgccccatggataccttcccccagaggctctccgccacctccccctgcccc

SEQ ID NO: 102592 - DNA, 1113 bp, Homo sapiens
ggtaccggtggggaacggggccacggggccgcgtgtcgggggctgcggggtgtctcggggccctggggtgagtgcggggcgcgggccgaggtttgcagggccctgtgaggtgagtgtgggggctggcgctggggtccgcggggccctggggagggtgcggggcgtgggccggggtctgcggtctgcagcctggggtccgcggggccctggggagggtgcggggcgtgggccggggtctgcggtctgcagcctggggtctggggggccctggggagggtgcggggcgtggccggggtctgcggtctgcagcctggggtctggggggccctggggagggtgcggggcgtgggccggggtctccgcgggggtcgcggtggcccgggcgcctggcagaaccgttgctgtgcagcgggtttcccgccgctcgctttccgccgcagcctgcgaatggggtggggagtcccggcccccagcctgccctccgcgtcatcctggggcgccaagtcccacccccgggtctggaggaaagcgtggatccggcgttcgcgcccaggcacgtgttgcttcgggacgggccagccggtgggtgaaccctgccagccacgcgtggggcgggcccctggcacatctccagaccattgtctcctgtgccagaagctttgtaggtgcaacttccccttggagcagctgtgggtgcggatccagcggagcaatcccgaggcgtctcagagagagcctggacagccgctggagcctttcccgagtgggtccttccaacaccgctacagcaggaaagccatccccctagggtcctgtccatcggaaactcctgtcctggggagtctggcctgcctggcctcaggacacaggccaactaagctggccccgaaatccagaatgcatccagagggaaggtgggataaagtccttggaggcgcctgttggccgccctgtaaagaggtggcctccccctacggagacccgaggatccccgcacagcccagattcaatcagcagagccgaggtgcctctggcccagtgcacctgcctgccctgtccaggcctgggagccaggctgcatctcactggccgcctttgcctgggtgccacctg

SEQ ID NO: 102593 - DNA, 1292 bp, Homo sapiens
aggttggaataaccggagtacagagtgtgtagtggtgtggaggctggaggtatggaagcatagtgaaggagttgggaccctgctggaagtgttaggggcattgtgaaatggttggaactttgttggagatggaggggggtgaaagtggaggaggagttgcatggtaggtagaataatggctcataaagctgtccacatcctaatctcaggactatgttatgttacatggcaggggagttaaggcagcagatggaatgaggttgctaatcagctgattttaaaatagggagattatcctggattatctgggtgggctctgagtaatcacaagggttcttaaaagtagaagagagaggcagaatagtcagtgtcagagtgatgtgaggtgagaaagactctagctgccattgctggctttgaagatggaagggtgcactagtcaaggaatgtgggaagcctttggaaaaggcaagaaaagggattctgtcccctagagacttgggaaaggaatgcagtccttggtttctagcccagtgagacccttgtctgacttgtgacctccaaaactgtaagataaatgtttgttgtattaaaacactaagtgtctggaagtttgttccaacagcagtaagaaaccgataaaaactgggtctcttcatttggcagtcttagctgacaaaattaaggagggaataacatgattagattggttttagaagataaaatgatggagctgccacttgggtataattcagcccagataagcatagttctattctctatttcacctcctaggtaagactggcatctgatattgtcttatttggcccaaatcccacttccagtctctctcagcagcttccacagcctataccactcccaattgccgtgtcccactgggtcatctttcctctgtgttggacacttgagaaagagtagaccaggtatgcacttaccactgagattgtggtgtcacaggctaggcccaattccaacctcatagctgttgtcagattactttccagaggtttgtttctttacatcctcactaatccttcgtagcttcagatgttttaattattgccaattgagtagatattaaatatcttactgttttaattagcatttccttggctagtgagtttgaggattttctacccatactttggccacttgagcttcttctaaaaattgtattcttatattgtttgtccacttattgtctggattatcctttttatagctttttagaagttctttacatattctggattctatttgtatcctgttct

SEQ ID NO: 102594 - DNA, 1045 bp, Homo sapiens
gtccctcccataacacatgggaattcaagatgagatttggttggggacacagccaaaccatatcagtcataatatatcctcctctttaaaaaatatttaaatatttgctttttatagtctacttagaacttatttttgtgtggggtatgagatagagatccaattttaaattttttccaaattcataaccaattgtaccagtattgtttattgaatacagtcctttccccagtgatctgcagtggtacctctgaaacacatcagatttcacaaatgcatggatcagtttctggttgcttcatgtacctaatgataatttaatttctttctccctagttcttaaatcttttattgatctttttttgtcttttttcctttgcttggaccactagagaaagttgtatggagattgtggtaagattatccttatattgtttttcatttaaaagaaatgctgtgaaagactgaattatgaactttgttattttttttttggtagattcctttattaggttaaggatgatcactttactagtagtttaataaaagctttttaaaaaaatcatgaatagattttgaattttctcaaatggttttctatacagtgtacttatttagataattttaagctttttttaaaaatcgtgattgagatgagatattttattcttttaatttaagccatcattgatttcctgggagaaactgtgatgtactacattaaaaaatattaccaggccaggtgtggtggctcacacttgtaatcccaacactgagaggctgaggctggaggatcatttgagcgcaggagttcaaaaccagactgggaaatatagtgagaccccatttttacaaaaaaaaaaaccaaagaaaaaaaattagccgggcatggtggcatgcatctgtagtcctagctacttgggggactgaggttgaaggatcacttaaggctgggaggttgaagctgcaatgaactgtgatcatgcctctgcactccagcctaaattattggacccaatatgcaaatatttgggattttggcata

SEQ ID NO: 102595 - DNA, 1030 bp, Homo sapiens
ctggcaaacactttgaatgcagctttgtgagaccctaagcagaggacccagttaagcctgcttaaattcgtgactcacagaaactgtgagatattaaatacatattggtttaaggtgttaaatttgtgatagcttgttatgtggcaatagaaaactgatgtactgatctctactgacctccccttagaagtggatttgggttgatgaagggtgttcgactctatttaaggtaaccagcttattatttattttcttttatacaacgttttttctatttataaaagtaatacaaatgttttgtgtagaaaaattggaagaaacagaaaattataaagtagaagatcaacattatccttaatcttagcacaaaaggatattcagtgttttttcctacttgtatttatgtatgatatgcatatcctaaagttgggattcattccaaagtatgttttttgaaccaatatttttccttttactagatcatgagcatttccttgtctcataatgtgttcttctaaaatatgatttcaaatggctgcatactattccaaagagtgtcccagtttattgaaccatttccctatagctagacatttatgttgctttaaaatactcatcatgataaataatgctttgaaaaatatcctatacaaaaatcattgtgcgtatcactgattgcttctaaatttctaaaggtagaactattagctcaaaggttgtaaatgtttttaagtccttttctacctaaccatctattttccaacatttctaaaaaataatgtaagacttagacatctgtttctgtaactcaccaggttgggataggacagaactattgatttttgagcatctaggttcctgttttcttaaccctgtttgcagagtggttttaaattattcattaaagtgcaatatggattctatttatagacgcatttgtgtatgagatcgctcctttaatgtttggggaaaagcctacaaattgctattatcacattcctatctttgtaaatccttttctactcctatt

SEQ ID NO: 102596 - DNA, 1057 bp, Homo sapiens
ggcttgtaattttcctttcttatagctgttctcttttctaatctgagatgaatgcttaatttattaatttgcagcttttcctttttttctaatatgtgtgtttaaagtgatatattttcttgtaaacaatgcctcaactacatcatacaaagtttgatctaaggcattttcattattgtttgttatgctttctaatttccattatggttttttcttggattcctaggtaatttagaagaacgtttaaacatttctaaacatatgcatattttcttgttttattattcttcagcaaaattatattgcccaaagatcctgctttctatgattttaatcctttgaaatatgctgatttgccttgtagcccagaatatggtatgtaagttttctcagatattcctatgtgcctggaaataattgggttcaatgtactatactaaatattctgtttagctgagttggtaagcatgttacatctgctttcttactagttttttttggttgttatattcattactgagataattacacaatttcatgatgattatggatttgtcttattttttctagcagttctgccagtttttatgtataaatttttgagactgtgttgtcagggccacacagatttaaaactattaggtcttcctgatgaatggagactttaattattatgactggttctctttatatctagtaattaatatttgactttatgatatggtatgtctgatgttaatattaacatagccatgctagatgttttaggctcatatttacatactatctttgttttttatcttattctcaaccttactatagttttatgctttaggtatgtctcttgcaaagagtatagttagatatttttttcattcaatctgacagtctttgtcttttaattggaacagttcatttacattaaatgtaattactgatctatttgggtttaaatttacgattctattatgtatttgtcttgtcctacattttctgtgtttatttttctctcttttcttgcattattttaatctgataatgtgattttttgaaaaaa

SEQ ID NO: 102597 - DNA, 1345 bp, Homo sapiens
tttcccatgctattcttgtgacagtgaataagtctcttaagatctgatggttttatacagggagtttccctgcacaagctctcttctcttgtctgttgccatgtgagacatgcctttcaccttctgccatgattgtgagggcctccccagccatgtggaactgtgagtccttcaattaaacctcttccttttgtaaattgtccattctcaggcatgtttttattagcagtgtgagaacagactaatacactgggtaagggctagagttccagatatgacaagctatatgtgactctggactctcttactgcctctttctctaaattggatggcactgaggtttgctgttagtaacaaacaggaagcgggtgttggttgaaagctctactggagtgcagtggagggagggcagattgaactctggcttatcttctaatctccatcgtctcctgctattcaagaatcaatcgcaggagtcagtgccctccacaaaaggtctccaggatgaaggaataatgaaaatgcagaaagtgatgtggaattgttagcttctaggtcacttgggagagccctaggccatgcctcgctggggacttagaggtgtggattaggttgtctatgcccattttatttcttttattaccctctaacatctttcattaccttggggtatgaagactttcctccatttgtgagccatgtttgagttgctacataaagctcagggatgtggcaggtgacgttaatgagcaagctggtctttaaatagcacagctccaataaacagaatcacctgttttatagcttgctattggagaaaagtgttcacagaggattctgaatagctgggagaacattagaaaggcagtaaaatgttccctgcccctgccgtgaagcaagactggctaagaacacaccccacagcaaagacacttcctttggtgtggaccagaatcattcatcatgatgcattaaactcaggttgcatcaaaatgaagaagggccaagccaaaatctccttgattatgggaaacttagtcatttgttctctgagtcagcttaatggtgcataatgttcacatcatattcttttggggctgggccaagaggccagcatgtttgccagcagtgcagcaatgagctaatcagccttttggctcccacattcctggccaagagctcttctggaatgagtgctgtcactgcaccagaccagagacctcacgtagactgctctttcttttcctctatgtcacatgctggtccttgctttcatcagatgatccccagatcccttctccccaagagagccctgctaggctgaggctctgagacgtgatgctag

SEQ ID NO: 102598 - DNA, 1047 bp, Homo sapiens
ttaaaccaaattgttctgttatccaacaacatttattagcacttggtggggacactgtgctgttctgagaaggggatcagggatactgcagatgatttttcgctcctaagggtttttttcagtactttaggagggagaaaatgttggtaggacaagctctccactgaaaggctgcctaagaagatgtaaaatggtggaggagatgggaaagctggagccacagcagctctctacagaaggctctgggctgagggacgcagtgcctgagaaggagggagtgaccagccttcatgtaggctggaagcagtctggcaggttacagccctagacaggaattcacatctcactgcctggtatcgggacatggagctctctggctggctcactcacatgcacgggatacctatggcacactgcgcagtggagaaaaaaaaggtctgttagcaccggagaggtggttgttgctgggcgggcaccttgcagaaggaactgtccctgtggagggtgtgggacacaggcccaagatcacagtacagggggtgctgtgtactcatcctcacttggcctcagtcctctccatctgtgggctgcttccagggctccttgtggaaatacaggaacatctcttctattgggaatccagggaacagagaattctgattaatgcgttccctttcagtttccagatcattattagaaaattccttaaaccgtaagactaagtttctgatttattccctagaacacattaaatatgattgtctttctaaaaagacaggatttttcagggcctaagggcatcattgaccacagaatattagtaatccaagtgtcctgagaaatcatctggtttagatctcctgtctcagagcagaagcacccagggagcttttcctgctattgcagagcctcccaccagactcatcaaacattgtcactggcatgcatgggtcctgtccctcagcttcttgactacagaaatgaaatcagaaaacctgacagatgagacttttgactgtggacatttgagctaatggtgaaatgagt

SEQ ID NO: 102599 - DNA, 1066 bp, Homo sapiens
gcaaagccgacgttctgcttcatcactgaataaaactatgggactgaggaagtttaattctactgagatagcctgactcagcataccctacttccctccttcctaggggttccacatgccgaaattgggaaaaagctttagactggttctatgtgaaaggaggatgtttgggatcaccatgtgggtactatgggggagggataggttgcagcttttcttctcaagggctagagtggtgctctggtctcctgaaggtattcctgcagagggtgggccactttatgggaggaggtgtggcaggagggtcagaatctgcatttctgcccaattccaaggtcaaattgctgctgtgagagttcagggatcctgtgaatccccatggtttctgaccccctgaacccttgaggaacactgttgatcaagaagccaaggagggcaacaccactgttttgctgcttaagtttggaaaccatagaaatcttggaagctgacaaaggattctcctaaaattcaggaaacaaagtgaaagggatcacttgtaaaacatagcttcatataagcaaacttcatgagataaagaaataaaaatcaatgtctcatttaaatagaaaaagaaaagctagcaaccgtagcttgcagcaggggtgggagttaatacaatgaggggttaatcccttcaaagattcagaaatacttttagggaattaatgtccaagatctaatggcatattggtgactgtgattcatgtgggttccgtagaggcttttagaccctggctctgtttcaagggcggaagaatcctttgttccccgtaggagcatttgcactgttcacacacatgtccagttgtccagaaagctctgcatatggctgggcgaggcccccactggcaggcccatgtgtgtgcagaggccaagggacccagcatggatgaagaagctggcctgagcttcagtgcctggtagatgtgatttcaaagactggtttccttgcttgctagcggcagaacttttggacaaatgcttagcctttctgggcctccgtttccccatttgtaaaacagaa

SEQ ID NO: 102600 - DNA, 2093 bp, Homo sapiens
taagttcatgtactaactgacattgaaacaaaaatcatttcgtaaatcattacaagttgatagtgagtaaagcccatcagtgtaattttgtaagattgaaacatgggtatatgtatctatattgacacatacctgaagtatgatctatcttagatatgaaagtgaaatgaaaagtacacattgtgggcagatactgagtgtctggaaggagggaaggggctgctgtcccagcaagggagcacagcccgcacaacacgcaggttggatgccaggcccggggtcgagctcagggtctgtgggatctgcattccctggccttgtcagtcatgtcatggccatgccacttttgaggtggaggagtaaagaagttcacctgctgactgcttccttctttttccgctgagaccatcaccgagagtggtaattatttataatagaaatggtgattactggtggattctgtgataggaattaagttgaatcttccttgcccgtcctcctccagcataagctgttttaaattctagctcccccacatcctgcttcttgttggcactgtaaaactctcaattcactcacctggagggggtaagttaatgagacactctctcccccagatctggagaaattcagagtcaaggctgtccccctcctgaagtcagatccttcctgtggcctatttaggttttaggtaaaaacatagcatttgctcattttcctttattgagatctgttgaagtctgagctcctattaacacatttatcgaaaatggaacctatgagcaaattcctaggagctgcatttccaggggtgtccagctgtgacccaccccgccccctcccggtgttaccctgagttatgagaatgcagtctttggaagtggtgggctaaaacactccacagggtggtgcatgggggctgcccacactccctgctgctttctgctctctgcttgttcatcctctcccaacggggcagccccagaagccaacactgcatgttggaaggagtcccagccctgcccctgccaagcgaggtggggacagctgggaatctcgctgccttcatggtggcgggccaggctgctctgtaacacgaacattaaaactgatttgaggtgttagcggtgtcactgtaagtgtgagaatgagaagcggtgtgagacgtgtagatttgtgggcagtgatggggaacagcaagggtggggtgcctcggtgggatctgaaagagaacccgcccccctcagctggagtggcactctgtaacccgccccccctcagctggagtggcactctgttggctgttgttttcaggctgttgggccgtgaggctgctctggtctgagaaagtgggtggcaggaggacaggacggcctctctgtgagggaggcactgactctcaggagatgctgtcattgggatactacagtattccatgaacttcctctataacttaaatgatgaaagttacagataatagctcaaataaactgttgtgagccgttaagtatggcagtttgtatcatggttaaatctgcagaaggtgtaacattttgcttgggtttttttttgccttattactggccgtgttttaaaaatatctttcttatgaagaaattctgtcgtggctgtgtgatttcccctgcgatgctaggatgtgtttgcaaaccagtggcaatgccagagcctgggccctgggctgcggtgcgttggctgggtgtggtctgtggtagcttccacctgctgcctgcgcttgggaagtgccctgacctctgagcagatgacctctgagcagatgacctctgagcagatggtttctgatggtggttttttttctgattaattgaattacaagtatcctgtggtaggtacagggttttccctttcccttgtccaataaatcttaacttcattctgtgatttttagaaaaggaagaatgcccacagatgtggaggcacagatgccctgggcctcgcagcaagcttatccttaacaacccattctccttcaggccctgccacttagggagaagactgtgggggcagtgcctgcctgtcctctctccattaagcctctgctgggggcctgcctc

SEQ ID NO: 102601 - DNA, 1731 bp, Homo sapiens
tagttttgtaaaactaccttgagatgactccttttaaaattatccttaagatgtctttctttttctaaagcttattaaaggtcattttcaaaacgttttcagcaggaacttggtgtatatttgcagttctgcatggaaaactaatggagtcatgatggctgctgatgctgatgaagtagtaccagccagcctgatttcataacttccatagaatcactcccttcttcctcccagtgcccctttgagatagggattgttattccctgaggcttggcgaggtgaagtaactcactcaggttatcttggtgccagtggtggggctgggatttgagccaagtcttccaacttcacaatagcagagtaagaagagctgccttgttgatgggacgtgggtcggagctcccagtgtgtcttgccttcctggtgtgcttgatggcagccctgggctgctgtgaggtcctgagcacagtgcatcctgaggagacagtgctgcgggccccgcctactaacttccagagatgtcagctgcagcagggcagcgccctggttagagagacggcatggggagttggcagggggaggccctcggagagatggcatggggagttggcagggggaggctctcggagagatggcatggaggggttggggcctgtgctcctaggtgcttaggcttgcaggtgactggaatcctgactaatatcataagaggagagttcttactaacaaattacttgaacaaagactttgtttgttccttcattcgttcagcacatgtttacagtgtgcctgtgatgtcccaggcgcactgccagaatcctgacatccttgtggggggatcgaaaacataaatctagtcagtgagttcatcctgtggcatgtcagggggtgacagtggctgtggaggaaacagggaagggcagggtgtgggagtcctggtgctgtgtgaataggccgtcaggtcagccctgagacacggggcatctgcgcgagtcttgctggaggtgcacgtgtgagccccttggtgcaggaggtgaggagctgcagggccaagggggtttggagcagaagctcgggtctgacatgcctggtgcatccatggggcagtgaggaggctgcggggcaggaggtgagagtgccgcgggttaggaggtgagggtgcagctggggcacatcaggggtctcacaggtcatcccgaggctgctctcagtccacgtggcgtcggggctgagaggagcccacagcagggtgggtgtgggagcagggagccagccagtctcttctctgtgctaggttattgttgtggctttagctaaagctgctgtaatacctgtttcttagaggaatccaaatccctgttgccttggggccaactttgtaatcttacaaatctggatctaattttcaccaaactctcaagggaagagcctctgggactcagacagataaacaacacctgttatgtgctgttcccattttctcttcgactttggtgttgtccaaattcttctgagcctaactgtaggctcttcagacccagcctacagttctggaaataaaccagcgtgctggggtggggcgagcccgaccatgcaagccatgccccggcagccaggctgagaggcagagcaagcagtgcaggtggacccatcgcctgccagcatgtgggttctggaggctgcagcaggcagattctggaaattccctgaggccttcgttcagtacagaca

SEQ ID NO: 102602 - DNA, 1917 bp, Homo sapiens
ggaagctaacagctgatacataaagttgtaagatcaagaatagcaatacaaactcagtaattagaaatatggagataaagaaatgccaaaagaggctaagagctcagggaaggattgtgatgtagggggcaagggaggggtagggccactgcttttcataagctttatcgaattatttgcttttaaaaactgtgtatatttatagttttattaaaaataaaaaattttaaaggttatatggcaaatattattttataaaaaattgatgaacctcaggccctgagctcccttgcttgccctgctcctgccagggcagacttccactgcccttgccctctggtcctctccacttcagaggcccggcctctggcttggtgaatctgaggcagatctttctcctcaggttgcttgagctctgcagcgttaggcctggtgagcgcctcttgcccagtgccctgggggcggtggggaaattccagtccagactgtctgcctcaggcattcagtacacactttcgtgccctgctttttaactgaatagtattctgcaaagtgttcgaccttacctagtttgagaacattatttttagaaggttgcatggtttcccatgttgtggatctaggtatcatttattggattattccctttttgtttattttttctgattttccactaatatccataatacgaggtaaacacccttgtgcataaatccacagcagcttcctctcttttgtaggcagtgttcacacctacagaattcctgggtcagaggacatggacatttaaaagaggcataatgtgtaattgccaggttgatctcaaaagtgcaagtttgtacttgaacaaggctgtaccagagtgcctgtgctgttgtatcctgacacaccaggtactgcatacgtctccatctcgaaatgcagaagcacactgaacacacatggcttagctctttaacaataatgtcgttttcccccatgctcataagcattcttgcattattgaagatactctgcttttatgtctgtgggaggaattttccccagttgagtcgtgcactttttcatctgatctgtagcattttgggtagctcgctcagtattttccgttgtgatgtcgtctcttattgtgtttacatttagaaaatccttttcttgggatttaattaggtgtatgttcttaggtgaagatctaagttattttttcttatattagaaacaccatttattcaaaatacttcatttttctaatgattcatgctgcaactttttatgtatgtgtaccacatatgaaaatattgtgtattttagtgtctgtttctgaattctctaattgacctctttgttctagtgctggtacactgttttaattattttagtttcacgatatatttccatatctgataaaggtaaccaatatttcaaaaaatattttggttattcttggctacctactttctaaatgaactttagaatgattttcaagtttaaaaagttaatcatattgaggtttcttttcaaatggatcagatctataatttaaattataaacagctgacattttaacaatatttaaatagtttcctatatagaaagggaatctgtctttccatttattctgttattagccttcagttacatttcatagctttcttgctgtaggttttatctttcaaatttttttccaactaatttgtgttatttggttattgtaattgggatttttcccattgcatttatcaaatatttaacattatataggaaaactatcagtttttatatatttgaatgtggtcacatgttaaaatggttttatttgcaaaagggttttcaggtgaaatttgacttatttttaccttgacccaacattcaccatgaagtatgctccctgtagctctctggtatatattcttcatt

SEQ ID NO: 102603 - DNA, 1038 bp, Homo sapiens
tacttactgggatccccagtgggatgttgattagagatggtgagaagggacatctttgtcttgtttctgctcttgggggaagcatctggtttctcaccttaagtatgatgatagctttttatcaggttaaggaatttgctgaaaatttttatcatgaatgctagttgaattttgtcacatattttatctacatcaattaaaataatgtatggtttttcatttttaatctatataatggcaaattactttgatttttgattgttgagcgaaggtttccaagttaaatcctactaagttatgatgtgttacagtaaagggattttgttaagaatttgtgcatctatattcatgggggatttgggtttgtagtgttctttccttgaagtggctttgtataggtttgctgttaagataaatttgacctcataaaatgatttgggaaggatttcctccttttctgttttcaggagtttgtgtgaagtcatgttttatctttcttaaattgtttattagaatttgccattaaagcaatttgggcctggagtttcttgttgttgttgttggagagtttttaaactgtgaattcagtttctttaattgttataagatttttttctgtgtggatctgagtttttgtttgatatcatccggaacagcttccgctaacattccatgttttttatcttgtcaaatatcacctctgccgcattatttttctcttctttggaaacctcagttacattatgtcagacgttcttactctgtacttctcatcatttcttttcatattcaccttccttctctggtttttactgtaatccacagtagacagacagaacacagcccagagggacaaagagatataaactattcaagagaagatttcagacatggagagacatggacaagttataacatataattcattggttttccagaaagagaaggggggacaatggagtaaaagtaacatttggaataatggttaacagttttctagggtgtgtgaaagccaccaatctacagtttcaaaaactc

SEQ ID NO: 102604 - DNA, 1050 bp, Homo sapiens
acaagcagcagtggcgctgcccctacatggggcatgctttgcagggctgaggttttgcagttcccaccattgagggctgtaacatttctctatttctggcttagaatgtgtgtaggatgataattatttattcagcattcattccgctcacgctgtgctccgaccacacaccaggctctgcgtgcggtgctggcacagtctcaggactccgcttctcagctgtagggctcagggtgcagtggagaaggcgcgaaggggctgcccgcggatggatttgttcccttggcctttcactgttgctcctctcactctcttctcctaaactcggcgtagaggagcatcctcaggagaaacaggaagaggcaaagttcactgcaaagttttttttgggttgaacgcctgtaggataagaatagcagagggcacccccagatgagatgcggccgtggtcgagcatcaggatcgtctgcctgcgcccaccagtgtggtccgggagcagggaggtggcagagccagggccgcgccctccccgcgggtctcccgtgctgctcgctggcggttggtttcatcagtgccctggcgagtgtcgctggttgcacgtgggcactgcccacacagagcgaattctcaggcaggcccccttcctctctctccccggaagctgcttcatggcactccctccctttgcccttggccgtgggaacctctaggttgatcactgggtcattggatctgcttttagttagccttgatttttgtctgcattaaacaattaaatgagcttctaataatacggtgttttgaatgtcatacatggcttttcctgttgaaacatctgcagaaaaaaaatagctttattatttgtgagtgaagctgtctagctcctcccttttgttcttagtgagataattgcttttgtaatacaaagtttctcattcttttttttttcttttttttttttttgtttttgagatgaagttttgctcttgttgcctgggctggagtgcaatggcgcaatcttggctcaccgcaacctccgcctcccgggtt

SEQ ID NO: 102605 - DNA, 1135 bp, Homo sapiens
atctgagtttcgttttgtttgagacagggtcttgctctgttgcccaggctggagtgcaatggcgtgatcatagctcactgcatcctcaacttcctgggcccaagtgatccttccaccccagcctcctgagtagctgggactacaggcgcgtgtcaccacacctggctaatttttttttttttttaaatagagactaggtctccctgtgttgcccatgctggtctcaaactccagaccagccgtagctcaagtgatccttccgccctggccccccacagtgctgggattacaggtgtaagccgctgtgcctggcctcatccgagttttttggaagtgtttccttgctgcctaaattatatggtggggcctccagggaacaaagcgagtccccctgcttgggccctggtggtcactggcattcctgcccacacagcagtgggggacatcccaggctagggctaatggctgtccacagggtagggccttgcttctccgtcactttgctccactagacagtagagtttggttggggtctgtagcatgccaggcacctttgacgcttcacaaatgtgttaccagatttttaaaaaggtatttctgctataactgaggatgtggactgttgcaacaggaaaagttgaaagccttactaaagagatcaggctttgaggtatagctcaggtaatgctacctgcaagtaaagggtaactttttagcagactatagcaaaggcggggagagactggggagacctacgggggaagatgggggcacctacagttgcaaggtgggcaccagttgtcaggagttgacaggagggcatagccaggaacagctggtgtctccttactgggacatgctgtgacctgtagaatcgtgtctgaccatttctggaggatgcagtactgaattcaagtaacaaggtgtcctgtgaaccccccacagtcagatgggtgagggatggggagggtcacgcagggtgtgggcggcgtgcctggcatgggtcctgccaagttcgtcaggtaacgtgatacttctcccttgctttttggtagatggacagtgtgtcaccctcggggagcaggtgggctggcaggacaggcggccccaggccgggagaaggagacactcccag

SEQ ID NO: 102606 - DNA, 1054 bp, Homo sapiens
ttttttgagacagagtcttgctctgtcgtcccgggctggagtgcagtggcgcgatctcggcttactgcaacctcgggctcccaggttcaaacgattctcctgcttcagcctcccggagtagctgggattacaggcacttgccaccacgcccggctacttttttgtatttttagtagagagggttttgccatgttggccaggctggtctccaatgctgtcttcttttaagatttgattttccgttgctggctggtgtggggatgtggagcgccctcaccctgtgaaggcatcccttcccgtcactgtgtcggtccctgtggttttcgctgcccgtgtcccctgtgctgctgctccttgctgctggcctctggctgtgtcaccagctctggagtggccctagactcacgagagagcatgcaggtcccaaaccgagagtggctggaggcaggagtgctgcaggagtgcctgggccagccccctgtccaagtagggagctctgcccagctcccaaaagagcctcctcacaaagccagtcactgagcccgagcagcgcggtcgcccctgacgcggcaccttccttccaggctcctacctggctcagggcgtccagcggcagccagacaggctgggggcccctccatgttgcgcgctccggctgactcaccggggctgggggcccttccacgcggcgcgctccagctgactcaccgggcctgggggcccctccgtgctgcgcgctccggctgactcactggggctgggggcccctccgtgctgcgtgctgcggctgactctctgctgcacatgtgctggcagctgttccaggttgccacatcctgggattatcttttccagtaaactgtggggtcagcaggcccagtactcgccttgctgctgcttttcaccccctgcaccatggggatgcattgggtcaagtcacacaacgtcagaaaactcaaattcgattaaaaactcaggtctgctactgggctcctgggaaagtgcagagtcagttggggccactctggcaggctgcagtgcctctgcttccccc

SEQ ID NO: 102607 - DNA, 1056 bp, Homo sapiens
ggtcaggggactctggcaccccgtgactgtgtgttgaggccacagcagaagcagggggcaaagccccagggcgctgggcctgtgagctgcaagtcccctgggcctcacaggggtagctcctgccagtctccggctgctgagagaggtgcttccgtgaccctgggcagatgcagacctcggccaggggctgcggtggcctgcccagcgtcaggagggaggcagccgtggggcctccctggagacctctcccaaggccctcccctgaactcccgtgcaccctgtgcccagcaggcgaggcctggtcagcacatggtgggtgggcaaccccattctcctgccacccgggaggccggagtgggagcggcccaggacacccctggatgtgcgtggtccgtgagactcttctctagcagcagctgtgccttctctctccaggtgacgccttctgggccccatctgtccttcctcacagcaccctcagcaccttaagccaccaccctcagccacaatttggcagaaggatggagtccaaggtctcagaaggtggcctgaatgtgaccctcaccatccgcctgctgatgcatggaaaggtaagaggagccgccattgtctctgtaggaaaggcggccgcggcagacagaaccagagatgcactgcccgggccattggcactgtaggaaaggcagacatggcacatagaaccggagatgcactgcccgggccattgtctctgtaggaaaggcagacatggcacatagaaccggagatgcactgcccgggccattgtctctgtaggaaaggcggccgcggcacatagaactggagacgcactgcccgggccattgtctctgtaggaaaggcagacatggcacatagaaccggagatgcactgcccgggccattggcactgtaggaaaggcggccgcggcacatagaaccagagatgcactgcccgggccattgtctctgtaggaaaggcagacatggcacatagaaccggagacgcactgcctgggccattgtctctgtaggaaaggcagacatggcacatagaac

SEQ ID NO: 102608 - DNA, 1045 bp, Homo sapiens
aattttcaaaaccgtaataattagtggagacctcttactgggcagatcactcttcgattcttttgctttaagaaacttggagtcggaagcatcaaggctgaactgtttccctcccacccgctgaactggccagctcagctctgcccgcccagaggaagtgggtgcggctcccctggggctcctggtgccctgggagggttggccctttgtcctaggatggggacaggtggagaggcacacgagggggaagcttctaccggagggtccttgtcatgctggagggtggcggcgggtgctgagccgtggtgcagccaggttgcagtctgacggggtctctctctctctctaggcctacacaatccagggacagtatgccatccctcacccggatgtgagtcttcactttgtcttcctctcacctttctcttctcatggttgtttacctacctgcatgctgctgttaattgctactaacattaatattacacaataatattaatcaacttctcagcgttcctgacctgtgtcgtatccatatgacctcgaataaccttttaacctcttagcactaattctgcttgtgttgaggacttggcctgatgtcaaattgtctcaattctgccgcagtcctgggttttcctccctcccacggggcctgggagggaactgagacgggctctgtccccgtgcagggcagtgaggatgtgctcacccgccacaggcaggcgtcagtgatactttctctgcgcctaagaagttgggtgacattatcaaacaggccacaaagataccttggcaagcacatttgagggcctggtgaaattaactccccctttcagagtccacatgaaaacatagggtccatctacacacacagatccaggctgtggaaagccagtggaataggcctttgtcttcattccagaatcagtgggatgccaggcgggcatagcgtccttggctccgcccgggccatgcggagctgggtcccatgcagctccatgaccgggggctccgacacctcttttctgctcctgctgggtct

SEQ ID NO: 102609 - DNA, 1120 bp, Homo sapiens
gagaatagataacaatagttattccattaaaggcaacacatgaatcaaatggtagagaaacgctgatcaagaaaagcctttccccacctgccccagaggccgtttttagtggttcctggcgtcagacctttggtgatgctgctgtagctacatcaaggacatctcatcctggggtcagctgtagacaccagtgcctgaccccactaggaagccgggctgtggccaccacacaccggaaggcactgttggggctgccccagcctgcgcccagcagcagcgttgggcagaagcagaggtgtgtgtgtgtgtgtgtgtgtgcgcgcgcgcgtgcgcgtccccgtgcatgtgtgtggcaggggtgtggggggcaggtgtgatgtgtcctaacagaaagcctgtgtgaaggaagatgaagatggaagccaggggagtcagaggcgactttctggggtggcccagttccattaaggactcaggacaggtggtcacgcacatctagagatgcacgtgtgcagaggcaggttccaaagggggggtcacttgactttgcaaagctctggaacccaaaggaaaggcagtgtgcggtgcccttggtaaagggaaggttagtcgatggggtcagggtttgtgtttaccccagacagtcgccctgaagttggatgctcagacctgcagggaccctctggtgacaccttacggatttcctgtggccacagagcctaacgttctcactgtggcctttggctgagcacccgtctgagccagaatgcttgtggtctgaaatttccagaggccgtggctgtgtgccacggtgggactgcaggaccctgatgtttggtgattggcttttacttcgattggtggctttgctctttctcatgtgactttctcagtatctcttagaaatgggtagttgtgcagattgtttcaaattagtttaatgtataactaactgttaagagaactgcctcagtgcatgtggtaatgatttgagatacctggtgctatggtttaaatatgtctattcctccacaatttctctgttggaacctaatcaccaaggtgacagtattagagggtggggggtcccagggctggggagtgattgggtcatgagcgc

SEQ ID NO: 102610 - DNA, 1049 bp, Homo sapiens
agatgggagaagtccagacgcgtccctccaacgagggcctctgcatggctggggatgccccagaccccgaggcctctggcaacgacctcacgcgtgcggcttgcagggacgcgtgtgggcgtggtgcagtacagccacgagggcacctttgaggccatccagctggacgacgaacgtatcgactccctgtcgagcttcaaggaggctgtcaagaacctcgagtggattgcgggcggcacctggacaccctcagccctcaagtttgcctacgaccgcctcatcaaggagagccggcgccagaagacacgtgtgtttgcggtggtcatcacggacgggcgccacgaccctcgggacgatgacctcaacttgcgggcgctgtgcgaccgcgacgtcacagtgacggccatcggcatcggggacatgttccacgagaagcacgagagtgaaaacctctactccatcgcctgcgacaagccacagcaggtgcgcaacatgacgctgttctccgacctggtcgctgagaagttcatcgatgacatggaggacgtcctctgcccgggtgagcgtgtgggcgcggggcagtcggccgaggagcagcaggccccagccgctgtctagcgtgagccccagggacacccctcacctgagggatgaatgtgcagcccaggatcttgggctgtgggtgggaaggggtcgggccctctcggggctgcagggcagaggccagctgcaccctgagcctgtctaggcagatcagtgaacggccgctgagggttcgctagggactgaccctggcctggcccggcctctctcctctcttccagaccctcagatcgtgtgcccagaccttccctgccaaacaggtaatgcagggcaccctgagccaccaccccagactagcaaagcagccctggtgtccttcctcctcgagggccgggctgggggaggggccgtgcagggacccggggggcggcggagccactgcggaggctgctccttagggagatggccccaggatggcagcacaggggaggaggggcttggggaag

SEQ ID NO: 102611 - DNA, 1020 bp, Homo sapiens
ggggtgaggggcaggcagcagttgtagttactgccgcggggcactgctatgtgcagggacagccagcacccagcccatcaccactccctgggctggctggcaggtatggcaccctgggagcccggcatatacccagggcacccctacggctgccgccagtctcatgcccaggtgggtgctctgggctggagcgagggccaggttttgggccgaggcttccccaggcaatcctgtgagctcccttctagcctctgacccagtctggtctggcttgcatggatgtagggcttggggtgggaagttcaggtcctggctttgcctttgcctgatgtggatgagcagctcacatgctcagggccacctgagactgtcactgctctcccctggctactgggaggagtcactgagagcttcgttacccctgctgccttgcccagggcacaccctatacctccttatctgctcttcccctccctgccgccttctgggcaggtagcagtccctggcctctccccctggctgatcactctccctcaggcagtggagatctgcgtctggacaccctcagatcctgtcattgcctgcccagagtccttcaggggcacccctctgccttggtgtgcagtccagggctctcacccaggtgccgcaccctctggggtcttctgtccagctcccttgccccatgtgctgtcactgactctccttgggactcgcctgcctgctcagagccctgcagggcttggtcagctgcctgttcagtgtcaacacttccctgcacatcttaaaactgggctttattttcgctgaaggaactgtgttgggacccttgacatctgtcaggtttgcacatgctgtttttttttctcagcccacgtgttctcccccacgtggggtagcagcaggacagacagtgaatcacagagtctgccctgagcagaggctgctgtccctgggactcctagccatggtcagactgtacaaaacggttttccagaaatgaaatgtaaatccattttt

SEQ ID NO: 102612 - DNA, 1035 bp, Homo sapiens
gcctgtgtccccagcctgtcattgctgtggctccgcttctcagggagcctaggaagaaggtgtggcaagagcccgaggcgctggctgcacctggcggggcctgtgggcgtcagtttagacccatccattctcactgcagcattccagggtttgcccttatgctcggctgtgtgagggtgaggatgatgctgtgggggcatgcatgctgggtgtgtttcagccttctcttccaccaggcatcctgacatcgaggcccaggagagaggagtccggtgtctacttgagaaacagctccccaatggcgactggccgcaggtatgccgccagggacctgagcgcacaaggcccagcactgacctccagcgtgcatggctgtttccacgtccccctgctctgtgtcctttttggggtactttggacacttgggaggcgtcacctctgccagtgaatgccacagttggtggcaggtctgtggcaggtggtcgggtcctaaagtccagatcttgctgttgtttcaagtgatgctctgggtgggggaggagctggatgggagaagccagtgggcgggaagcctttttgctgcaggacagaccctcccactccagatgacctagtggcccctcactgagccagaagtccctgtggtgtgggtgtcatgaggtcatgtgaggccaaccgccctcccctgggatgaggctgagttggtggaagctgatgtggttgtgaggggctggtgaccctggcttagggtttgctgcagggcggggagtctgagctgggctgatggtgccatgactgatgcgggatggactacttgctttcctatgctcttgcttaattagccctttccaggctgactcacccacaagccagccaagccaacagccagggctccagttcagggactagccctcagctgactggtgaagcctttgtgtttatttctctgtgttcttttaggaaaacattgctggggtcttcaacaagtcctgtgccatctcctacacgagctacaggaacatcttccccatctgg

SEQ ID NO: 102613 - DNA, 1063 bp, Homo sapiens
tccacaagcgtttcccggagcacagggcagcggagatccggtaaggagggtctcagccattcagtgtgggcgctgccaagtcgggggccaagacccagacgcatcattctgtgacacggccctggtggcccatctcagaagcgaaactcatggaaacatgcaagaggcttcggatgttgtggaatccagtcatatgccctaaagcatacaaaatatctgttaggggctcagaatagcacagttatgatacaaaaatggattttctctctcttttaataatgttaagaagacatcacatacctgactccaccggtgtcccagaaacggtttttaagtaacctttcctgttgaagggtagcaagtattcagaaaagtgtacaggttggtcttcttgaagcaaacaggaagcgaacagtgccagcattagacatggtgacaccaccagagccctcggcccgccccatgacggggccgcccacatgcctgccaggtcgtgggtgtctgttgctcgctttggatcttgtctaggtggactcctgaggtgtggaattcgtgttgccttctcctgctctcctgctctcctgctcgcggttagtcaggtggctcgggtaacagcagcgttctctccctcgggccttcggttgaacacagatgccgcgctatccagctgcctgttctcagcacctgggaggatttcagtctgggttattatgaagcatctactgtgaacactcttgtacttatcttttgggggcacctgggtacccatttctcatggtcacgtacctaggagtggcattgctgtgttagagggtacgttatagggtatgtgatttttgtaggttcttctttatcctatcacgattacatttttttacttttgttcaacctggtgtagactcaccttggtcacaatgcactgtcctttttatatattgctagattcaatttgaagaatattttgttaggattttagcaactctggttacaagagacgctggtctataatttttttttctttataatgtttttgtcaggttttcctgttaagatgatgctggac

SEQ ID NO: 102614 - DNA, 1032 bp, Homo sapiens
gctgtgggtggtgagctaaacaggtgcaggccctcgcgcgcctcgcagcaccagtggtggctgtggccggcagagtaagctcccaggcacgttctgcctctccagtcctgcccagtctgtctcagcgatgtcccagatggggacgtcccgtggtgacgtgttctctgcttccacatttgccctcgatgctgcccaggtcccagataaccctcccgactaccagaagtactaccgccagatgcgcaaggtatgcgggagccagccccatccctgtcccgtcccccaggggaggccgccctcagcagggtgggtccttccctctgaagggggggctcctccctgggggactcctcccttggcgtttttgggtgtcctgctgtggtggatgcctggcctaggggctcatgcttcatgttgctgagctgcctggcacatggaggcacagttggcttgcacacacagccgtgcctcagagcagttccagtggtcacggcacacacaggcttcagaaggacagccgaagtgtagccagtgtgtccggggaaggcagaggaaagaagtagacctcagagccggtgtgggctgtgaccacaggtgcagactgtgaaattaggcatggacccagctgctgctgcctgtttacaatgggggtggggggcacctgggccccatcctgtccgtcgtgagatctgcaggtgttgagggtgtgagctgcacccctgagggtccctgtgctggaagctggaggtctgtctggatgtacccagcttggggccctggctgcacccacacctttggtggctgggcccctgccctgaccgggtgctctgtggtggggagggatgcgtgcggctgtggggaggttctgagaactggggtgtggacacccccagcctggagtcatggcttgtgctctgcagggtggcttctccttcagtacgctggactgcggctggatcgtttctgactgcacggctgaggccttgaaggctgtgctgctcctgcaggagaagtgtccccatgtcaccgagc

SEQ ID NO: 102615 - DNA, 1006 bp, Homo sapiens
agaggaacaacgtggcccccgacgagctgtacacgccgcacagctggctgctccgcgtggtatatggtgagcgcctcctgaggggccggcagggcagcccagggtcagggtcagggtgtcgcccactcattcacgcactcatcccctgccagcggcactgggccacctcctctgtgccaggccccagggggcgggatctcatcgccctgcccctccaccctgagaaccagctggtcttctactctcaggagtccaccctgtgcaagggtgtgtggtaggaggtgtggggcagcccctcctgggcagggaaggaggagctcagagaccaggcctgggggtgggtgggagggggaaaccctgggaagggcaagtccaggcgttgcagtgcatggagctccaggctgaggccagtgtcatggtgtctggcatccactgacccctgtcccctgtagcgctcctcaacctgtatgagcaccaccacagtgcccacctgcggcagcgggccgtgcagaagctgtatgaacacattgtggccgacgaccgattcaccaagagcatcagcatcggcccggtcagtgcccctgcccggcctctgactgcagcccctgggggttgaggtccgaaagtgaagtcctagaggccgggctgtgagctgggagtggggtttcctggagcctggtgtacctccatttgggaggtggccctctgatcgcacaagtgtctgagggcttctgtcctggacccctgcacgcccagctcagtgaagttgccccaccacactcgaccccccgcttccgtcccccaccggctcttgtcctcagtgtgcctggacactctcctagaggcccctccctgagatcttgctggctagctggctagctgggaggggtgctttttcctcacttggttccctctccccaaacagttcatcattcgccattctcccgtggggtttagacatgcccagggtgggtgggagtagcaggtgccactcctgattcctcct

SEQ ID NO: 102616 - DNA, 1050 bp, Homo sapiens
tgatccaccagcctcggcctcccaaagtgctagggttacaggcgtgagccaccgtgcccctcctaaagtttcttaaatacacttttaaaagtaaactttaaattttggagtagtttccaatttctggaaaagttgcaaagatagccaagagtgttccctggggccctcacaccatatccccattgttgatgttttatgttaccaaggtacgtttgttgtagctaagaaacccacggacaatcctaagcatttaggagctccatcacctggttttaggatgcaaaatgctgaccgaactaggaggtgcagctcctcagagggtgcacctatggttcaactgtgcccctcaggagcacggttgggaaatgcccgcagatgcactgacgtggtggggaatagccatccaccagtgttcgtgcttgaaagggcccaaggtatggatgctggcggagggggcaggcttgagtcttggggtctcccactgactcctgctgttgccccaggctgtttcctgactgggcaccggcacacccctccacactctggtgccactgccggcaggtgtacctgcccatgagctactgctacgccgttcggctgagtgccgcggaagacccgctggtccagagcctccgccaggtaggacctcatcagggaacaaagtgaaggcctctggggctgggacccacagggcctggggcttctggaatctaaccacacctgtccactcacctggtggccctgtggagcggagagccctgtggagcagagcctccaccttcctccatcctataataaacagtgagcaagctctgcccagaggggacttgtgctatgggacagtcagtagctgtagcccagggttcctgggggggacttccaggactcaagggatgcaggaggcagatgtgcactgtgtcctctggaagcaggcctgaggcgaggtttgaggtgcaggatgtttatcaggcctgccatggggaagaaggaggggcagagggaggaaatgagcttctgggcagacctgggactcatggagctggggagctc

SEQ ID NO: 102617 - DNA, 1057 bp, Homo sapiens
ctttcctttgcaggttaaggcggctcagaaacaagacagctcaccagatgaaggttcagcacttctaccagcagctgctgaggtctgtcatgctgcacccttctgcgcaccccctggtgatccccgttccccaatctgtcacactggcagcccccttcatgcatctccaactgaggtctcttcgatgagctccagacttggtttctagtttgcagttcaatctctgaacctgattttcctccaacctgccccttcctgctcataggatgtgtgtgctgctcctgcaagggtctcacacactggctaatccacggtggtctgttcctcccagtgatgtggcatgggcgtctctggacctgccatccctcgtggctgagcacctccctgggaggcaggagcatgtgttttggaagctggtgctggtgttgccggatgtagaggagcagtccccagagagttgtggcaggtcaggaagggttttcccctgtggggtttccaagaggtggagtgggcagggcagggttgtgggccagggccgggtattcctcttatgtgtgatgggaactcggaagtgtaggtttatgttttaatgcttggatttacagtctgttttgctcatgattttaagttgaaactttagatttgattatttcaatttttattccataaacttggtgtattagtccgttctcacactgctttaaagaaatatctgagactgggtactttataaagaggtttaattggctcggctgtacaggaagcatggctggggaggcctcaggaaacccacaatcatggtggaaggctaaggggagggaggcatgtcttacatggccaaagcaggaggaagagagagagaagggggagatgccacatgcttaaccagatctcgtgagagctcactatcatgagaacagcaaagtgggaggtgccacacacttctaaacaaccagatctcgtgacagctcactgtaatgagaacagcaagggggaggtgctgcacacttaaccaggtctcgcgaggctcactttcatgagaacagcaagggggagt

SEQ ID NO: 102618 - DNA, 1038 bp, Homo sapiens
caccaggctaatttttttgtatttttagtagagacagggtttcaccatgttagccaggatggtctggatctcttgacctcatgatccacccgcttcggccttccaaagtgctgggattacaggcgtgagccaccgcgcctgactgactcttgcacttttcaagcaagccctcagtgtctgtgggccccaagtgcagtgtcttccatgctgattgccctgtttctaggaatgcagtagagacagaccagagggtccgtgtggcccgttgctgtgaggatgtctgtgcccacttagtggacttgtttctcgtggaggaaatcttccagactgcaaaggagaccctccaggagcttcagtgcttctgcaagtatctacagcggtgagtcctgtgttcctacaggcaaaatccacacacacggggaagagtcttttaacaaattcaaaatatatgagctattagtttctgtattcagtggtaaaaggatgagggaaaatgttatagcaatgaatacctaaaatagactaattggattatactgcatttcagaaatacttgattacacacacacacacacacacatacaatataaggggaaaagtcaggagttagattgggacgtggtggctactctgtatgtcaactgatatttatagggtgcctgccatttgcccactgcactaggtgctgggagacagctatgaacaagccagattatggctgcatgcaccaataagggtgaattctcaaaatataagtagtggagaaaaagcaattaatagggaatatacaaatagtgtatattcaaactaaataggttgtttcagatttatatatagtggtataaccctaaagaaaagaaggaaaataatgatcataatctcagcatagtggttacttttgggaatgggaggtggtgcctctcatggccacaacttctcaactgggtgtaagtgcacaggtgcttgatgatttattaatcttataactgggcatatatgtgttacgtatgttgtatgattcatttcataataaaattt

SEQ ID NO: 102619 - DNA, 1940 bp, Homo sapiens
ttcctttgaaaagcatgacatgttgtgctcaaaaagtttgagattttggagcattttggatttcagatttttggattagggacactcaacctgtgtgttttttttcccttgtcaatgacttggcttttttctgatatttttctttctttttttttttttttttgagacagagtctcgctgtgtcgcccaggctggagtacagtgacgcaatcttggctcactgcagtctcccgctcccaggtccgagcaattcttctgcctcagcctcctgagtagctggggctacaggcgtgtgctgccgcgcctggctaatttttgtatttttagtagagatggggtttcactgtgttggccagaatggtcttgatcttctgaccttgtgatccgcccacctcagcctcccaaagtgctgggattacaggcgtgagccaccgcacccggccttgactctgattttgaatgctatcccctttgctccgtttagtgtttctaatgctgctatggaggatttgttaacagctgcaaccacgggcattttgaggcacattgcagctgaagaagtgtctaaggaaagagagcgaagggagcaggagaggcagcgggctgaagaggaaaggtaagtgtgtcttgtccatgcagccgaataaggagctcagtgtggacacaggcaagaactgaccctagccacgatgctcctgctattgtccactgtgctaccattccacccctgctgacccactcatgccctcctatgcttcagcccagggggtggatggagctcctcaggccacacctacccgtgagcagtggcccttcccagccaggaaaggcaggggaagggaggtggtgtcaggggagctggagtaggggtggcctaccgactcaggcagcacacctcaatccctgtctgcgtggccagggagtaaaacaaacagcacttatttttattcttaaacattacccttgtgtattttttctcttccctgtaggttgaaacaagagagagagctggtgttaagtgagctgagccagggcctggccgtggagctgatggaacgcgtgatgatggagtttgtgagggaaacctgctcccaggagttgaagtaagtgaaacgctggtgtcttgctgtgccaggagagtgagctttggctctgccctaggctgtgtcttgcaccactgaggatgggctattggaaatggatcttgcctgtctaagctactttgattttgtgaccaaatgtatttgatgcagtcctctgtgctcccttggctaatagaattttattataaaaaattctcttttatatgagggctgccaccacatgatcatagtcagccatccttattagccactggcatttatcatatatttgagacacttccaattgattgcacaagtcagatgttgctgatgagaagattttgtggttgtctgcatggtaatttacaaattctacgccaggcacctgtagtcccagcaactcaagagactgaggtgcaaagatcacttaagctcagaagttccaggtagtgtgctatgactgcacctgtggtggccactgtactccagcctgggcaacatagtgagaccctgtctctaaaataattaaaaattctgactattttattaagataaaggtttatttcttaactgttacgagggcccctatggacctataatttggcaccctgttccacttaattctttttaccctgtctttctaggtgtctgtagtttaagtattaaagcttcttttacaatgaagatagaattacattttaatactgaggatgcagactcttgcactttttttttttaaagacggagtcttgctctgtcgcccacactggagtgcagtggcgtgatctgggttcactgcaacctctgcctcctgggttcaagcgattctcctagctcagcctcccaagtagctggaat

SEQ ID NO: 102620 - DNA, 1517 bp, Homo sapiens
ttgaatttgtttattctattcattattgttttgaaggaaacctttgtcaaaccaatccaagcgtggtagttagtaaactatgaatttaacggcacatttcaccagtaagaccctccttctcagtatggttgaaatccagtatcattattacttgagacagggtcttgctctgtcacccaggctggagtacagtgatgcgatcacagctcactgcagcctcaacctcctgggctcaaacgatcctcccaccttggcctccccacgttttgggattacaggtgtgagccactgcatctggccagtgaaatctattatttatcagatctatcttcatgaaaattttgtcttatttaaaataacattccaaccccttttctctcctttaattaacagagaagtacaacagttccatcctgctgttagaaactcatctgaggtgaaatttgctgttcaggcttttgctgcattgaacagtaataattttgtgagatttttcaaactggtccagtcagcttcttacctgaacgcttgtcttttacactgttacttcagtcaggtgagtaaatgagctgtgcttgcagagttggaagaaagcaggtggttcttgtgctgtttgggtgctttcttattccaagcttttcaaaggaggtctcaggctgatgctgtgtcacccttgcagcagccccacgaaggggttaccggtgttgccctgttttataggggttatcactgttggtcaccatccggaaaggctgtgcaatggaaaatactgttccatggttcaaataagaaaaatctctttgggaaaacataggttgaattcagcactatcatcatccatgaaagctaactaaaaagcaaaaatctcatatcatatgcacaaaatctctgactttgaaatgcttcatgttttaaatcgaagtttctggagtgaggctgatggcgctaagttcctttcagtgggtgcctcagtgtctgtgctttgccgtgtgctagggttgcagaggcaatgggaaggccagtccctcccctggggtttgcgcagagtaaactgtgtcttggggtttccagtcggttattttgttccacttccacggaacttggggatgaggacagagcagcccctgtagcacctgctgttctaggccctgcatgattccgttcagtgcaatgtgaccaggaccgcggcccaccgcacagagcgccacctcacctcgcacacactctgctgcccattctggcagcggctccaaggaggctgccaggattccttgccacaagcccgtagtggccacagcgtggggaggatgctgcctgggagatcctgggacctgccttggttgatctgtggctccaggtcatttctttggtcacacatcagggcctcctgtaaacagtgactaaacccacagtcatgtcacagtcagaaggtcttttgcaggtttgctccttgtcagatctgcaggttgccaaacagaactgatattctggagtaaatgaaaaggttttccacaact

SEQ ID NO: 102621 - DNA, 1058 bp, Homo sapiens
ctctggtatttagattattttcttcagatcctaagaattaaattactgcatcagagggtatgacctttcctgaacattatccatgtatcttcccaaattgttgccccagaaagctgcaccaatatagatccttttggactttgtgaattttgcttatgggcttctcctcttcctggctggtggctttatacacccttcgcctggtgcggggtccccagcccagcaactcgtgtcactgtagggcccctgccccaggagaggcacatgcccagggccttgtcctgtgtacatctctgcctcttcccttggccacgtcttcagcctccttttgaggtgggagatgcaattccaggccccaggtgggcagccagcccctgatgctgtgtcctcagcagtcctcaccgcctgtctctgtttcacttctgctctgtgtagacttaatctggtgtgtgagcgggcctgagaccttttaagtgcttgaggcccttccctgtcccgtctctctgctttggaggctagcagatgtgccttcacttaacattcctcctgtttgtcatgacgcactcatatcttaactccttgtcatatttgccaaaatcaaatttctctatttgtctttgaattttgattgtcaccttttaacagaaattttatgttgaaaaaatatattctcaaatactgatcttgtgtgggtgtgtatgtgattttccccctcattttcaggcataactatgcctggcccaaggtatgccacatgggcatcctgtctcggcttcatgtctctaggtggaccacgcagcagctgtgaaagagtacagtcggtcctcggcggatcaggaggagcccctgccccacgagctgcggcccttgccagtgctcagcaggaccatggactacctggtgacccagatcatggaccagaaggagggcagcctgcgggattggtatgacttcgtgtggaaccgcacgcgtggcatacggaaggtattggctgcctccaacctggatgctaaaaaatccacgcaaattccaaagtcaaactgatatttttattactc

SEQ ID NO: 102622 - DNA, 1054 bp, Homo sapiens
ttaaaaaaaaggggccgggcgcggtggctcacgcctgtaatcccagcactttgggaggccaaggtgggcggatcacctgaggtcaggagatcaagaccatcctggctaacacggtgaaaccccgtctctactacaaatacaaaaaattagccggatgtggtggcgggcgcctgtagtcccagctgctcaggaggctgaggcaggagaatgcatgaaccctgaaggtggagattgcagtaagctgagatctcaccaccgcactccagcctggctgacagagcgagactctgtctcaaaaaaaaaaagggggaaagagcaaatacatgcttgtgagacaggtaagggagatgaatactgctgctgccgcagccagagaccatgcagttagcagacgtgtgggtggagaaatcactgtcgtgcaaaggacaggagctcctggtgcctttgaatggtctgttgtgcttactgcatttgagttttcaatcccatttcctttggtttcctgatatactcacacatggcggttgtggactgttttccaggcatctgcagccctggctagaaagaaggggaaaagtttgcataaagacatggctatcttttggcacaggaagaaaataagtgagttttcaattattcttttcactttttaaaaaaattatttttatttattttatagagatgagatctcgctatgttgcccagtctgatcttgggattacaggcatgagccattgtgcatggccctcttttcagtttctcatgctcttggtccaaaccctttgagcgtgagccctttccccagccagtggaggaggctggctctcagtggatttgcatctcacagttatttccttgggctcttctctaacctcctgtgacaatgaaaataatattactttcttagaaacagagtgaaaaaatccagttccaggtgatctgtgattgcataaactcttttctgcctcctatgtccacaggccccaataagaaacccttttccctgaaggagaagaaaccaggtgacggtgaagtcagcccgagcacagaggat

SEQ ID NO: 102623 - DNA, 1046 bp, Homo sapiens
ggggaactccctagtgctacaggctgtttcaggaagccaattaattttgtacacataatacttaattaccttctaataattggagcagaagatgaacccaactaatcctttcagtgggcagcagcctagtgctttttcggcgtcttctagtaatgtaggaacacttccatctaagccgccatttcgatttggtcaaccttctctttttggacaaaacagtaccttatctgggaagagctcgggattttcacaggtatccagctttccagcgtcttctggagtaagtcattcctcttcagtgcaaacattagggttcacccaaacctcaagtgttggacccttttctggacttgagcacacttccacctttgtggctacctctgggccttcaagttcatctgtgctgggaaacacaggatttagttttaaatcacccaccagtgttggggctttcccaagcacttctgcttttggacaagaagctggagaaatagtgaactctggttttgggaaaacagaattcagctttaaacctctggaaaatgcagtgttcaaaccaatactgggggctgaatctgagccagagaaaacccagagccaaattgcttctgggttttttacattttcccacccaattagtagtgcacctggaggcctggcccctttctcttttcctcaagtaacaagtagttcagctaccacttcaaattttaccttttcaaaacctgttagtagtaataattcattatctgcctttacccctgctttgtcaaaccaaaatgtagaggaagagaagagaggacctaagtcaatatttggaagttctaataatagcttcagtagcttccctgtatcatctgcggttttgggcgaacctttccaggctagcaaagcaggtgtcaggcaggggtgtgaagaagctgtttcccaggtggaaccacttcccagcctaatgaaaggactgaaaaggaaggaggaccaggatcgctccccaaggagacatggccacgagccagcagaagattcggatcctctgtcccggggcg

SEQ ID NO: 102624 - DNA, 1031 bp, Homo sapiens
ctaggaaagctattctgccaatcagccgtatggttttctttaccaggcataattagcagtcctcattgttagaccccttggatatagatattgatgaaggcagtgtttgtggagagccatctgttggccaggtgtggcagagtagactgggtcagccctcgggcctcatggtccccaccagtctgttgactttgtggttctgttatttttttctcacttacctttgcctttactacttatctacatttttgcgcagcttgctcacttccgacagagaaaaacaaaaggtgacagttcgcattcggagaaaaagacggcgaagaggaagggctcggctgtcgatgcgtctgtccaggaggagagtccggtaaccaaggaggacagcgcactctgtggaggaggggacatttgcaaaagcacatcatgtgacgacacccctgatggggcaggaggggcctttgcagctcaggtagatttgctcaatgttgtatttgaacatttcgcttatcttctagtgatttctagtgtgatttactaaagatggtctttggtctgtttttgcctttcaaaagtgaggaaagagggtgttattttagtttataaaaagtgagggccgggtgcagtggcttacgcctgtaatccccgcactttgggaggccgaggcaggcggatcacctgaggtcaggagttccagaccagcctggccaacatggagaaaccctgtctatactaaaaatacaaaaattagccggacatctggcgcacacctgtaatcccagctactcgggaggttgagggaggagaatagcttcaacttgtgaggcagaggttgcattgagccgagatcacgccaatgcactccagactgggtgacagagcgagactctctctcaaaaaaaaaaaaacagtgagtaaatttttatggttttattctttttattttattttttatttttttgagatggattctcgctctgtctcccaggctggagtgcagtggcgcgatctcggctcactgcaagctccgcctc

SEQ ID NO: 102625 - DNA, 1045 bp, Homo sapiens
gggtgtaaggcctgtcaggacagtttagttgggggccatgactgcccattcttttttttctttgagacagggtctcattctgcctcccaggctggagtgcagtggcacaatcacagctcactgcagtcttgacctcctgggctcaattgatcctcctgcctcagcctcccgagtagctgggactatagttgcatgccaccacatcccactaatttttgtatttttttttttgtagagatggggtctcactatgttgcccgggctggtctgtaaccctaactcctgggctcaggcgatctgcctgcctcagcctctcaaagtgctgggattagaggcatgagccacgttgcctggcctgctcagaggttttgactgtgtgatttaaatttctttagcacagataatcaactattgagtttaatttttttttcttttaaattagaccctgaaggaagattgggaatctgaaaaagatttatgtttagaaaatctacgcaaagaactgtctgcaaagcatcaatcagaaatggaggatttacaaaaccagtttcagaaagaattggcagaacagagagctgagttggagaagatttttcaagacaaaaaccaggctgaacgtaagtaatgaaaatgagcaagtttggagtgggactgaattttcctaggtagtactggaaggaatgtcgttcatgtcaccatgcgtcattgcgcacgtttcctaccttctaaatgctggatggccccatgcacgtgtgacacgctggtggccgtcatgggtcacaggtctctcagggtccttaaaccttcctgatctttgtttcagagatttttcttggcatgttcagttgctaaattattacaaagcagcagctttgtggttgttcacttttcatactccagggttgtgtgttccagcttgaccctcatggtgggtggcatgggtaggcgatgtcccctggtgctatcaggcatgtgaggctcaaacgaggggcccgggggcgcccaggatggggctctgggtggcagcgctctgggtgcaccatta

SEQ ID NO: 102626 - DNA, 1023 bp, Homo sapiens
tgtgccgtgtctctggctttgtgactgccacggctccccgcacatggacattgcccgtccttgactggaagcacgaggaggcgcctctgctgtgagcagtcggtcctggggagggaatggcgcacacatggaaaaggggtacgtgtgtaaagcttttataaaatgttttcccttcaggttgtcctgtgtgggtttagaagagaaacctgagaaaggaagaaaagatcacgttgatgaactcgagcctgagcgacataaggtaattggccgcgcgctgagaagtgggggagtcctgtgctcttgaccttccagccctgcgtcttccacattatagagcctgtgtttccgtccttcccaccttgtccaggggaggaaggctgcttgcggatgctgccccgacctcactgctgctccgcggtgggcctcaccatgcactgtttgatcaggaaagggggtggccgggggagccggagcccctccctcagccctgggatgccctggctgtgggcaaggcctccaccctgcagtggggctgcattcgtcagacttgacagtggcagttcaaagggtgtgaaattgtgtctttgctttgagtccacacggagcgtctgctggcttttgtgtttcttccttgagttgcttccgtgctgcgacttctgtcacctttaacttctgtggggcaaactgtccaaacggagcttctgggatgtagactgttctgggtctgtgctgccagtgtggtgcccagcagtatgtgtggctgtggagcacttgatgtgcagcatgagcaagcccggtgtcgggctccgggggacacacgggagggcagggaggagacgcaggggcagcaccgcgtggcttgttgcacggtggaaccagtggaggggaactcggggcatctgggctcagcggccaggagccctcactctggagcagggtccctgggcctgctggaggccacagggtgtccaggcagggtggcagcgggctgtgtgccagtttgagttccctgcaaagcggacc

SEQ ID NO: 102627 - DNA, 1193 bp, Homo sapiens
tctttcctcctaaatgaaattatgttgtctgtaggtaaaacacaatctaattgaagaccaccagaaggaactaaataatgctaagcaaaagactgagctgatgaaacaggaattccaaagaaaagaaacggactggaaagttatgaaggaggagctacagcgggaagctgaggagaagttaacattgatgctacttgaactgagagaaaaggctgaatccgagaaacagaccatcataaacaagtttgagcttcgagaagctgaaatgaggcagcttcaggaccaacaggcagcccagatcctggatctggagaggtccttgacggagcagcagggccgcctgcagcagctggaacaggacctcacttcagacgacgccctgcattgcagccagtgtgggcgggagccgcccacagcccaggacggggagcttgctgcgctccacgtgaaggaagactgcgccctgcagctgatgctggcccggagcaggtgggtttgcagtgacgccatctgcagtccctgtgaggccagacaccttggagggtagaaggtgggcaggctcctgggaggaggcgctgtgggctccactgggcgaaaaggtctggagggagctggaacaaggtgtggcgctctaggttttcagcctaattgcagtgggacagctttgtgctcggacgggcaggctggcagttgccatcctgaagccccctggccgcagtgggacagctttgtgctcggacaggcaggctagcagtcgccgtcccggagccccctggccgcagtgggacagctttgtgctcggacgggcaggctggcagttgctgtcccgaagcccccaggctgcaatggggacagctttgtgcttggatgggcaggctggcagccgccaccccgaagccccccggccacagtgggacagctttgtgtttggacgggcaggctggcagctgccgccccaaagccccccaagtctgcactccctgggtgggtgtcaggggcggggatcagtcattgtctctgttgttcttcgtgtgttttaagatttgaacagcagaagctaaacctcttttataggtgtcataaggacatggagtttatccactaagcgtttttgtgttttttttaacttaaacaggtgatttttaaaaataagcatgtttttctgaaacatacacactcttctttgaagtttt

SEQ ID NO: 102628 - DNA, 1711 bp, Homo sapiens
gaggttctattcattcactgccatggggttcaattcactgccatggggttctcaggcctcgccctccccatgggcccccatgggcagtgccccttccctgttgaggagcagagattaccttgggattcttggttggatgctggctcggacgctgtggtgtgagtaggaggttggttgtgcctgccgtgcgtggctctggcggggatgtgtgtgtgccatctcttgctgagggcgctggttcctacctgtggtctgtgacctggcgactcccatggctttggcctttggcctctgggcttctctggcttcatggggcctcttcactctcccacttactatttctggtggtcgagggaaaagtagtaagagcagttaaaatcccgaaacgatgacctgaacagttgaagtggcatttcctgtgggaaactgacttggcttttgcaagggtcattgcttcctgatgcatgtttaactgtcctgtgttcactttgttgccgcaggtttttagaggaacgtaaagagatcaccgagaaattcagtgcggaacaagatgccttcctgcaggaggcccaggagcagcatgcccgtgagctgcagctcctccaggagagacaccagcagcagctcctgtcagtgacggcggagctcgaggccagacaccaggccgcgttgggcgagctgacagcctccttagagagcaagcagggggctctgctggctgcacgtgtggccgaactgcagacaaaacacgctgccgacctcggcgctctggagaccagacatctgtccagccttgattctttggaatcctgttacctctctgaatttcagaccatccgtgaggagcacaggcaggccctagagctcttacgagcagactttgaggaacaactgtggaaaaaggactctcttcaccaaacgattttgactcaagagttggagaaactgaagcggaaacacgaaggggagctacagtctgtgcgggaccacctgcgaaccgaagtgagcacagagctcgccggaaccgtggctcacgagctgcagggagtgcaccaggtaaggcgccagggccctgccccagcccagggcaggcctctcctcgctgcctgtgtgtttccaccgcgtgtcacatgtctgcgtgcgtgctgtgtgtgcctgtgcgggtgtctgtgtgtctcacaggctgccgagatcagtggggacttctggtctctttgtgaactgggcttttttttttttttttgagccggagtctcactctttcgccaggctggagtgcagtggcgcaatcttggctcactgcaacctccgcctcctgggttcaagtgattcttctgcctcagcctcccaagtagctgggattataggcgcctgccaccatgcgcggctaatttttgtatttttagtagagactgggcttcaccatgttggccaggctggtctcgaactcctgacttcaggcgatccacccgccttgactcccaaagtgctgggattacaggtatgagccaccgcacccggcctgagctgggctttaaaacactgagttgaagggttattttgatcgcaggcaccttgttaaaggctttgctctcgtacgtatgtgggagggcctagaccttggtgggggattttgtgggctttggagtattcctcaaggctgaccagcacctctgcagaagacttggtttccaggctgctgtgggaagat

SEQ ID NO: 102629 - DNA, 1053 bp, Homo sapiens
cttttgttctctttgtctccttgaaaagttgatgggcctgcagccgcacaggcagttgtgggcatggtgggcgctgagtctggaggttgttcaaggccagcagcgttgcccagagccctgctgctgacgctgccgtcactggttctagctctcacattctcagctgcacgtttctgtttccacctcagtaaacgcaaactcttgttcataggcacagctgtcactgcagcacacaaggactcaggtttgtaaagacaaacgattgatttgtgtgtgacgtgctgtttgtttgcactggattttgcaaattatttactaaagaaaagtacttcagaccttttgtggcaaacaataaatacagcgatactctaatcttcagtattcataaaaatgggtggagttgtcccattttaacgccccagcaaaacaggagcatttctctaacggtctttactacagtgcctaagctacagtttgtgctgcttttcagaaactgatgtcttgtgatagttacagctgttcttgggctgggtcccagctctggtctccagggagggcctgggccccctggatcccctgtgcctgttcagcgtgggtgtcacctgcttcgccagctgggattgcgatcctcgtgtgcctccctgagtctgcgtgcatgtcagcaggcaccctgccccagtgcccctggccctgaagatggtgatgttctgggccaagcacagcccaggtcgtgtccaggcccagggagtgcagtcaggggagcagctgccctcaggcctcgccgcacgtctcaggttgtgaatgttaccgcagcagcatgtttacagcggactcgccgttaactgctgacagtggcatcaacatttattgagaatgttacttgcattggtcatgatagtttgtgataaaagacttaacacttttacaaatcaaaatgattttttggaagctggtgaaatgtcagttaacatgtatgaatttaatattttagtttttgggtggcttaaagacttcaggattcaggccgggagtggtagctcacagctgtaatcc

SEQ ID NO: 102630 - DNA, 1051 bp, Homo sapiens
ctgtttttctttacttaactccattttacaaagtgactgtgatgaggggggtatttggagtctgagctgctgggcagttgcacttgtacgtgcagtggaagcctgggtggaccttcgctgcaaggggcacgccagccccgttggggtggtcccaacacgctgcctctcctcccaggagcaggcagccgagcgggagcacgagcgcgaggagttccagcaggagattcagaggctggaggggcagctccgccaggcggccaagccgcagccctggggccctcgcgacagccaggtgagtcagtgcagcgtgcagtgctgctggttgctgtctttcactgtgtttttaagctttaactttctttaaatttttgccttccatgtacatgaaatcggcagcaggcgccgctggatggagaggtgaggaggcgtcaacgagatgggcactccctgcgctggcgcccaggctcccctgcgctcgctgggactgtcctgccacccactcgcttttcttgctcttgtttgggctgcagccatctgctttctcttgtctgaggaagctgtagtaggttcgtttatttttttaaaaaattaatggtggattcacacacagttgtaagaggtaagactcggatccctcgtgcctggcacgtggttccccagaggtctcatccacagagccggaatgcagtgtcacagccagtatgggcagggatctggtgacgctgcagtgccttctgccccccacggaccctcgtgtactgggtcacggccatgccgccgtcctttctcgggcaaccactcatctgtcgtctatttctaaaactttaccatcttcctgatgggtgaagcgtgcctgtcatcttgggggattgacaccattcaccgagcctgactctctggagattgatccaggttactgagtgtagccatagtttgttctttatgttgctgagaagtattccattctttttttttctttttctttttttttttttttttgagttggagtctcatgcagttgcccaggctggagtgcagtggcgcgatctca

SEQ ID NO: 102631 - DNA, 1042 bp, Homo sapiens
gatgggcttgtgaccactgtgtattcttttcttttcttttttttgttgttgtttgagacagagttttgctcttgttgcccaggctggagtgcaatggtgcagtctcggctcactgcaacctccgcctcctgggttcaagcgattctcctgcctcggcctcccgagtagctgggattacaggtgcacccaccgccacgcccggctcagttttggtatttttagtagagacagggtttcaccatgttggccaggctggtttccaactcctgacctcgggtgatctgcctgcttgagcctctcaaagtgctgggattacaggcgtgagcccatgcccagcctgaccactgtgtattctttgcagttttaccatttgtgtgcgggtacaggtacagggtagtaattgctttaggcatgtgcatttaaatatctcaaagctattttaataatgtcttaattattaatattaatagaatattagatgacttttaatacttttcttcttttgttttaatgaaaggttttggacttaaaagaacagctagaaaagatgaaaggtgacttagaaagtaaaaatgaagaaatactacatctgaacttaaaattggacatgcagaacagccagactgctgtcagcctcagagaacttgaggaagagaacacgagcttgaaggtaagctaccaaaggtccacgtgacgcccgagttcatgttgcttatgccggtgccgagcggccaccaagaccctcatcggggaggcgagtctctggtcttcacagacgcccgtggcccccatgtggcagacagtgcagagagcgcccgattctgcctggggacatgtgcatggaagcagctttctagggatcttgagtgaggaaccagcgacccctgccccaaactgctttctgattgcagcactgatagggatctgaggagaggcacttccctagggcagcaccccagggctgtgagaggcgtgaagctattgggctgttggtggcttgctcttctcaaggaggtgacttgagtaagtggctactcactgt

SEQ ID NO: 102632 - DNA, 1708 bp, Homo sapiens
tgtggtgcacgaagtcagcgacagtcaggctggcagtctgcagagcgagctgctctgctcccaggccgggggccctcgtgggcaggccctacagggcgagctcgaggctgcgctggaagccaaggaggccctgagccggctgctggctgaccaggagcgcaggcacagccaggccctggaggccctgcagcagcgcctccagggcgcagaggaggctgcggagctacagctggctgagctggagcgcaatgtagccctcagggaggctgaggtcgaagacatggcctcccggatccaggagttcgaagcggccctgaaagcaaaggaagcgacgattgccgagagaaatttagaaatcgacgctctgaaccagcggaaggcggcccactctgccgagctggaggccgtcctgttggccttggcccgcatccgccgcgccctggagcagcagcccctggcagccggggcggcgcctcccgagctgcagtggctccgagcgcagtgtgcccgcctcagccgccagctgcaggtgctgcaccagcggttcctgaggtgccaggtggagctggacaggcggcaggcccgcagagccacagctcacacacgggtgcccggggcccacccacagcctcgcatggatggtggcgccaaggcccaggtcaccggcgacgtggaggcctcccatgatgctgctttggagccggttgtccctgacccacaggtgggctccccccgcgggccatggcagggtatttttttttactctccttttctcctttgatgtcaatgacttctctctgcgctgggcactgggggctgcagttgtcatggtggctcatgacacagcggagaaagggggcctgaagctcgggccagcctgggcctgttccgtgtcagtacgcagtgaagctgggctgaggatttcactgttttgtaccattttaagcttatcgttttaagcttttaaaaacaattctttctttcacataatagggactgtccagtgaaacggagctcactatgtgaggagggtccgcttaagctgcttctctggtttctaaccaaatggtttgtctgtcgatgagcagtgcctgtgtgagatgtggcgagcgagctcttcttttggagctggaggccctgtagggagtcgtcttttaaggcttccacttgtatttgagcagaaccttgggaacttggtgcctaccacccccacaccagctgggtctttgtagagtggctcccactctcagatgccccagtccaccttgctctgtggggtcgtcctgggtcggggcagctttctgctgggtcctcagccccgttcccatgtggcctgctgtggaccaaggtgctcggctgtggatgtcactgccacctccctctggcatccctgctggctgccgtactggttcccagctccaggccacctgaggggcagccccagcaacagcctcctgcatgctcagctttcctctgtctcctctgtcaagggtgatctgcagcctgtcctggtgacgttgaaggatgcacctctctgcaagcaagaaggcgtgatgtcagtgctcaccgtctgccagaggcagctgcagtcggagctgctcttggtgaaaaatgaaatgcgcctgagtctggaggacggcggcaaggtgtggggaggggggaaggcgcgaggtccccccgggagaggctggacacgcggcagcaaggt

SEQ ID NO: 102633 - DNA, 1185 bp, Homo sapiens
ctggttccacccgcagtgaaagcttctagtccacagaacctcctttcttcccgaagcacatacacctcacgcccccacgagtctgtctctaacctggtgtcacttgtgcagcacgaggagctcatgggggcctgttactgttcttttgtctttctcagttgaactgctggcttataaagtagagcaggagaagtgcattgctggtgacttgcagaagacgctgagtgaagagcaagagaaggcaaacagcgtgcagaagctcctggcggcggagcagactgtagtgcgagatttgaagtccgacctctgtgagagcaggcagaagagcgaacagctgtcccggtccctctgcgaggtgcagcaggaggtcctccagctgaggtgcgcctgatcccccttcctgggacactggcgggagtccccccgttgtgccatgttttcttggtgatgaagggagacagaacctctggtgggccgcagttgggcagccccaggggcaccgcgccctgctgtccctgggttgataatcctgtggtggggggtgaagcacacgtgtgggacctggcagggctctgcctcccctcctggagctcccagcccccgggaacacactctggcccacgtggtcagattgttctgcgatgtctccacgcagatccatgctgagcagtaaggagaacgagctgaaggccgcgcttcaggagctggagagtgagcaggggaaggggcgtgccctgcagagccagctggaggaggagcagctgcggcacctgcagagggagagccagagtgccaaggccctggaggtaacagggtgtcagggcaaggcagccggcatgggctgtgtgcactggaagcctgaagccatgctcctctttcatccttcttttcctgttcttcatggcagtgcacccagttgacagcagtgtgacgtagcaggatagggctgtgtttgcaggtaaaattgcaccttggtgtagtggcagccaccacagggcgaagagtgcgatgacccgtggtggcacgatacccctgctcggagcccccccccgtccctgagcacttgctgtggagatggacacagcctcctcgctggcatccagacagagcacagcctcagaggtctgtgcacaaggcaggctggtggtggggcctctgctttgcatggcggaggcccagcaggcc

SEQ ID NO: 102634 - DNA, 1001 bp, Homo sapiens
tggggttccctccctgacacggcaagccgcctctgtgtgtctgcatcttgggcctcttcccgctggatctgtctttgtgttgtcacaaggaagccccagcggcgctgctgggaatcagaggcccttcagaggctgcttcgtccttccttgccccatcgtgcagtagaccttctgtcccctgcctggtgggagtcgggccctgggcaggggctcaggcgcttgctgacacgcttctcccgggcaccagacatggcctgtgcccccgtcctgcagaaggaaaggctgctgctccttgaggtctggcttaggagctcaggcccacgtggccacccaggctcagccccagggctgcactcaggctcatacgtgtgtgcatgttcacatgcacaaatgtgcctgtctgtgtctatgttggtatgagcgtctgggcgtgtgcgtgtacatatgtggatgagtgggaccagggcacagggaagcgtcatccggtctgttctgtttcagcttctcaggctcctctcctttggaccccgcgtgcttgccctgggcctgatgaaagcctgatagttttaaaaactacgatggaaacgcttttaccactgaatcattctggggtgtgtgattcagctgcctccatgctggagggacacagagcagcacagcacgagggtgtgcagtgtgtcagctgtgggtcccagtacaggaccacaggggctgcctgcccgagggcctgtttctggtctgtgaggggcctcccctgtaacgcggctgtgtgttttgggcttttgcttggcagttgttgttttttttgttttggtttggttttttttggtagatggagtctcactctgtcgccaggctggagtgcagtggcgcaatctcagctcactgtaacctctaccttctaggttcaagtgattctcctgcctcagcctcccgagtagctgggattacaggtgcgcaccaccacgcccagctaatttttatatttttagtagagacgg

SEQ ID NO: 102635 - DNA, 1117 bp, Homo sapiens
tggcatttatgaaatcatgactttgatcgtggagcccacgcatgtgaggtgcaggggagctgcgccgcttaccctctggccccgccagctgaacgtcgttgtgggtggggtgcaccctgccccctgtgttgggccctggtgacctttcagcgtgcccaccctccacaggctgaacgtccttttgatggtggaagtaataaacctgttttgaggggcttcacatccgcccccttgggatgaactaacaacggtccagccacctgttaatttcagtgctgttagaacaaccaaacgggctatgctttgtgacaggcctgcgttgttcatacaagccagttgcgtgcaaagtctgtgattcaatgacttttacaattttctgccagctccacaagcttctcattgaaccccagacacattaattacaatccctaaaaataactgttgacaaaaaacacaagtaatgttcatgccctttaacaacaaattcttacaaatttattttcttttctccaagaaaaaaatggcagcagagctgcagttccagtttgtggacgtcctgctgaaagacaatgtttccctcacaaaagcgctcagcacggtgacccaggagaagctggagctgagcagagccgtgtctaagcttgagaagttgctgaagcaccatctgcagaagggctgcagcccaagcgtaggtgtctgtgcttaactcttacctgcctcagcctaacccaccatggtccagagcagctccaccccacaagaggccgggctccctttagggacctggggatgtgggcgtcaccttctccctaaccgccaggctctgttgcctctgtctgaagccttgctaaatgttgtgggatgtttgaacatctcagccgacttccagctccgccacagacggcgtcctcactgaccctgaccgctacttgatgtttggtgcatgttcataaaagggtattttgactaagaatattataatctgatctaatttagagttttagttaaagtgatttataatttttttttttttttttttttgagaccgagtcttgctctgttgcccaggctagagtgcagtggtgcgatctcagctcactgcaacctccacctccca

SEQ ID NO: 102636 - DNA, 1050 bp, Homo sapiens
tctgccgggtgtagcagtcacatcactaaaggaaaggacgttcacagaataaacttcggcttgaattttgttttaattgtgcacaaatactgagtttctgtgcttgttaagcgtggaacgtggaaggctttgacaaagtcagcaaatggcggcctctgcagcctgagggaggcctggcccaggggcttgccgggattcggcccaagatctgctgcagtctcctgatggcacacggtccccaccccgtgacgtccatctcatgcccagtttggaccttacctaaggggtgaaatgcaagaagcttcataggggctcatttgatgatgctgtggagaggagcttgtggtcctagatcttgtctgacaaacacaaattgatcttccaacagcaaggttgtttctggccacagatactgttggaaggccgatggctctgtgatgatttgatgggaaaaaacaatctgactctttggaaagagcaatggtgttaatgtgcttttgtcagcaagacagtctttgtttcctatgataaaattttactgctttttttcttttagatggaaaaattgtacctgcattacttgagagcagagagctttagaaaagctctgatttatcaaaagaagtatcttttgctgttgattggtggattccaggattctgaacaagaaacactctccatgattgcccatttgggggtatttccttccaaagcagaacggaaaatcacatctcgtcctttcaccaggttccgcacggccgtcagggtggtcattgcaatattaaggtaaatgccatgacgttcagtcagtgcgttccgcgtctgtctccgtgagtgggcagcacactgcatggttttttggtcattttattccttgaaactccataatatgttctttttaaagatgaatggcatttgaggccttagagaaaatacagatgatgaacttgtcttcaagaagtcatgtgtatgaatctctcaccttctaaaactaaagatttaagggcacctttgtattacagaggaacatcttgacttttaatgggtttc

SEQ ID NO: 102637 - DNA, 1048 bp, Homo sapiens
ctctgcatgctcaccatctgacggactcctgcgagggctggggtctccgtgttctgagcctgtccagtggcatctgtgacaggatgaagatgggagggtcctgcacaccaggcgggagcggcatgtgtttcctagtcactggtgtggccggctgactttgaactggagtcgtcctgagctgggccatggtgggtgtctaggggaccatatggtccacggtggggccgcagtgaggctttgtcaggtggttgggcatgggaaggtcgccgccgccggcagccctgcgagcactttggatgtgtgcacccggcatgccaggcccgagtcaacagactggccgaccttggcgtcctggtccccatgggcagcgaggcccccattctgcttgtttggtcacagtggggttttcattgctctttcccttcctgtcttgccgtacttttaagtgtgtcttgtctcttttttttgtagattacgttttttggttaagaaatggcaagaagtagatcggaaaggagctctggcacaaggcaaagcccctcgcccaggtgggactccagctgctgttgaccgctggactcacaaacctttctttctactcttgtttttcattcactttgggtcatttttcagtgttgatggggacgtaataaagcacggtaagaaaatccgtgaattccgtcagagcagtcgtccagagggaaggcgcgcccggcgtagggaggtcagagctcatgttagctatgaacacaggtcacaggggcgtacggcgatgggaaacactgagatgctcaatatattgattatttaatagtgtttagcaaaatggtctttttttattccttaaatcaactgaaactcacttcacgtctctttccttgtagagcatcatgcttatttctggctcactcacatctttgtctcgggagttctctgccgagccattgccccctacagcagagagcacagctggctgcactagtgctgaaggagccagccccagagcagggcatttccaggggctcttgtcccagagcggcaggcgttg

SEQ ID NO: 102638 - DNA, 1032 bp, Homo sapiens
tatatttcgaccaggatataatttgttcagtgtttcttaaatatcataatttaaaccactgtataattcatatttttaccaaaatttacatgaattcagtgatagtgtttcaaaattgtggaattcttttcaaaaaatctgtgaagccttgtaaccaatttgctgcctcatttttatttatatgcagattctacttcaaagaaatcctgccacccgatgattaaacagtgaataaaatgtcatggctctttcctgcgacaattctatttgaggaaaagatttgtttttcccttttcccaaggaagctcgtgggacagcatgggcactactcttcatgtgcggtgacaccagcccccagatgccttgaattaagtgtcctcacctttatgcatgactgcaaagccagctggagcattttctatggagcctccgtatgttttaggcccatgaccttcgtgaggtgacgggcactcactcccatgagccctggctgtgtgctgttgtgtgcctatcggcagatccatccttcctgcctccaaggaggatacacagagaatggcttcctgttgttttgtttattttcttaacgtgtacagatggaaacttcatttaaaaataaaaacaaaacaactcaaaaaggaataaaatttaatcactgttttgtttgtgaatagcccttgtgttgttttttttttccattttatccattttatcagtttgcctttctcactgactaaaaaattgagcagagagtttatgttaaactcgtaagtcaaaaattttcagtggaacccggagcattcttgaatagccacttgactgttgtttactcttacttggtttcttatttttttaaagatgctgccactatgtatccacctctcatggccatgctttttgtttttgagatgggagtctccctctgtcacccaggctggagtgcaatggtgcaatctcggctcactgcaaccgccgcctcctgggctcaagcaactctcctgcctcagcctcctgagtagctgggattacagg

SEQ ID NO: 102639 - DNA, 1026 bp, Homo sapiens
aacataaacttcagaataattaaagttctaaatatgtttttaattataaaaacatacaattcaggagactatttgaacacccctttgagtaggaattgtcttcataggcaagataggagacctgggagctagaacagaaaagatggacaggtgcgataggctccctagaaatgagaacatttcagaatgactgagctgctactcgccaggccacagctctgtatgtgtacacagttcagggtgtccacagcagacaaggagtgaggcttcctggtcttttagtgagggtctttagttgggtaaagtagcagaaatccaaaggagaggaaatgtggatgggcaataaatattaaattatgttcaacctcagtggtagatatggaaatgcaaattaaagggcaccatttttctcttatcacattggcaaaattctagaactttttataacatctagtgctgacagagagtggagaaatggcacttttcatacattgcttgtaggagtgtgaattactgtaacctttttggaaagttatctcttcatatctgttaagttaaaaatatatctactccttcatccaataatttcacattgggttttgtatctatctttgttgaataaatgaatctatctcaaagaataaaaggatgcatattttggaatacaagtgtaaggaagtccgtctgtgtatatgtcactttacagcatgcttgtttatcatccataaggtgtaagactctgtattgtccgttgtgaactttaaagttgttttatccagtcacaaaaagccaaaagccagtagggattctgctcattatgtattttgtacatatatatacacacacagacacacacaaacacacgtgtgtgtgtgggtgtgtgtgtggatgtgtgtgtggatgtatatgtacatgtgtatgctcacattttgaagggctaatactgatttctgtagagagtgttcccattctccagtgctgtataactgaccaccccaaaatgtacacagtacttgaacaacatca

SEQ ID NO: 102640 - DNA, 1078 bp, Homo sapiens
atagtattcttacccaaatgggtacttgctttctataagactttttgtgtggatcttaatttcttttactaagatgctatttatgtcttttagtaaagagaagaacctaaagcactaagaggagcctaaaataagcactaagctaaagcttcctgaattaggaattttacagttattgtcatcttattacctataacttaacaggttgtaaccaggacttatatgcaacagtataagactatttggaaagttttgcggttgattttgttgttgttttattgttggtaccattagaaatgaaaacttttatatgaggtttctctctagcaataatgtattttagtcttcctgttaaactgtacaagatgtcgatagtgtctaatgacttcacattcatgaacttgcattgttgtcatatatttaaagtatcaaaaatagtgacacccatttttggtttgaggtatttggagatactacacaataaaaccaaacacaccagattcgtaagatgatttagtggttttggtaacactttcttgcttaaaagaagtttattgttgaaaaaaatcttagaaatggctgtcaaattattgtttttgctaaatatagctatagacactatccaattttaaaataatgttttaataattgtaaaacccataatgaaacacacagtcatgctgacttgaagaaaccttaatgtacagttaattttgttgtctgaagcaattttctcggagaaggaattgtttttagggctagttcacatgactcccctgaaaggatgcatgtagacagggctgcggttctcccatggccaccatgttgttgctggggccatgcacaggccaggatgccttctcactgcctccaagatgtagggccgggcacaggctctcccctgggtgatgctgactgatgtgtggatatggtgtccgactctgtggacatgcagtgcagcactgaatattcacagaacacccccactgaggtatatgctgaagccgtttaggagatcagaggctgtcttcactgagtgtgtctggtaccctgtggctgagttctctctggggagctg

SEQ ID NO: 102641 - DNA, 1035 bp, Homo sapiens
cggcctaagagttcttgttttatctctgccctggaaatacagagtgtcatataaatccttgctcagatccttccaggtttctctctcatctaattctctcctaactggctccctggggatgcagacagttatgagggagcccatggcgcaccattaccctcgggcacctgcccaagaggagccacaacttccactgaagcatcccctcagcggccagggttttgccatgtacctgggctgctggttagaggccgatggttagaggagagacactgaccacttcttcttttgaagattctaccagtttccattctgtctgttgtcacctctagaaataccacatcatgtttttttccttgaaatctttcagtataaaaccagcaaagaaggcagtacggtgggggtcacagtgtcccacgcatccctgctggcacagtgccgggctctgacccaggcgtgcgggtactcagaaggtaagggctctcgggggtggggcggtggcccctccagcctcacacagatacctgacgtacctaatcatgtgactgtcactgcacctgtcaaaaccacccctgggtagtgcctttgcccattaatccgggtcatgccaggtagggagatgcactgtctttagcatgcttacagggtctctgtggttgtgctggccaagagggcacacggtgtctcttagcagagtccagacaaccccatcagggttgttttcagtaaatgcacatggatgttgattttatggaacatggaacctatatcccactgattgatttatacacagtgctgggttcacaggcctgccctggggggctggcttactctgtgacatactgagggtcagggcatttttcattcaaaaagaggaaaacacttttagttttctattactttatctatgactgtagttttgacctcagctgtcatggatataaatatataagtagaatctttatggttatagatgatctgttgataaagtatagtcagcacctgatttacttcaaatgtcagatacttaacttg

SEQ ID NO: 102642 - DNA, 1051 bp, Homo sapiens
ttgtcgtctacaaactataaattattcttcattcttttgttctatggtgatttgttttgcacaactgtgtaatttttttcatattggaggaaacgcctgttgctcagtattccagttactattgttgtatcacaaacaacaacagtcattttattgtctctcatgctttctgtgggccaggagcttaggaaggcctctgccaggtggttctggcttgcaggagatggtgtttggagggagcggtgaggggctgagacagctttgtgtgtgtacatctcaggcccccacctggtctctcagagtgagctgctctgggcttccttgcagtgcagtggcctcaacaccgtccttctgtttgccgggcttcacagggctccaggcgagtgtcccaagacaatcgggtagaagctgaattgacgttactggcctgcattggaagtcacacagcatcacaaccactgtagtcacaggcccttttcccactgagtggagtgtcgacgtcacattgcagaggggcatgtagtttggagacattgcagcatctttagaacatgcgtttctcacaagtctgtaacatggagcagtggctttggtgcagaatcatgctgcaggcaaggtgggcccacctccctggaatttcatccccctcgtcagttaaacccatggtggttttattttctaggccacctgatctgggaggaccacctccaagaaaagcagtcctgtcgatgaacggtctaagttatggtgttatcagagtggatactgaagaaaagttgtcagtccttactgttcaggacgttggtcaggtgatgcctggaggtaagagacataaccagagtgggtctttgtccatgactgattgaggtaacgaaaagggttttgttttgttttgagacggagtcttgctttgtcaccaggctggagtgcagtggtgtgatcttggctcactgcatcctccgcctcccaggttcaagcgattctcctgcctcagcctcttataaatactccaggcttcatagtagtgctctagaagcaagcatacaagtaa

SEQ ID NO: 102643 - DNA, 1055 bp, Homo sapiens
aactcttctgcagaagttggctctgtaggcctgaccgtcatgttagatgttggaggttttccttgctggcctgaggcagaatctggcctgggaggccctggtgacattcgagtggggacactgccacgtggtctgaggctgccctccttgtagccaccccacagctacttcagctttcctgcctccctgtgatggcccttctggggttcacgggcagctgtcagggccccttttggtgacttctagaggcaggaccccatctgtcagtgcagtctccccccttccaatgcggccctgactgtgttaggggttgcaggcactgcgagaggctcagcgtcctggcccttgtgcctgcaactctgcctcttgcaggcggctgtgctaaccggctgtggctgctcaggtgcagaccctgtctgtgggtggtgctggcagcccagccatctctaacctggagcctggggccagctggtgcctgatccctgtgtgtgcacagatgctgggtcctcattgaataagactgaagtatttcagcctgtgtttctagctctacttgttactcatacaaatggcatcatttttttcctgtaattctactgagaaatagaacagtcagtcttgcacggtgcttgaacctgtcgtaaaataattctcctgagaaatagaacagtcagtcttgcacggtgcttgaacctgtcgtaaaacattttcacagacagcaatcattggggtgtcacttatttactcatggggaaaatacaggtaagtgtttaaacttccctggaaaatcatgatgaggtcatgattctgaatgaatcttaggaacatctgtagttgtgcgcgttttatttgtaaaatgtggattaggacaggacatgcgtgcacagcgctcccgtaggcgtgcacgcagcacacctcctcccccgggcgtgcacacagcgctccaccagacgtgcatgcagcgcacccccctcccccaggtgtgtgcatgcagcgctccccctctgccaggcgcgcgtgcaaagcgctcccccaggcactcccccaggtggacc

SEQ ID NO: 102644 - DNA, 1069 bp, Homo sapiens
ccttgacttaagattagtctggagtcacatggcagatttgcatttaaaataaggttactagaaagggggcaggcatgggcagagttctgtcaggctctggagcaggagatggtgtcccgggctcgtgtgtggtggtgatggtcaggagccagggccagcagcaccccatgtggacccgagagggcagtatgacaagaggaggcacagggtttatttatcgtagtacaggaaatattttgtcagccggggcttattacatgaaggatgtgttgtactttctggtcaccttacattgattataaaaaatattacatataaaatataaagacttacagctaggtagcatgtgtatcatctgtgtcataaaactccttataagaaggtgctgtgtatataacatcctgtttccataaccgcacatacagcagcaaggagatctttgtgagtgatccatttaaacacgttcttgataattttgagttttttttctcattttagctaatgtatgtgttgtgaagttagaaggtaccccttatctttgtaaaactgatgaagtgggagaaatatgcgtcagttccagtgcaactggcacagcgtactatggattgcttggaatcacgaagaatgtgtttgaggtttgtcccttttcctgactttcatgttgaagttaagttgcatgagcactcatggggtcccaggtgtgctgggtgctgggggattgcagaggctgcggggatggtctccttccacacaggcgctgctggggctgttggcacatggcctgcacacccctgtgtgtcctcccagagtgagggcaaggccagtaccaggaccaggcatgctgtggagggctgggagtcagcgtgcttcccacagtcctgcatgggaggagggtgtgtgggtgcggcctggtggccaataggaaggcactcaccgtggccccagggaaaccagccctctgctatatttgcattgttgtgatgtgagttgttcaggacaagtctagggaggccaggcacccagagcagaggtaaaagggatgcttgtttcctgcctcaggaggcctgcc

SEQ ID NO: 102645 - DNA, 1115 bp, Homo sapiens
cttcccctaactggtccactcaaccagctgcctttttaaattttatttttctcaagggggtgccttttttttttttttttttttttttttaaagatagggtctcactctgttgcccatccaggctggagtgcagtagtgtgaccataactcactggagcctctacctcctgggcttcaagcagtcctcttaccgcacctcctgagcagctgggaccacagacatgcaccccacgcctggctaattttttaatttttttgtagagatagggtctcactatgttgctcaagctgctctcgaactcctgggctcaagcaatcctccctccttggcctcccaaactgctgggattacaggtgtcagccaatgtgcctggccaaggatgtgccttttgttactcaaactaaggtacttgggagccaggtcagaccctgcctttgagtagcccttaaagcaatcgtgaggggattctgcaaagtggtgtgtcatcatggttagtcttgaggaaaaagcccagaggatggacaacagagaaggtgggagattgctcagggggctgggaagggcaggctgtgctcatgcatgtgtgcgtgtgtgtgtgtgtgtgtgtgtgtgtgtttgtgtgcgcctgcgtgcagggggagggtggcacagccagggtcatgacccccctcacagcagaaatgggggacacattgggcaggtgtccttagggataacatcaaggtagcccaaaccctgctttgaggtggagcagggagaccaccccctcgcagggccacctgtacctgatggtgactgcgtctgcaggcaggatagcctccctgtccccactagggaagagctgaggaatacaggagcttggaagtggaaccacaaccaattgagagtatatgtgccattggaagaagagcaatagaagatttgcaacatgaactaagatcaagaaatgctaacaaagtaattgttcaaagaacacagtagatggaatacataaaatggatacagctagagaacaagtagagaaggtggaaagtcagattagggaactactctggaagtaaaataggaactttaaaggaactattaagagagatgggagagaataagggctgg

SEQ ID NO: 102646 - DNA, 1030 bp, Homo sapiens
gaggacagcttccagtggatgagccgtgtgctgcaggtgggcgccccggcacggcctatggttcggtgaatctcccaagctggcacccccactccactccaagtgccaagtggttggcttgtcccgcccggtcctccctggctccagctttgtttatctgtatttttcattgcaaattgacaaattacagctgtatgtatttacgggatacaaagtgatgttataatttatgaatacaatatagaataattaatatatccatcacctcaatatttatttttttctgatgagaacatttgaaatgcactctcacagtgattttgaaatgtacattattatattcaccagtctgtgcaatatatctcaaagaaaaaactttcctcctcctgtctaattgaggctttgtgccctttcaccatcatctcctcattgccccatccctcagcctctgatcacagatttgtggacatgtgtacacaaatacagtgtgtgtgtttcccctttctgagttaaatggtagaaaactgcacacacttctcttcatcttgtttcctcatttaacaaagtgtccagagggcattccatttcctggcctggggaacaggtccacagaggggatgttcctgtcccccacccagcatctccccagcctcaagttgggggcctgtgccaaacagggtccttccctttcaggccattgatagcatccaccaggtgggcgtgtactgtctggccctggttcctgccaacaccttgcccaaggctcctctcggagggattcacatttctgaaaccaaacagcgctttctggaagggacgctgcacccgtgtaatgtgctgatgtgccctcacacctgtgttaccaacctccccaaacctcgtcagaaacaaccaggttagttgaacctaacaacaggatgctctctagtctaacagtggtaacagcggtgcttgtggttagggtgcggccctgctagacctccagtgccaactgcccacgtctttggggctggggtcaagagccagagcg

SEQ ID NO: 102647 - DNA, 1044 bp, Homo sapiens
tggctttttagataaccctacatattgaacgccttattcacccacatagtacaagaatagctggaaggaaatggcacctgtccgtgccagagcagggctgagtgcaggtctgtctctgtttccaaagtgtttgcttggccttgtgcctccccatcacagtggcagtgcacgcagggcagggcgggggctctgctcacaccctcttcaccacaaaaagacccctgaccactcaagcctcagacccttgtcacgcagcagaggagatcgggcgggagccttttgtgagctcgcttcctgtgtaggctgtggctgagcgtgggtgccggcctttgtgttagcggctctgcgtctgcaagcctggggcctccttgctagacgtcggaagggtatggatgccacacatgattgcagaaatgatgttaatgggatgttcacgtttgctctttaagatacagaggtgggttttgctctctctttccctgtgtttctcatgtggctgctgcttctgtgtgtgtttcctgtggctgtctcctccctgtctcactctgctgcctccttggcctctgtcagcccaacaggctgggaaagctggctgagcaggtatgaccttgaccttgaccttgttggtgcctctgtgcttccccctcccatgagttcatgtgactttctcgtgaattctagacaaacatgtttcttttgctgtcttactttgttcacagtggatattacttgacatattacaaaagctcccttgtaaccaaatttaaaagtaaaactattttcaaaaaatgttaatgctcatagcattgccttgggaggaagggctgtgtttagttccagtgcagaggtgtttaattccagtgcagacacaggttatgttgtctgggatctttaagggtgatgttgatcagagtactcatttaattgatgttccttattgaataaaatgacacataatgtcctttagtcgggattaatgttaactgtaagattcagaaaggaagagagtagaaaggtgaaggctgccatccatctcacctgagt

SEQ ID NO: 102648 - DNA, 1067 bp, Homo sapiens
acgaaatgtagagtgagctgctgtgagcacatggggtgggtggcgagtgcatgcgggtggcggcacttgggaccgcagcgtggttggggtgtccctgccattcatggcaggtgtgctgtggaaaggttgacatcctgactgttgtcaacagaccctcagagtgatcatttccaacgtcatgatctgccctttcagacattactacctgtgtagtaaattttgtactgaaattgttcccttaatttttagggttcgtttggtagaacggggttctccgcacagcctgccattgatggagtctggaaaggtagtggaaaccaagacgcgtgcattctgagtcgcgtctgagacctttgtctgaagcatcaccccgtggagggtgctgggggctgcggctctgatgaacacaggtcgacttctggttggggtgggctcggctgctgcagaagtctccttccctcctttgtggctggtatatagaattacttagttatgtttttaaacacacatctgagctcaaagccaagaaagggagaagttcaggtgcaggaataaagaactcccgctgggtgggtggcaggcctcaggcctctggggccagggccatggaggggggttccggcccacccacacatttagagttaaatggagtggccctggccctaagttggagatggcaaaatctcatgccctagtttagggtgtcagcagggaagaggcccccagaccctgtcggggatctgggggatcctgagatggcccgaggactcccaggaaaaaactgagatgctgcaagaggtcagcagacataggcacagaacagcatcctctgaaccaggaagggttcaaaggaaggaggaaaagccacacagcccaggaaggcagcatgaagagtaagccaggcttgatatgagtcggggaccctggtgccttcacaaccgcagaggcaagggaaggagcttggccaccctgactccgttcactgccatggccacagccacctgtggggagtcagagaggggtccagagagggacccagccaagccatgtgatgtccaggatacaga

SEQ ID NO: 102649 - DNA, 1068 bp, Homo sapiens
ttggagcggcctctaaacttcctgacctgacatgagcacatcagtcctgcaggccagcttctgagggacgttattttaatgtcactgaatcaagagagtctcgtgtcatgttttctttaacaagggacatagctctcctccttccagatcctccccggcgtgaaggtcatcatcgcacacaccgagaccaaaggacccttgggagactcacacctgggagaggtgagcaggggcccatgggaggggcttgagctctccagcctcaccagcttcaccttccttccctttttgcttcagattttggaattctaaacttgcctttgggaatctaccagaaaccatttggcccttgccccgtgtacctcccagacccagttcctatgtaggattttggggtactgtgggacaaactgcctcatccctaggttgacctaaccaagagaggggaacccctaggtttgagggcactgacaggtgagaggagctgcacaggaaccagtggcagtgtggaaaacagctaccttgtgcaggacccagcagctgctacgtaaacgtggtccctggcacccaggcaggagcacagacacggggaactggcaatagggaactctgcaccagaagagttcagggcctccacctgcagctgggaggtttggggagctcagagcccttgtcctgaggacacagtggagggtgcgggtctccctgagaacacagaggctatacaggaatccgttgggttgaaatgtctacatgtattgcacgtacatcttgctgtaatttgggacaggcatgactcattatttacaggcagtggtggcagcttgacgtgcagtcccgaatgtgcagattgatctgttgtcatgggagcataaggactcacgttcctagtcctatcctcttggggaatgtgctgtcaaattgatgtcttcaaaccaggcgggcacaggcatcatttgtgagctctgctgtgaagccagactgggggcttccagcaagccgtgcccagagggaaatcactcagcctcagctggcttctcctgactgggacaagggtgtgagcgtgcg

SEQ ID NO: 102650 - DNA, 1329 bp, Homo sapiens
gaccatttacggggagaaacttgattctgggaagatagcagagtacaaaccagctgcctcacttctgtttcacagggaggctgatggaaaaaggaagcaagctggacccatcctccctgctcacagagggcactgtggtcacacacagtgcctcctctgccagttcctttattgaaagaggtgtgctggctggccacggtggcttacacctgtaatcccagcactttgggaggccgaggcgagcagatcacgaggtcaggagaccgagaccatcctggctaacatggtgaaaccctgtctctactaaaaatacaaaaaattagccgggtgtggtggtgggcgcctgtagtcccagctacttgggaggctgaggcaggagaatggtatgaaccagggaggcggagcttgcagtgagccgagatcacgctactgcactccagcctgggtgacagcacgagatgccgtcttaaaaaaacaaaaaagaggtgtgctgcttgtcagcatgtattgtcacggacactcaataagtgccattttggactgtcaaatttagatgctttgtttcagaaagataagccagcatttagttttaaatcactttcctggtttgtaacttgatgctgtttagttaaattgctagttttcctaacactacaatattaattcttctcgtggaagtgtactgatttattatttttattccaagtcagcagatttggaagcattgtggtaaagtctaaggttttcatatccatagtgctgtttggtgagtaccggcagtacagttgaggggagcagggaacagcattgccccgtattgaaggtggagatggttacattcttcactgctttttgcattttgagttgtgtgcctataaaatttggccaaaccattttattattttgttcaaacttgactaagctgagtgatctaaaattatacagaacctaaatcaaagaagagaatgtaaagtcctttagttacttctaagaatttgaagtcaagcacgaatctaagacatagattatttttatatagctaatgaagagtatgttacgaaattgttgggtttttggggtattgagggtggcaaattttgtgaatcatgcatgcttcacagaaacaaccaggtttttccagaattagtctggatcagtgcctaacaaagctgttattaattctccacacatgagtctggctaactgggccagctctcatgttttactcctgtctggctacaaatagcactgtgcatagtagccctgtttccccatggtgttggactgtggtaaagtatgttgtgacatactggaattctaataatcctg

SEQ ID NO: 102651 - DNA, 1030 bp, Homo sapiens
tcggggatctgtaaaaatcctgtgcctaacaggtaaggctgtttctttaatgccagtagggccttcgtccctggccagggtctcctcgccttagactggccccagtgatgctgtgaagccacttgggcatctgtagggccagcatatgcctgtcctgtcagggttgctcaccctgagtttcacatgtgggtggaagtggactgttttctggttgcctgtgaatatgccctgcacaaacgctgtctgcttggagggaagttgacgggagtgtggctggatgctgtctgcccgcgctgtcttcctgggctcagcatcctgggacacaggacattgtagtggagcatcccaacctgaaactttgtctcagtgtagagacccagaaagatggggtctgggtgaaggagtgtggagtatggctgctgctttccaggaaacggtttcccctggtaacagatggcattgggcttttagtcctgttgaaattttgttgtcagaagataaatgtaaatagactcaatgtccatgctgtgacttggcttattaataacatctgtggagccataagatgacacacaggagaaacgggctccactcctaccccctgaaggggcatttgcctttgccctgaacagcagcgcccattcaataagtatctgttgacagctggtgccccggccacggggacaaaaagaggacagagcaggagtgaggctgtggtgaggccaaggttgtgtgggcggtgatacggggaagcctggctgctggagtgtccggctgtgccctggattgggtgagagggacacaggagggacgtggggcagagggaggggagaggagtagccactgtgttcaccgtgttgccgtgttccagggctgcccagtggccggattggccagactgtgttgcatcagggaggcagaggccagatgtagggaactgtgtgtctgaggactttgtgccacgtcctggacaccgaagggagtgccactggtgtgtgagtgatggagtaagaggtgggctgtgttttgg

SEQ ID NO: 102652 - DNA, 1067 bp, Homo sapiens
agcagagacccacatcagcctgaggccccttgtgccatgtccagagggtcccccagatggacagaagcctgagctgtgccttggcgctccctttacacaggcctctgtggcttcccaggcagcagttagtctaggcgtgtcgtctgtgatgcgtgttctgactggcagccttcggatccgtgtgtgaattcatgtgtagctcgcccagctcacttgggcttcctgtctcagaggctgctgaaaatggaatgttcttctttgggctcaggattaatgtggcaaagaaaataaaaataaatggttttccttcattttttatatttgttttgtgctttgctttgtgataagtttttgttaaaagtttgtcatttaaaaaaattctgcacctgaatactgttctcttgtccaatattaaaccattaggaaatgtagtatgttaatcaaatgatttatcatctgattgacctgttgtcatttatctttttcaggttggagaaaaagtcttccccatctggagatgacagttgatgctttatttggaaagcagtgtgcatatcttgaggggtgatgaacacaagcaaaccaagttgcacctggcttctgcacactcctgcgaaagtcggtgaacattcactccacattgacccctccctagcctggcaggtgacgtcagggtccttcacagacaaacacgcttgggctcggcaggagctgccgtggccacccccgctgcccagtgtctgccctctagaagtaggctgtgtttccaggtgttcacccgtggtgcccacagtgccgacccgtggctgggtcggagctccatgttcctaagctaggtctaggtctacactcctaggacgcacgcatatcagcccgtgtaccctgtgacagtgactgtccccacctcctatgttagtggtgcccttactgccgtcgctcatccactcgtgtgggacgtaggattgcacagggctgtgccagtggcgtgtagggaacactgccctggctcagcgtgcgagctaaggtggtgatgtatgcgatgggactctgcatgggatagtacagtt

SEQ ID NO: 102653 - DNA, 1029 bp, Homo sapiens
tggtctccaactcctggcctcaagtgatccacccacttcggctacccaaagcattgggagtacaggggtgagccactatgcccagcctcacatcatatttctaatcccgagactgtagagctggtgtctctttttggaaaggatgtcagtagagaaatggagttccccaaaattacagtttcacatattagtaaagtttctaaaatacagtaataatgttgagagctgacatagggactaacttagttttttttttttttttcaaattgtcacctaactttgattttgctaaataaggacattaaaagaaaaccaaaaaagtccactattggctattgccactatttgattttttaaaaaataagcgtattttagcatctaaaagtaggaaggacctcaaataaatgagtctttgttcttggccagggaaaacagcgttgtcagcatttgataactgtttttctagggtatgtgctgttattcagttaaaaccttgcctgggacgctagcattcggtaaatacttgttgaataagcaaatgaaacttaagcttctatgtatagaaacctaagtcacttcacattctgattagcagagtaattgaatattcttttcagtgtgtagatctatacccagaaccacagaatattggaactgtaaaaaccaactgcattaaatagatgtggtatgtggcagtgacaacttgaaggttgtgactagaactccggtctctggagtgttctattatatcacaccaagctggtcaccagcccatgtgttgatcctccattgtgatagcaacaaagaaaagacttcaggacattctttcctttaccctaatccttgatcttcagtcttatttagaaaagcttaatgttaaagatctagtttattcaaaactaaagataaggagtatgagaatttctatttcggagtgtaaaggaggagatgtttccttggcttctctgagcctacaggccttccttgctctttaaggaagtagagagagagaggaaagtaaagtatgct

SEQ ID NO: 102654 - DNA, 1050 bp, Homo sapiens
gcccctggtgcgcgagcctggctcccaggcctgcctggccatagacccgctggtcggggaggaaggaggagcagcagtggcaaagctggaacctcacctgcagccccggggtcagccagcgccgcagcccctccacaccctggtgctcgccgcagaggagggggccctggtggccgcggtggagcctgggcccctggctgacggtgccgcagtccggctggcactggcgggggagggcgaggcctgcccgctgctgggcagcccgggcgctgggcgaaatagcgtcctcttcctccccgtggaccccgaggactcgccccttggcagcagcacccccatggcgtctcctgacctccttccagaggacgtgagggagcacctcgaaggcttgatgctctcgctcttcgagcagagtctgagctgccaggcccaggggggctgcagtagacccgccatggtcctcacagacccacacacgccctacgaggaggagcagcggcagtcagtgcagtctgaccagggctacatctccaggagctccccgcagccccccgagggactcacggaaatggaggaagaggaggaagaggagcaggacccagggaagccggccctgccactctctcccgaggacctggagagcctgaggagcctccagcggcagctgcttttccgccagctgcagaagaactcgggctgggacacgatggggtcagagtcagaggggcccagtgcatgagggcggctccccagggaccgcccagatcccagctttgagagaggagtgtgtgtgcacgtattcatctgtgtgtacatgtctgcatgtgtatatgttcgtgtgtgaaatgtaggctttaaaatgtaaatgtctggattttaatcccaggcatccctcctaacttttctttgtgcagcggtctggttatcgtctatccccaggggaatccacacagcccgctcccaggagctaatggtagagcgtccttgaggctccattattcgttcattcagcatttattgtgcacctactatgtggcgggcatttgggat

SEQ ID NO: 102655 - DNA, 1042 bp, Homo sapiens
gaggctgagggctaaacacagctggatgtcacctgagttcatttataggaagagagaaatgtcgaggtgaaacgtaaaagcatctggcaggaaggtgagtctgaagccctgcacccgcgttccgactatcagtggggagctgttagcacgtaggattcttcagagcagctgggctggagctcccctgagctcaggaagccccagggtgcaagggcaaggaaatgaggggtggtgggtcagtgaagatctgggcagaccttgtgtggggaaggggtgctgctgtgacttcagggtctgaggtccaaagacagcatttgaaaagaggctctgaagccagtgtttgaagaatttgttcctgaagtacctcctgggggtaggctagaggcttctggcttcagggtcctgaagaacacattgaggtgccgtctgacactggaatagggtgcccttcattcctatgcctgagtccttaactatatttccaacctccagtgaggaggagaagattcggaaatgtgacaggagagcaaacaggacagtttgcatgtgtgtgtgcgcacacatacatgtgcgtgaaagattatcaataaaagtgcataaatttgttgatctggtaagagtttctagcaggaaggtcgagccacttactgtaggtcaagaagttgctagttgcggagttttttcttgcagttagactttacctagtggtagcagggccaccaaagctctgtgtcccagatggtgtatggcccataatccacccaacagcagcaaaggaccaggcaaaggagaacaggagcagaagcctcccagccactagccttttgggctcagtctctccaataatcctggagaggggcttcgttgggtctggacacctaccatgcattctgtgacctttccctagcttccaataaataactgtttgacgcccagagtacaggataccacaatgcactcttcctgcgtagagcacatgttcccatctgctcccattcctcaggaaccttgaattctagctctgctggcctttgagcccatg

SEQ ID NO: 102656 - DNA, 1069 bp, Homo sapiens
cctagtggcaatatggtcagctgaaaatggacaccagcaaagaaggggagaagcgcaaccgtagtctgcctcagctctacagcaggatttaagctctggagtcagactgagttgtaatcctagctctgccctcttgaacaagttacttaatcttgctgtgccttggtttcctcgttttacaaatagcgtcatctcatagagtttttctgagagggaaatgtgaaatgctgcctccagtgcctgcacagtgtctgctacatgtcagctcttaccctggggaaaaggctggtctgtgtgtttgctgcttagacagtggcagtcgtgttctctagaagagcctggagatcaggaagactgaactgctgcgtgctcgtttctggcaggtttggacatggcacctttctgctgtgcctggaaaccatttaccagaaagtgacgggcaaggagctgagatacgagggcctgatgggcaaacccagcatcctcacttaccagtatgccgaggacctgatcaggcgacaggcggagaggcggggctgggccgcccccatccggaagctctatgctgtggggtaggctctgctctccctcctttgtcccttttatgacatccccttctctccctcctcctctactctcacccccatttccctatatctaattcactcttctgccccgaaactcttctctgctccctttgctttgcaacattgatttagggttttttctcctttttccttttccggtgtggctgcccctgccagtgataaccctatgtctgacgtatacggcgccaacctgttccaccagtacctgcagaaggcaacgcatgatggggcgccagaactaggggccgggggcacacggcagcaacagccctcagcaagccagagctgcatctccatcctggtgtgtacaggcgtctacaatcccaggaacccacagtccacggagcctgtccttggaggaggggagcctccattccacgggcaccgagacttatgcttcagtccagggctcatggaggcctcccacgtggtgaatgacgtgaatgaggctgtgcagctgg

SEQ ID NO: 102657 - DNA, 1036 bp, Homo sapiens
gccctgtcctctctgtattgcttataattagctgggaacccgtttcagagccacagcatcccgtccaacaaggagttccagacttactggctggccttcccagtgctgcccaggagagctggccattgtgaagttagcaatcctgaggcccggcactgagctgccctcgggagaggtagcttgcttgcagaggaagcactggtcagtctgcacatctgcccaggtgccctgtgcgctgggctcatttttgagcactgactttgtcccctaactcatctgatcccttggtgatcctctgcagcatgactgccatctcttgaggtgcccgttggctcactttctcctcatcgcaccgtctgtgtatcacatagcccaggtcttgagtcagaccattctcacagtttgacgacatgcagttataaacagataacttactttttatttgctgatatagcttaagtccttcctcctccagcgctttctgatggaacagagcacttcctcccctgtgagggctttctccctgacctgtgcaagttctgtggagaaccagaatgtcagagttggaacagatctcggaatagctcagagacagccccacacaggggagtgacctgtcccgggtcacatagttgtttagtggcagagccaagactaccatggcctggggatggagtggaccctcgaggctggtcgagtgaagctgcctgctcaagaaccgacatgaggagaaatggcccatcaggcgtgatgccgccttcgtctccacggcctcaccttagctgcctgattttagactcttgcttggctatatcttgtgtcctctcccaccagagaaagacagctgaccacccttcctcctggtgacttcacccatggtgtcctgcctgttctgtggccccacctggccattgtcttttcgcctttcttgcatctttctcagtcctctccagctttcccttggcttgggcttgaccacgggtgtggggtctgtggagtgtgtctcccctcccctcccagcaccctggaggtgggg

SEQ ID NO: 102658 - DNA, 1253 bp, Homo sapiens
cacaggtgtggggcgtgtgcgatgacgtgtgatcgaaggcctgtaagctcacaggagtgtgccacaggtgtggagcgtgtgcgatggcgtgtgatcgaaggccggtaagctcacaggagggcgtcacaggtgtggggcgtgtgcgatgacgtgtgattgaaggccggtaagctcacaggagggcgccacaggtgtggagcgtgtgcgatggcgtgtgatcgaaggcctgtaagctcacaggagtgtgccacaggtgtggagcgtgtgcgatggcgtgtgatcgaaggccggtaagctcacaggagggcgtcacaggtgtggagcgtgtgcgatggcatgtgattgaaggccggtaagctcacaggagggcgccacaggtgtggaggggagggcttggagtatccctggggcaggagttgcctgtggcttcttggaggggtacagcggagccccaggagatggctaagctcctaagcaggggaagtaggaggttgggaatgggatagggagaggaaggaaagaacaggaagggtggtgccaggttgtcgggaaccttggaagtaaacttgaggagtctgaccgacttctcagggcagtggaaagcagggcacgctttattgctgatggggcaatctgatagaatcaggattttggggaaattcattttgagagtaatcaaaccatgtccagttaagattgcaagttggaattgaggataggaaaatggaggcagatcttagaggagataggctgaagctggcttgcccctccccaaggccgcctcttccttgatgatttgggttcatcctttaagattttagctccagccctacttctccatgactcctctggactccccagcccactgaggagtctcttctgaactcagcactgactagcagcactgttctcagagaacactggttttgatgggctctgaatgtgctagctccttggggacagagttttttgtttttttttgagacagggtcacactctgttgcccaagttggagtgcagtggtgcaatcatagctcactgtagccttgacctcctgggctcaaatgatcctcctgccccagcctcctgagtagacgacaggtgtgcaccaccatgcctagctgactttatttgtagagacaaggtctcactatgttgcccatgctggctggaactcctgggctcaagccatcctcctgcctcagcctcccaaagtgctgggatttcaggcatgagccactgcacccagctgg

SEQ ID NO: 102659 - DNA, 1467 bp, Homo sapiens
tcggtggctcacgcctaataatcctagcattaaatttaggaagctgaggcgagaggatcccttgagcccagtgggtcaaggctgcagtgagccgtgatcatgccactgtactccagtctgggcaacgggaagactctgtaaaagcgaatgattaaaaataagtgttgggattatattttctttggatttctctattttctatttaaagattgccctatcagaatcccatcttcatttttttgttctttctgacataggttttcaagggacatgagtgacccgaggatggtgttgagcctctctttgtaagggttgtttctttgttactcacgtactggtaattatcttaccatctctgcagagcccacccacctttgggttcctgttggacatcgatggagtgcttgtgcggggccacagagtgatccctgctgctctgaaagccttccgaaggctggtgaactcccaggggcagctgcgggtgcccgtggtttttgttacaaatgctgggaacatcttacaacacagcaaagcccaggagctgtcagccctgctggggtgcgaggtgagaaggcagccagaggcatggaagcccaaggacctggttcctaatggagccgctgccccagctccaagtccctttcccctgggttgggatatggaatcacctagtcctaggtcatggccacagctgaacacagaaatcctgcctgtgtatttggcagttgtagattatgtccttgtatctgtttcttttcttctgggcattgggggtgtgagtccctggaaagcaaaggtcacacacatgtctagaacttgcatagcaggaatagcaggtgtggctctggcgtcacaccttggctttcctgggtatgatgtgtgcacctgaaggagtgctgtcctcctcagccacctgcagccctgcaccatatcccaactttgatgcattcttgtttgttgagggtgaattcagcttttggaaagagtcctttggaaccaggagagtaaataaaatagctgattgattagatgatgctgctcaaagttgcatgtaaaatgtgacggaatcaaattggttccttgctgtgatttccagagagaattccaaaaaccttccaagtaaaggctgcattgttagggttagtataaatgttaagcagctaactcttagcaggaatgaaaatagaaagtaaaagaccagtttctgcgacagtgacagggagcacacatgaaccctatggcttccaagtgggggcttgggaaatccaaactgaacctgacggggtagcggtggcaagtggtcagaacccacatctgtggcatttctggtctcttgtgtggcaagaactaaatgagacaggttcttctcagatctgtttgggtgcctttcagaagtgctgctgggtgctagaaagggctttcctccccgttctttttctgagcgggttttttccttccctaggctaa

SEQ ID NO: 102660 - DNA, 1009 bp, Homo sapiens
aaaatgcttgtagtgtttaaaggggatttatggccatcctgaaatctatctgtgggcctaggttaggacccccattctagtgagatttcttggggaatagggaggggctccagggatccttgagggtacatgagtgtattgaggagagagaagaaatggaactcacagctgggagctggcaggaggtgggggaagcagtcctggggtcccctgttttctctgaggtgctgccgagttgccagctgaatttgagactgaatcctgaatccagcacttgtgaactgggtgacccttgctgagttctttttgaggttgatgccttatttgtccagtcaggtaatttagtgcctgtatattgaacaccttgtataaaccggcacattttgccaggcaaggccatttggagatgctgacacttcctcaaagggctgccaaaaagaatacataaaaatgcctttgttacatgtctggctgagtgcttgggacagtgacaggtctgggtgcaacagcataagcctgtgaagccaagggttagaggcaccatttgtccaggcatttcctgtgtggcgtgtggggcttggtcagttttctcttggcagctgttttttggtgttcaggtgtgatatcttgttggctcgagttgcttcctcctgtttttccagggtccctgccctcctcctgcttggctctgtagctgtcattgtccaagcttggagggctcatgtacaagctaacatggaggaggagctggaagattgcctctcccgggggtcttgcctgttcagtggaaagaagatgggatcattacagccactccagtccctgttttactggacccgagacatacctcagcttcctggaccccacacgctcttggttttcctccttgcactgtcttttgctggcaggtcttgtgtggtccattattaagtagtattgttcttcctggttctctgagaggcgagaccttccaaaattttcatctccaggacctgtccagtgctgatgt

SEQ ID NO: 102661 - DNA, 1014 bp, Homo sapiens
gtaatttaggttttccatctctactatctgtgataagactaggaaactgtgggaaaatgaactggtttagtgatagcagcaaagaggataattaaatgagctactttatctgggaaattctgcgattcatgagatatcaaggaggcgggtctcccagtaatgttaggagactaggagtgttgatttgtagttttcttgaccagctctgtgctcaacatgaaaagtcacctgaaacccttcatcctatctgagtcccttcatttcctgcgtgcgccctggccgcagagcctctccttcaagcctcagctgcttcctcagagttcagccttcacccacccatgcaccaagagcagtccttctccttctggatcgaggctgtttccacagggactaagaggaaggaaactacagatgctcacccatcatgtaacatgggcgtcttgcagctctgtgttttaccctgtggctccgtacgtgtgcctctgtcagcaatacgctgtttcatccacatgggatggtagctccacaaaacctggagcaatcttttttcctaccctggacccacataatatcaattggattattaatgaaatttatggcccattttgcgaagtggtgaccacagttgcctaccatgcagttttagatcattagggggagaaagtcacataaaagtaaagcattaacttacaaaacacttccctttacaaaaaaaactgtaaatactttcccttctgtggttttctgtgtcacatgaatccacttcaatccaaggtacgcagacccataaataccaggtatccataaagttctaggcaactacagcaactgaacctgacattgtaactttgattttaaataaaaataccatctttttttttcctgattagagtaactagtattgaatttgaccaaagtcaataaagtctttcttagaaaataaacacggtttctttgggtgccagggcctgttttcagtgttgctttatgcactgtacaaatggtatactttat

SEQ ID NO: 102662 - DNA, 1164 bp, Homo sapiens
cgggggtgcggcccgcgccccctgggtcctgcggatctgggcccgggggcgcgcgccccgcccctccccctccctggcggtgcagctgtccgggcgggggtggggcgggggccggggcccgcgtgggattaactaggaccggggcgggagtcgaccgcggccggcggggagggctagccccgctctggcgggcgggcgcgtggcaggggctcccggaggccccgagctcccgggaggcgctccggccaacttcgggccggtggggaccgggcctgggcgcggggctctgaaggtgtggaaggaaagtttgggactccgttattcttccacagcgtccttcctcccgtaatatccagcctctttatcgcggggctcgggagcccttggagttgatctcgccaccattatccccccgggcgagcgcggaggacgggctggccattctggccaggccggaggtgttttccagcccggggctttgtgataactgggccgaaacccgagggtcctggagcgcggcgggtggcgggagcttgcggagcgcggcgcactcggcggccaggcatcggccagcccagcggcagccccctttctcctatttttatttttatttttggaaggagctgagaattagtcgattggttggcaggttgaattgccttctcttctatggcaatatgtgtcgtgacttttcaccttttgcctttggacaaaggtgaatggcaactgcgttggtcagtttttgttttctgttctgcggatgggttcgccgacgcagtaatcaaaattagagccactcttttggaagagcaaatcgttgttgttgcctccccagccccacggatcttactttgtgccattttcgggttgattttaactcgtttatttcagagctctttgcctcacctttatttttagatttagtcgtgtttgctgaaatatcagttgcttcttctgtgaatgaagtgtgggaacttgctctcgtcgcagttaatgaaatcaggaaaataaaaagatcaaaagggttggggatgggagaatgaagaggaatgtagacagatagtctagggccactcactggcttttggcgattcttagttccttaagctgattaaaacaatgtgaggaaatgtgggcttctccactttttaggaagaggtaata

SEQ ID NO: 102663 - DNA, 1018 bp, Homo sapiens
ttcaaatagatttttattttggtttggggagcaaacggtattgtgagtgtgactcaagcagtctagtgcactgtgaagggctttgagcttcttggaagaaagataccatagaacttcaaggaaatgagatcacattatctgtggcttttgaagatgtttttcattgaatgtccatctccaagtccttcttttccatcttggggtattcaatccccacagagaccctgtgtcttgttttttattctttatctctttggctgggaactaaggtctgaccattgtttttttttgttttctcttctactcccttgtgctctactcatgccctagggtttgttctgggcatcagtggaggaggggtagaatttctggcttgcagcaaggtgttaaatccgagaatttgtgtaaataagttggtgtgaagtcaatcagttctacagccaaaagcagttttctcctctttagagggcagatgacccctctgaataattctctcatgtgttcttttttgtacttcgttagccatacactcatttaaactgtaatatggtttatgcaaaaatatatagaagatagtatttcattctcctttttaaagtccctgacctcatgtggcctttacaaaagacattggccggtttaaatgatgtcatatgcgtataagtttcacactggaatggtcagcttttagctttggttctacagcccagactctttatgagctaaatcaggtctactttttccctagggtgggtttgctggagtgacgtgtgacttggcattgtgtcactgaggcatgtggccacctgaattgaatgtgtgagtggctgtcagaacagactgtgtgtaccctcccttgctcctccccacccatcacctccaaaagtaagtgatgaaaatagaggaagccatggggccacaattaagctcactgcttcacgttttcaatgttgaactttaaatcacacccaattaataattcctgagaatggataagttcttagaattgaaaaatgct

SEQ ID NO: 102664 - DNA, 1034 bp, Homo sapiens
ttttattttgagaattttcagatgttcggtgaagttcaaagataagtgaacccctgcgtaccctttactctagatgtaccaattgttaacacttttgccacattggctgaaccatttgaaagtaagtcgactgtgtcatgagagtctaccccttcatagtttcacatgtacatgtacttcctatgaataaggactttctcttgtatgaccacaatgttatactcacatttaggaaaattaacagtaattctgtaataacatccagtaaacagttcacactgaaatatcctcagttgtccccacagtgtcttttatagatgtaccacacctccatcctggtttacacactggttggttggtaggggaattgtttttaggcaggctgaagccaacccagttatcctagatgtagggaaaccgggaaacattggtaaaatgatttaaatttcaagctgcagggctactagtgaagtaattacaacagagagttgattggaatcactctggctccggtccaggctttgcccaaggtctggacctgtcacttagccctgttgagcctcagcttgttcatctgcatcttggttgtctcgtgttccatagggctgtggtgaggttcgaatgagccaagcatgtgagggcctggcccaaatagatctcagcaactggtaattattgttacattttctttcattttagattttgattatggtaataatatggaaattataatcatttgggagaaaggaattaactgacaaataaattgaatgatcacatattattttgaaatcaaagtataatgaaataaaattgtaaaaatataccaatatagtgtgcttatgtggattaaagtgattgttgaatacagatgcttttgtttgtttgagacggagtctcacactcttacaggcgggagtacagtggcgcaatctccgctcactgtaacttccgtctcccaggttcaagcaattcccccgtctcagcttcccgagtaactgggattacaggcatgcgccaccacacccagctaa

SEQ ID NO: 102665 - DNA, 1028 bp, Homo sapiens
ctgtagtaagccatgatcataccactgcactctagcctgggcgacaagagtgagaccctttctcaaaaaaaaaaaaaaaaacaaggccaggcgctgtggctcacgcctgtaatcccagcactttgggaggccaaggcgggtggatcacctgagttcaggagtttgagaccagcctggccaatgtggcaaaaccccgtctctactacgaaatacaaaaattagctgggtgtggtggtgggtgcctgtaatcccagctacttgggaggctgaggcagggagaatcgcttgaacccgggaggcggaggttgcggtgagccgggattgcaccattgcactccagcctggcgacagagcgagactcttgtctcaaaaaacaaacaaactgtgcatcactttgttaaaaggaaattttatgtagaaactgaacatataaaatgggtaagagtgaagcactgtttgaaaattgctgtggtaatggcagttaaagtttaagcagggctgagtgatgtggttgagtgtttagaacattcctggtatataacctgtgtgcaataaatatttgctgagtgaatggagaagtaatctctgcagagtagaaagatcacttcactgttagtatagaatgaacagcccagaaccagaaggacaagttatgagggtaggtgagagatgacaggacgtgaagtagaaaggataacacatctaatgagagcatggatttgagagtaggagacagaattaactgcatgtggttggacaatggcttgtgagagaggaaaagcctagcacagtgcatcttcagggcagtgtcatcccgaggcagtgttgtgggaatctgtggcagttagtgggtgggacctgcatgctaggtgttatacagtgttacatacaatgcatgggacattctccacagtgaagaatttgctccctcctaaagagctttttttttttatttattttatttatttatttttgtgagacagattctggctctgtcgcccaggctgggttgcagtggcgtgatctca

SEQ ID NO: 102666 - DNA, 2963 bp, Homo sapiens
agtgcacagtacttacacaatggcggtaatttaatttttggtcattcattcttcaaagataactggaatatcttcataaagagaaacttatcaaacatttggttatcctggatacagttcaaacaggtaagataaaagcatgattatttccccccatatttcacaataaaagttttcaaaatattgagtttattcctagtgaaaaatactgtttctttttctttcttttttaaatttaaattaaatagagacatggtctccctatgttgcctgggctggtctcgaactcctgggctcgaatgatcctcttgactcagcctctgaaagtgctgggattacaggtgtgagctactgcacccagatgagaaaaataatgtttttatttgtgtgtgtgtgtgtgtgtgtgtgtgtgtatataaaggcagcagagtcatctgggaatgctcagggaataggcgtggtggggtaatgtgctcaagagagacaaatgtttggagtggcctctaggagaacaggagaggggttgtggagcttggttgatgatggagatagcttatagtggtaccagtgtacatgtgtgagtctattgtttttcatttttccagtgctcagataactgcctaggagaacatgtaaatgcaatcattgttcatcagggttgggattttgcatggaggcgtaaaagaaggattggtgggataggggagagtctggaatcatggggagaatgactgaagtgactgatcatggtggtggggggatggtctagggtggatatggagagaaatgcacagtgattggtacaaagaaggtcctcagtaaatatgtggtagaattaatagatgaagggaactaatagattggaagaaaatatagtattacaaggactagagattccaatgtagtcagaataggtattttggatatgaatgacatgtgacatagtaagataaaagacaggaggtgaggatttgagagcagggcatatgaagatctcacaagggagaccgggcgcggtggctcacacctgtaatcccagcactttgggaagccgaggtagtcggatcgcttgagcccaggagttcaagaccagcctggccagtagggcacaaccccatctctaccaaaaacaaaaacaaaaacaaagaaaagaaaagaaaaaagagatctcacaggacagcatctctggattagcttatacagagtaagttatatcaatgggggttgacttatggaagataaaaaggaactatacagcgttggatgagttctaagtaaggatttcacaaccatttaggttgatggtgggagggacagaaggagattacagcttattataaggaaatgggtaggttagtgaataacagggagaagcagagaactagagcttgattgcatgagcctcaaaagatgttttcattcatggtcagagtggcagtaagaagtcctatatggctggtggaagactaagccaccattagtgcagtctctagggaaggactttctccttaggagaaaaaatagtttagttacgacaaagaggagaatattgccaaattgctatgcatagaggttaaaccagtttagaccccccaccaacagtgtatgagagtattcgtttcctatatggggcattctttatttaccacagggttgatgatagttttcctttttattagatttataattggtacattggaacttgattcacatcatcctgtattcagtgatgtctggcttctgaaatgctgctgttatcattttatctgcattacttctttcataggtcaggcctcttacagttgtcaaacttcagtacagttctatatgaaaaatgcacataacctatacccgcatttgtttagcaaaatggtgtgcacgggttcctgatgaacattgcaaatgtgtatctatagaaagggccctacctttctgcaccctccctctcttcccacatgtcctttggccatccttccatctggcacacttattctaccccctaattcttcaagatgctctatcagccaatttattctccatcagcccttgtagttcatcacactcaattatctctaaccctctcccacctccactcccaccacacaccccagtgctcctgcctctcaggatgtgattgattttccttctccttctgccagctttctctctgggttagactgccctgtcagattgtagtgctgaggaaagaagggttcatcctaagcctgacttgtactctgtacagctggagttgtttctcagcatccagccaaggcttctttgaaaacactcactggggaaaagaacaaggttgcatcatccctttgggtcatggctgcagtgtctcttggtggttttaaaaacagctcactccttggctctcaaatgaccctggaaaccaattgcattggctacgtaagtcataatagttatagtcaaatcattgcctactatttatatatatataattatttcccatgattatgctaatgcacatcattaacccagattaactctgttagttttatttgatcacaacagtgcctcgtctgtgagtgccctgtctctatagttcttgtgcatgctgcatggtcgagtgctcacaacttaaagggaatcttggtgaacctgacagtgttgatgtttgagtattgatcataaccctgttcatccatacacattttgctagcttctgaatgctgtatctgtttttgctaaagctggggtaaaaaagaaaactctgaaatttgagtgcccatttaatcaggcatttaatatatcttatttcatttagctcttacaactctgatgtatgtaggattgctgtttcttttacaggtcaagaaactgaaacttacagtaattaattgaactggtcttgaggatatttggttttgagctatttcaaatgaagacaatactactcacctcacaaggttgatgggaggattatagtgtctgtg

SEQ ID NO: 102667 - DNA, 1059 bp, Homo sapiens
tcggcttcccaaagtgctgggattgcaggtgtgagccactgcacccggcctttagtttcttgatgtaccatttgctgttagcttaaattatgccaactacagcccaagcttaattcaacatttaaataaagttctatgcacaataatacaacacagcacttctattatagcaacaacattagctgtctctagttcctaaaataagaaactggagtgacggaagaaagacttgggttgcttgttcccacctttgacttgtaaacttccttaatggtctttcatcagatgcttaagctgccagagtatcccttatgaattaaccagctactctgtgggaaactgcttttgtactacttccaattctgacaacctttttctcaagttgagctgcctctgttcctacttctgaaatgcctgtgcaatgctgactgagtttgtcaccagtaagttctccccagacagggaagtcctgcgggaccagtatcagtcctcagtcaggaagaggttgtataaatagcgggtgctcacactctagaaaaaggggcggaggagaaggtaagtgttgagccccagatgtgaactcctatttttgtttcagggtaattaatgtttccttaagtgagctaagccttgggctcttgcgcctctggctttcaggcctgaatcagcaatctttaggcaggaactgggggtggggaaaaggattttgtatttcatgtcatccccaaatgaatgaagtaatatgagagcagcactttctgaagcttggccttgaggctggagaatgggttgtggaaggtgaaaactttccttttaaaatcctagtgacttggggagaactggcctctgacaagtctcttgctgcagtctgatgactgcagctctcagagatgctgttgggttgtctggtgtttgtttctagttctctgctcgagtgttagtgccattagatggtcttgcccctgtctgcggttctgccttccatgtcttccccttcccccttggcctcctaaattagatacattccccctctgctcccagacgtctccatctcctcat

SEQ ID NO: 102668 - DNA, 1033 bp, Homo sapiens
aattttccttgtccgtttttctccacctgcagttagttgcaaaaccctactgactgtgtgtctgaaactgttcttccataatttctttccatttccactgtcatttctagcactggccccgtcacctcttcccagactagaccagggttcttctcaccctccagtctctctccctaactaacagtgtgttctgcagaccacatccaaattaaccttccaagtttgattattctttcttttctttgttcaaaagtctttggtgactccccagtacttaacacaatttccaactaattcagcagtgatctcctagtagcaagagaatgatgactccaaacctcagaggcctggagctgtattccaaagcagctctgaacataaattctctaatgacatctcccattttatctgtaagagtcatgcaagtatttaaggtaaaaatatcatcccaaacaacaagcaacagcaatacaaagtcaaagtaaaactctaggaacctgtgccatttttaccctgtggctttttatattccagccacacaccgtggaacccagggaacactcacatcctaattggaaaattgggtctaagcgatgaagtccagatgattccatctggtatctgaggctgtctgtggtcagctgcgaacctgcttttccagattttgtctctggccatgcttgtccagtatactagtcacctagtataattgttctagtcacctaggaaattgtgttaggtactggaagacaccaaagacttttgaacaaagaaaggataatcaaaatggattaaacaaacctagagcatgttgcatagtttccaactttcgcagtgctcaggaattgttaatatgagtgtggggttttttattgttgttgttgtttgtttgtttgtttgattgtttctgagacactctggctctgtcgcccaggttagaatgcagtgggtgtgatctcggctcactgcaacctctgcctcccgggttcaggcgattctcctgcctcagcctccccggtagttgggattacag

SEQ ID NO: 102669 - DNA, 1388 bp, Homo sapiens
agattaatgaaaatttatacagggattagaaacacatcaaacaagaaaaggtacctgtaatgttatttaagaaaagttgtgttaaatgggttggtagggttacaataaaggcatttagcaatatcctgcatatgtcacttgactgtctccagtctggaaattatcttcgtgtattaggcaggcaggacttgccgaagtgcagaatggtaaactgcttttcttaagaggtatgtaaaggccctgtttcttctgcttgttcccgctgctgtgagaggttggggctagtccccttgctcacttctgagttgttttcccagcagccactgcacggctcgaaggatttgtcgttgagggtggagaaggtggaaggatgttgaacagacttttccctaatgagctgtgatgccagctgcaaaggcggcaaatcctgttactcccttcagctactctctgaagctgcagaggggcagtggtaactggtctccctgccctatgctgattagctgccttttctgctgtttttccccccttcctcttctgtcccagagcatcttggcaaagttcagatttctgtgctcacagctcaatgctcacagtgaaaaggaaatacaaaagaggaggagagaaagtgagaagaaaagagagaaaaggttggggtggaggtttttagtagagtcccttattgccttagtctaagacttaagctctgggttgaaaccttaagtggtaaagctttgtaagtagtaacctggatttccaaatagttcttgcagatagttttattggcacatgaacacagcaggccatatattaaaagcatttgaatttctatcgtttagaaacctccgaattttgaaaaggacacttcgcagtttttccacaaactatcattgtgaggaagatgaaataattgtaagataaatgttttcatgtggcatttactgtgtgccactgcttcatttaatcattacaacccttgaaaatagacacttttaatgtgaaaaataatttattgtagtaaacacattttaaagtggtcagttcagtaatattaagtagattcacattgttgtcaaagagatatccaaaactgtttcgtcttccaaatgccagccgcatatctgaaacaccatacccattaaaataatggggaaacattttaactgatcagccagcattttaactgtttggccatttcttttgttctgcaggattaaaaatagctctcctgtttctttccttggctgttttgatagaacattcttcctctgtatttcatcacaggatggtgagaccagggcttgtatttactgtgccttggtttatccatttggtactaactggggggggtttatagttactaaagggaaagagaaaaggctttactc

SEQ ID NO: 102670 - DNA, 1027 bp, Homo sapiens
caggatcgtctcgatctcccgacctcgtgatctgcccgcctcgacctcacaaagtgctgggattacaggcgtgagccaccgcgcctggccaagtatcagatatttttgttctaacgaattcagtctgttagggctgggaaacgatgcttgttgttaatgtgcaataaagttgtagacaaggtaagaaggagatgtaaatgctgtttttctcagggtggaagtctgcattctctaggggagagttattgctcgtgcactaagtataatgacttttccccctagaatacccaggttgtatttgtaaataaaaataaacataaaatataccttagaatattttcttccgttctctatttaggatgtagacttgggagtttgtaatttttaagcactgttgtattcgtaccttgtgtttaattccacattttcataacctggaattttttttcattatagcaatcagtttcttataaccacattttctaaatgtcattgtcaaataatccagtctggtagctgacaagttatgtctagcttttagctgttataaacatatataatgcatagctttgtacaaaattcaccaggttcctggaagtacatcactcagtcaaaagatatgcccatttaagatcttcattttaagcaaggcttaaaggcttttgccaggtttcccgtcacagaggtggttgtattttagccttaaatgatcagtgcgtgagagtgtctgcttggatgatccttgtgagccctctgtacacagactagtaggtactggcagcacaaacactcaccagatctcttagagttcacagttgtgacagggaggtccatgaatcattacagtaatgattatatagttgccagttatgtaattacaacagtaagtgcttagaaataaaaatacaacatattaacagagcatacaacctggggtaagaaagtgacttgtgaactgagccttcacatatgggctgttttctctcataggatattcctccgtggctgagttcatcctctaatttgt

SEQ ID NO: 102671 - DNA, 1047 bp, Homo sapiens
cctataatccctccactttgggaggctgaggcaggtggatcacgtggtcaggagatcaagaccatcctggctaacatggtgaaaccccatctcaagtgaaaatacaaaaaattagccgggcgtggtggcaggcgcctgtagttccagttacttgggagtcggaggcaggagaatggcgtgaacccgggaggcagagcttgcagtgagccaagatcgcaccactgcactccagcctaggcgacagagcgagactctatctcaaaaaaaaaaaaaaaaaagaaaaaaaagcttccctttatcagatgttaactctaaagaaacacatctctgaactgccccagtttctcttctctccagtaaattatccataagattgtctcctaaataccacaaattatataaattgttggacacaaaagttttaccattttgaatctcccttatgttttaacatttatgtatatccatgtgtattttacagataacaaaatcagcttttcgtgatataaagtccctagctaatattatttgttgaaaatactgaattcaatgaactgagagcaaagagcttatcttgcatgattgtgtactgaccggatgtgctcattggctcctcacaggagactcctgtgctgaccagaatagaaaaacaaaagcgcaaagaggaggaagaagagcgtcagattcttctagcagtgcagaagaaggagcaggagcagatgctaaaggaagagaggaaacgcgagttggaggagaaggtcaaggcagtggaaggtatgtgcagtgtccgcgtggtctggagaggtgcatgtctgtcgaccagccgtcctgtagccagagccaactcaagctaagtcctgccatgcatccaagttgtttccggcaatttcttttttttttttttttttttttttttttttttttttttttttttgagacggagtctcgctgtgtcgcccaggctggagtgcagtggcgtgatctcagctcactgcaagcttcacctcccgggttcacgccattctcctgcctcagcctcccaagtag

SEQ ID NO: 102672 - DNA, 1046 bp, Homo sapiens
ccattgcttgcatggatgccttcataaacgcagaacggcaagagctgggacgtgcgtttaaaatcctgtgtgtgtatggactgagagtctggtcctaaaaaaggatttgcggatgttgctttttttaagtaaaagatcagaatggcctcaagtaatccgagaagatagtcctcattcaaccttgtactttttcctttttcttcgactgccattcttctgttttcttctgccttgctccctcccctcctgcccaccctgtgcctgccctgccaccttcatctcccaccttgagctcagtgtgagtgaggaaacaggttcaattagtttacccttgtcttaaagcattccatctgtagaaacatcctaattaccaaaaagagggtggcacagggagcagaagttgcttcataatcctgctttggtggcctggttcttccttctctcacagtgatgaaggaacacgccatgtcagtgtctggagtgtgcttagctcactcagcctttgtgttcattgtagatcgagcgaagaggagaaagctcagggaagaaagggcatggctgctggctcaaggaaaggagctccctccagaactttcccatctggaccccaattcccccatgagagaggaaaaaaagactaaagacctgtgagtatttagtaacaacaacaacagcagtagcaactggtagcatttatgaagcattcaggcacttgccccatgtcatccttagaacagccctgttgggtaacatggtcaccatgtgtgagtgaacagggcgggccctgcacacacagacacgcctagctaccctggcctctgacactcttgctgccacactctgtgatacttaacactaagctcttctttcttcatcccctcaatttaatgaaatcagaatctgattattatgtaaattagctccttggaaatgtgaatagaagtttattctttttaaagtaattacttcccgtgacagtactaggtaccatttgtcttgactccttactaaactcaagaggcagatacacattcagtgttcctgag

SEQ ID NO: 102673 - DNA, 1261 bp, Homo sapiens
ggatcctcctccctcagtcccaagtagctgggactatcggcatgtgcgaccatacctggctaatgttttctttttggtagggacgggtgtctcactttcttgcccagtccagtcttggaactcctgggctcaagtgatcctcctgccttggcctcccaaagtgctgggatcacaggcataagttactgtgctcagcctggtttgacttaatagtcctagaggccctgtcccaaccatacaaccttgggcatcttacagatagaaaccacgtcttcttcatcttgcatccatagctctacaatataatgtgccctaaaggtgaattaaactcatagattacccaggttgcatcttctatttattagaattgtcttttgtgacctatagttctgtttctatagtttctataaactatagtttctataaacaatttctgtaaactatacctagaagtcaatcctcctgtcttcctatagagtataccaagatgtctgataatttagagaggtgtttccatcgggcaatgatgaaacattttcctggagaagatggagacacagatgaagaattttggattcgagaggatgaaaagcgggagaaaagacggagtcgggctgggcgaagtggtgggagccatgtttggacccgctccagggacccagaagggtccagcaggaaacagcagcccatggagaatggaggaaagtcgttgccccccacacgccgagcgccctcttctggggacgatcagagcagcagctccacacagcccccgcgggaggtgggcacttccaatggccgaggtttttctcatcccctgcattgtggtgggacacccagccaggcaccctttttaaaccagatggtaaggaatagagtggagactgttgcggtttctcctagtttgtgagttcatagtaatgtagaggccattcagttagtacttcctgcaaaatacttacgtgtatgtatggaatctttttccctgtgagtcctttgttcatgtgattttattttgtttactttttagtagagacacagtgttgctatgttgcctaggctggtctcaaactcttggcctcaaacagtccttctgcctcagcctcccaaagtgctgggattataggcatgagccactgtgtctagccattcctttattctaaatcctcctttttctcaatcacttgaattaggtattctcaatgtgggcaaaaattgggattaaaaaatatgtaatctggctgggcgcagtggcccactc

SEQ ID NO: 102674 - DNA, 1051 bp, Homo sapiens
aatacaaaaattagtcaggtgtggtggcgctactcagctactcaggaggctgaggcaaaagaattgcttgaacccaggaggcagagtttgcagtgagctgagatcgtgccactgcaccttagcctgggcaacactgtgagactccgtctcaaaaaaagaaaaaaaaatgtaatctttattgtataaagcacaggtatacatgtagtacatgaatgtacagtatatctgcaacattataagatttcatggtagcaggcaactggggagaaacggctaaaatggatccttgggaggaggagtaataaaaaagagattgagaaacactgatttaatcttgtatctcctggagagggaagttgcttcaggctcataggcaagccctgatgcgggtgagcacgtgtgttcacagtctccctgtctccagccgaggtttagtcgtctgttttattttagtagaacgttcatcttcaggaaaacccttgttgtcaacctaaagtctgtgcctttcctttttcctcttcttgctttgttcaatgtgctgcagaggccagcagtaccaggaacatttggccctctgcgaggatcagatcctgccaccttgtatggctcctctggagtcccggagccacaccccggggagcctgtgcagcagcgtcagcctttcaccatgcaggtaagcagcctactctggaggtgcaggtgcagggggtcccacaggtacgtttcagagaaaaagtctctttccaggttaaatgttgttcattgcgtcctttcccaaagagtctgttcccatagagaagcatggcacaaagtgtgccttattctgtgagtctgtaactgtgctgccttttctcgttgccagcctccagttggaattaacagcctccgaggacccaggctaggcacaccagaggagaagcaaatgtgcggggggctgacacacctttctaacatgggcccacaccctggatccttgcagcttgggcagataagtggcccaagtcaggatggaagcatgtatgctccagctcagttccagccaggattcatt

SEQ ID NO: 102675 - DNA, 2002 bp, Homo sapiens
tgttctttctggttgcatcccattttagagcttcccagcatggccagtgattctgatgacaaccatcccctcccagtgtgtttcacgtgcatctgcctagagtccgtgagccacaagccgtctctcagcctcttacgaatcgggcaacccacggttaaggacatttccattctccggcccactgtaagagtgaatgtagaggtgctaggttttacctttgtgtccgtgaaaggagtgaaaggaagtgtacagggaccccaatgtcctgccctctttcagggactcaaacaatttccaggtggggcttgaatcaccacacatccaccttaatctgactcaggcatgttcttcacattaatactgtcatttcagctactgagttattttttctcctcttttttttttttttttgcagcagagccgttgcctggccttgaagagaaaccaccaggtgttggtacttcagagggggtctacctcacacaactacctcaccccacacctcccctgcagactgactgcaccaggcagagctcaccacaagaaagggaaacagtgggcccggagctcaaaagcagctcctccgaatctgcggacaactgtaaagcaatgaagggcaagaatccctggccctcggatagcagctaccccggcccagccgcccaagggtgcgtgagagacctctccacggtggcagacaggggcgctctatccgagaacggagtcattggggaagcatctccttgtggatcggaggggaagggccttggtagcagtggttccgaaaagctgctctgccccagaggcagaacgttgcaggaaaccatgccatgcacgggacagaacgcagcgacaccgcccagcacagaccccggtttgacgggaggcactgtgagccagtttcccccgctgtatatgcctggcctagagtacccgaattcagctgcccattaccacatcagtccaggcctgcagggtgtgggccctgtgatgggagggaagtccccagcatcccatccccagcattttcccccaaggggctttcagtctaaccacccacattctggaggctttccccggtatcgccccccacaaggaatgaggtattcctaccacccaccgccacagccttcctaccaccactatcagcgaactccttactatgcctgtccacagagcttttctgactggcagagacctctccatccccagggaagcccaagcggacccccagccagtcagcctcccccaccaaggtccctcttctcagataagaatgccatggccagtctgcaaggctgtgagacactgaatgctgccttaacttctccaacccgtatggatgcagtggctgctaaagtcccaaatgacgggcagaatcctggtccagaggaagagaagctggatgaatctatggagaggccagagagtcccaaagaatttttagacctggacaaccataacgcagctaccaagcggcagagctcgttgtcagccagcgagtatctctatggaactcctccgcctctgagttcaggaatgggatttggttcatctgcatttccaccccacagtgtgatgctgcagacggggcctccctatacccctcagcggccggccagtcactttcagcccagggcttactcttcccctgtggctgccctcccacctcaccacccaggggccacccagcccaacggcctctctcaggagggtcccatctatcgctgccaggaagaaggcctgggtcactttcaagctgtgatgatggaacaaattggcactagaagtggaataagaggacctttccaggaaatgtacagaccatcagggtaagattgcattcaggcttttccccctaaagagagaacagatgtttattttatgtatttatttttgagacagagtctcactttgtcacccaggctggagtgcagtggtgtgatcatggctcacggcggcatcgacctcccaggctcaaggatcctcctgcatcagctgt

SEQ ID NO: 102676 - DNA, 1012 bp, Homo sapiens
tccaatgaaggctcatggatttgcatttggctgccgtgtctgtttagtctcttaatttatagcagttgtcatatctttgttttgttttccaaagagtccaggccagttatcatggagagtgttccagattccagattcatcacacagtctccttgtgtgtagatgaaactcttgtgccaggtgcagtggttcatacctataatcccagcactttcgggggctgaggcaggaggattgcttaagctcaggagttcgagaccagcctcggcaacatagtgagatcctgtctctagtgaaaataaagaacttagccaggcatggtagcacacactactcaggagggtgaggcaggaggagcacttgagcccagaagattgaggctgcagtaaaccatgatcctgccactacattctaacagggtgacagagcaagaccctgtctctaaaagaaaaaaaaaaatagattaaacacttttgtcaggagtgcagtaggtggtgcgtgtgcatgccacttactgccccagggggcacagaatgtcgagttgtcccagtatggatgattccaggcctgatcaccggggtgatgaaggcagtaccctcgtgactacagtgtcttgtttcttctgtcgttaacacgtcttcattaattcttcattgcttctttctcgtggctgtagaatgcagatgcacccggtccagtcgcaggcctcgttcccaaagacccccacagcagcaacatcacaggaggaggtgccgcctcataagcctccaacacttcccctggatcaggtaaggatcactaaaaattagagctgttcttcttcctccaggtggtaggaagtaagtatatgacaaccttgctgttctgaaaaaatgttttaaggtatcctgtggatacaggaactttgcctgtatcgtgcttccttggcacttggaaaaagagcaagaggcctcggaagtcacctctcacatgtctctttttcttattgtgatatggaatgcatacctatttg

SEQ ID NO: 102677 - DNA, 1897 bp, Homo sapiens
tgatgacttttccaaatcctgagacacttttcagggaaaatcactttaaacttgggggagggggtatactcaagaatggagtggtgcttttaaactttgatgagcagctaaactcaggtatatatttggggaagggactactcttagtattaatggttttggagctgggtccagtttacagaattttcatgttgccttttaaaataatttttgttggtggtgaatgtattgtacataaagtgggaagggtgggtggggatgcggaagaaatgggggtcctaactggtgggcacacagcactggagtgatttttatctgtttacaatcatgtcacactgaatacttatgggagccggagatgagggtaggaaaggtttgatcttgtaatgtgtcactgtgtttccttagtggccagccagccttcagaatagctaaaggccttccttccttccagtcagcctgagagagaacacctgtcccctaagcacctggtgtctccattggaggcagactgctctcaggagactactagaagcttcagcccggaagacaggctgctctctcatgctggtggcccaaattgagaaagtggtgtcccttcctgattttgccaccagccctaccgaatagttgtaaaccagtatcaggaattgggatcgctagagtgtttcacgtattagaagatgaatcgtcctcatcacagacctccctgtcaggactgtgatctagaaggcatcacacacagctttctggcacgaatcacattttgtggaagtgactactcaggtttgtatattttagtatcaataaagaattgcacaggtttgaataggaaaaatgtattctatagatttacagtttgaatttaggaatatttcagtatatatagtttttattcgttttaagtgaatcatagtaaaatcagtcatggtgatttaaaatagctatcaagaacaagttcttggaattatctgttgtatctgtgataggaaaccattttacagtattaaattactttattacagttgtagagttgaattacactggattctccctcgttagcattctgtatttgattttagctgaaaggtcaccaaagttaggacccatgttttaaacttttgaatattccacaaaagaaaaaactaaggaaaatactgaaattacaggtctttgtaaagaatagcatatttttaagcatgcttttgggatagtagaagagtctctatgaaatattaatctgccctagtttcttataaattcagctgtgggaggggccagtagagtgtttccctccaattccaggattcctagtgaagcatggaactgtcgtgtttacagtttgctaaacatatgctgtccgtggaaaaggaagctaatcggaagcatccatgatacagagaaatgaaagccaagacaccagttccaggatgatggaagttcatatccgtacgcaaatgctgaacctggtgctgctgcctagggctcaggcagatttgagagttgagtagggaacacaggtgcctctaaggtataatgcacaaaaatacagattttctctcagagaggttttaattttaaatttgatgtatttgcaagtggattgagttttgagcctgtgttctcactggatcctaattcttgttagaaacctatcactggcataacctggtttagaagagtgaagaggacagaaggattgtggatgggtctgccctttagctagtatccgctaacatggggcattactacttcagtttctgtgtttgtgcagaagcagggaggaggtaaaaagctagtttggagctggttagacctggtctaggcccagagaatttggccactgacagcctttctcttttcctggtaatgctggtttgaatcagaggcctctcac

SEQ ID NO: 102678 - DNA, 2275 bp, Homo sapiens
aggtaatcctgtctcctctctctcccagtgaccgccccaatcagctgttgctagagcgatgctgtgaacgatacaggaaaagtcagtaaatccctttatccttaatctcccttcttggttttcgacagaaaatattaaggaagagcaataggaaatagaactactgtattataacactgtgaacaagaacatcagcagcagcagaattgtcagccttcctgcgtcctgtgtgggaatgtgtccatgccttataggtactagtgcttcgtccattgtccagggagtgtcctgagctttcactggtctttgaagtgcagatctgctataagctgtctggagctgcaaggttgcaggaatccacaggagcgtgagctgctgtgaacccctagcccacccatccccaagcaggatcttcttctcaccttttcttcctcctctagcacttctctttccaagtgtcttaagcagatgcaatgtcttaaagcagatgcaaatgcatttgccatcttctccattaggaaaatgatggttatgtgatatgttatatttaggaagtagtgtgtaaggtatcctgaaaaggtttgctctcaagctagaaggacatttcaccctgtgggtcactgtcaccttgtcagcgtgccggctctcagtggtccccaggaggatggggatagctgagatcgtggagaatgggaaataccattgcatctctttgatttaacactcatggctcacctttagtagagttgttaataagttagaaacttgtgtccctaaggcccaagagaaaagatgagcttcttgggaggattctgggtttgttttcccctcagaattaaaaaatagtttttaattcagctactttttcccctcagttaaaaggtagcaggagctattggctgaaatttgttacagtgaatgaatgtggagaataaataagaacaaaccctgtaggattcttgttgacgtaactttccatcccacctctccgcctctccatcaccagccttcatcaggttggtttagtttacctggccgtacacacgagctgctcatcaacagttcgtatcttctcactgagcccgggccagatgctctcagaaggccttctcatgctcctcttcgttaggcttagtgaaaaccttaagacctgcagtttgtgcccctcagttcagtcagacctcagctttaaatgtcgatttactctgtcttgttccctgaaagtgtttcttgtgactaagcatttggtgtcattatcccatgccatttatctgctgtatagttactatattatttttgctgattcctactgctggcagatgccatcccaggcccacaaaatcccagtgttgcagtcaccacagctgtcagaaacaagtttgcaatccatacttcttagttcaatttttttttttaatggacattcaaatctgtaaatactacactgctcttaagacctgatttgaaatttcacaggaaggcctaatcctatagtcacaaggtaaggacagttgagtagtgtaagaaccccaccctgcttgcagagaaccttggttttcatagaaaggaaaggctaaaggttttctagcattgttgcccttctttgtctgtcagtcagttcaccctctgtgattctccatggacccgcattgcagaaaatcagtcccatatattagtgagccatgtactgcccaatccgggggctcctggggtgtggtgtgtccaccagtgactctccggacactagcttcagtaaggatacttcttatttcggttgagaatgcagaggcttttattcgtggactcacatcactgcataggcacaaagaatgtgattgccatttgctgcgtgagaaaaagctgggctccctatttcttttttgggttggactctgccgtgcagccataggacaccaagcctcacgcactctccccttgggacagtagtgtttgggtgaatgttactgcatcccgttttttttcttttctttttttttttttttttttttttgagacgaaatcttgctcttgtcccccagactggagtgcaatggcacgatctcggctcactgcaacctccacctcccaggttcaagggattcgtctgcctcggcctcccaagtagctgggactacaagcgcgcaccaccactcccagctaatttttgtatttttagtagaggcggggtttcaccatgttggccaggctggtctcaaactcctgacctcaggtgatccacccgccttggcctcccaacatgctgggattacaggcg

SEQ ID NO: 102679 - DNA, 1026 bp, Homo sapiens
gtttctccctcttgtcctgcacaagaggactaactgaactctaacgtcagaacggctgacgagcagttgattgtccttgcttgtgttgttgacaggggtgggtggggtgggagcaggggtatggatattgcataagttattgaaatgctgacccccgttcaggaaaccatgcagccccttcccttcccttcccttcccttcctttcccttccctagccagggctcaggtacctcactctcctgccttgtgcgtagctcctggggccccggtcagtccccagcagccttggcacacagtgtctggagcctctgctcctgctgcaaaagcagaaaccatgtgaaccttctggccagtactggaaaggggaatgctatttatttttatattgtgtatattttgtcgtggtctgctgattccctgtttcactgagagcgacacttacctcaatagttagttcaatattgtgtgttggataattttttaaaagaactttttaaaaagctttttgatccttggaggtctgtagatttatttccatatgaactggttattttgtataaagtacatgcttaaaatagcaaggctcctctgtgtgtgtggtgtgtctgtccatgtgtcatttccatatcagggcaaacccagacttccatcaggacgaaggcgtgaactaggccacaaggccaccagctgaaatgccacccctcgtccattctcatgcatccagaatccacggaggcggggcacgggtcctgtgcatgagacagaggaatatggttccagagaacttcaaaacagtcatgtactgactggcagttctaaaccatgtcagggataaaacgctcctcacagccgatccttgcgaagctggcccggccgtcagcatctcactggtaaaggcgtccgctttcagaaggttactacacctgaggtgcacgacttctctccttgcaggctttagggtgcctgggatgggaaaggagtataacagtggggcagcggggcagctccagcctggagcccgctgt

SEQ ID NO: 102680 - DNA, 1074 bp, Homo sapiens
aggaggcggaggttgcagtgagccaagatcacgccactgcactccagcctgggctactggaataggggtatttaacagatgccagagaaattagggacaccctaatcccagggccactccatagcatagctaacagatgtgataatgtttccacccacggagagcacttggctggagggtgagcctccctaccctgaggctgtaccaagctgctgcagttccagccccggaagttccctttcgcaggcctatgctaatcaaagcctatgacttgacaagattcctggcagcagtaaatgcattagtaacaggcaacaaaggcgaaaccattagccaggcaaggtatgaaaggagtcatagcaccatgaaaaccccaaacctggcaccagggccgataactgccccccaaggcaacccacaagcctaagtgttagtcacgctacagatatttgttgagtgattactgtatgccatttgcagttctaagcagcagggacacagctggggaacaaagcaaggccttgccctccacagaattgaattcctactggttccggcactgatgggaatagacttcttttttttttctttttttttttgagacggagtctcactctgtcgtccaggctggagtgcagtggtgcgatcttggctcactgtgtaacctccgcctcctgggttcaagctattctcctgcctcagcctcctgagtagctgggactacaggctcacaccaccacgaatggctaatttttgtatttttagtagagatggggtttcaccatgttggccaagatggtctccatctcctcacctcctgatctgcccgcctcagcctcccaaagtgctgggattacaggcttgagccaccatgcccggcctcctctaccttcttttctgaaggaatttagagggtgtagggggtattggggtagaaaagatcatctaagtgctgggatgcagaacaatgagaaaacacatctggaactctttggaaacaaagtgggaaaggactagaaaagcagccagctggaagacagaggctccctgtcaccgccttgggatgcagcatct

SEQ ID NO: 102681 - DNA, 1037 bp, Homo sapiens
gccagcagccaaacttctcttccctcccttctctccttacctacccccagcttctaacactctcagctgggggaataatgtatcttcctcctgctgatccatgtttcaaatgtaataactgcctctggtgtgtttaatcacctgccaagccctgttaaatcttgacagaaaccattcgcatctcttccctcctgtgtgcagactgtcatttctcctcagtggccgtgccgttttacattcccaccagcggtgcctctgttcttttacctgggataaatggaggtatccttgcttgtatagtctgttgagtttttggatacttgcttcatagttcctagtgacacctctcattgtgttctatacttccaggctgcagtgcagaaggcaattcctatgtacaaaattgccaccaaaaacgatgttgatgtccaaattgaccaggagtcctacctgcctgaagacatgtaaggagtattcctgctgctaacagctaccttctctccctgggagagtggcctttataccaggccttttttaaatggtattttcaccatttaaacgcactcttagacacaaggctagagctgtggtgtattctacttgcagccgttcctgttgttctcgcagtgctctcttgctctcccttgttggctggctaaatatactctaaaagtctagtttggccaggtgcggtggctcacgcctgtaatcccaacactttgggaggctgaggcaggtggatcacaaggtcaagagatcgagaccatccttaccaacatggcctagggagctagactccctatcataccagtccaccctctgctcatagtccagtcctgtctctactaaaaatacaaaaattagctgagcgtggtggcgcacgcctgtagtcccagctacccaggaggctgaggcaggagaattgcttgaatccaggaggtggaggttgtagcgagccaagaacacgccactcactggactccagtatggcgacagagcaagactgcatctcagaaaaaaaaaagtctggtttatgg

SEQ ID NO: 102682 - DNA, 1476 bp, Homo sapiens
ttaatagcttgcttttcaaagttacatcgcgcgcatctttccatgtcagtcacttgtgtcggtttctgaactgatggttacctgagctattctctgctaggccgtggactccctgggagcagagacggtgttacatgcttccttgtacccagcacagcccctgctttatctcagatctcagggaatgtgtgttgaatgaaaatccagcaataaaatgtgaggcagctgggcatgagccaggatcagcctcacagtgggttatgagccgactgcccagatgtgtagataacttttatcttttctaatctttgtaggacctactaaatgaagcaaaacagagactcagcaaggtggtaaaagatacaaccaggtaccaagtgctgctggatggactggttctccaggtaccctcatagaccagatctactgttgatagccacagttctgagaaaatttagaatgcctattagagaccagctctattttttcctgctttctcatttctctagtttttttcctttcaccctttttttttcttttagcttttttactttcactcttgaccatatctaaaatgtgtgctgcataggaaaatagtaaatctgtctgcttggataagacttccaggcctactactcaattatgtagtcttacatgacttaagggtcaaatttgcttgcaatggctagctttaaattcccttaatttgattttgccactaaaatacttgctttagatttaggattcagaccaaacactgtatatgttttaattgtttactgctgagctgtgaatccttattttacttatgttaattacaataatatttgtcctcagcttggttgatgtaatataagatgtctgcatgaattttgtttctatcaccaaaggtttgggttcatttatctggtttgggatagatagatctttccatggtcttatgtgatatatgccatctgttagtggaacttaccaggggaaatttttccaacctaaatgaaagaactgtagaagcatcttattttactgttgctttattttattttatttttatttttggagacagagtctcactctgtcagccaggcaggagtgcattgacatcatctctgtttacttcaacctccgtctcctgggttcaagccattctcttgcctcagcctcctgagtaatctgggattataggcacataccatcattccaggctaattttttgtatttttagtagagatggggttttgccttgttgcctaggctggtctcgaacttctgagctcaggcaatccgcccgccttggccttccaaagtgttaggattacagacctgagccactgtgcccgacctgtttctttattttatagtttgcattttctactgactgtatctactatttcttccagggtttgtaccagttgctggagccccgaatgattgttcgttgcaggaaacaagatttccctctggtaaaggtaaaga

SEQ ID NO: 102683 - DNA, 1073 bp, Homo sapiens
agtagagacagggtttcaccgtgttagccaggatgatctcgatctcctgacctcgtgatccacccgcctcggcctcccaaagtattgggattataggcgtgagccaccgcacccggccaggatcttctaaactttcaagttctgtgtcatatttattggcccaccagtaagctaatggattaagtttcgaacgtgtggtaatttttttcatgagcagaatattctacccaattatatcctttagtaacttgtcggttactgttacccttgacgaaatttttagtttcctagtacgtcatttataatgaaaattgctgatctttccttttgaataaattagaatccttgaaaatgaatcacaataaattttctgttttatatatgaaattagtgttcataagcaagtaacgcaggtcaccagctgtttaaaactgttaatcaaaacttgatgtaatgaattaatattgactaatttccctctaggcagaagaagagttcaacatagagaaaggtcggcttgtgcaaacccaaagactaaagattatggaatattatgagaagaaagagaaacagattgagcagcagaagaaaatgtaagtagatcctggttgcagtattaagctaagaagttttctgaagtcatgagcaggcgctttggagtcaggcatatataaattcaggtcttaactcgaccacctactactaatctgacaaattgtttaacttctctttcttcatttgtgaaaattaaagcctgacaggattattcaaagattaaactgcaggctgggcaaggtggctcacgcttgtaatcctggtgctttggggaggccaagggaggaggattgcttgagcccaggagttcgaattctttctctacagttttaagttgttactaatgctatttttcaataccgttttgcagtcagatgtccaatttgatgaatcaagcgagactcaaagtcctcagagcaagagatgaccttatcacagtgagtaattagcccctattagttataaaattattacatgtttattcatttccctgttgtaaattactagttaacattaat

SEQ ID NO: 102684 - DNA, 1014 bp, Homo sapiens
gtcaagcgatacacccgccttggtctcccaaagtctccggattgcaggcgtgagccaccacgcccggccaacaatcatgtacccctaagcccataaccctgtgtaattatgcgaaaaattccaataaaggcacattctccaatatacctaaccagtactcctcaaaacagcccgactaatttcagatagaggaactccttatcttttcttcctcctacccaagatcccagtttaggaaaaaaataccggtcaggtcacgagtcagcgacgtagaaggacccgaggacgcgcccacaggccgggacagggcgggacttcctgggcgtcgctctcttcccattggctgagaagggtcatgaggatgaactgtgcagtcacctggcaggaaccggaacccgcggttataaagtaaaggaacccgagatctgcgcaggggttccctttgccgatttctctcacctcacctttcaaacctaaactcgagcctactgttcaccggcctagcattgctctcgccatggctctcagcgatgctgacgtgcaaaagcaggtgaggggcttggttgggtcttacgaagccgcggcggcagtcccggggagtgggctggagcccgcctagggaaggccgcgggccttgagccgcccagatgccgcaggaaggtcccttgctccaagtcaccagatccaagaggtcggcctgaggacggagatttgccccgcagctcatgtgacttttgctcgggtcttgggcactgcccgcttgcctgcgcgctgccttcttgaacgccctggctctttgcctcccacctcagcattccctgttttccaagggtattcactgtgcctagtcggacagagatctgtgcaaggattgaaaacagccttgtggccaggggcagtggctcacgcctgtaatcccagtattttgggaggccgaggcggccggatcacctgaggtcaggagtccgagactagcctggccaaaatggtgaaaccccggtctctactaaaaat

SEQ ID NO: 102685 - DNA, 1055 bp, Homo sapiens
aatacataaaccagtaagtcatctagtattatcaagtattatgtactgcatgtaattgtatgtgcagtacttttttttttttttctttgagagggagtcttgctctgtcgccaggctggagtgcagtggcttgaacccaggaggcagaggttgtggtgagctgagattgcgccactgcactcctgcctgagcgacaagagcaagactctacctcaaaagagttgcacaagacattttggtgtgaaacaactgttaaagtggcatgtaataaactttaaactgaaaaaattacttttttgttcttaggttttacacatccataagtagacctttttggagcctcaccagccaattcaatggcgtcctcttctactgtgcctctgggatttcactatgaaacaaagtatgttgttctcagctacttgggactcctctctcaagagaagctgcaagagcaacatctttcctcaccccaaggtattatctttggcttatggtggttatagtaaattgtaataaggactttatatataaaagtatatgtatctaatttatatgtgtggttatcaaatagtactaataagcctgtaagaataacctgttagggctgggcgcggtggctcacacctgttatgccagcactttgggaggctgatgtgagcagatcacgaagtcaggagttcgagactagcctggccaacatggtgaaaccctgcctctactaataatacaaaaattatttgggcatggtggcatgcgcctgtagtccagctactcaggaggctgaggcaggagaatcgcttgaacccgggaggcagaggttgcagtgagctgagatcgcaccactgcgctccagcttgggcaatagagtgagactccatctcaaaaaaaaaaaaatatacacaaaaaagaataacccgttatgccattctttccatttccagaagcaaaaaacaaaagtattttttttcattttattctttttttttttttttttttttttttttttttttgggacagagtctcactctctctctaaggctggagtgcagtgg

SEQ ID NO: 102686 - DNA, 1036 bp, Homo sapiens
ctaggacttgggaatctataatttaatgtgttttataggtaatttaaatgtgtttccagtttggggaaccatagatttcgaaagtattttgctctgggagctctagtccattcaacttggctaaacttgttaatcttctattcactttgatagctctgaatgaattttagggctggaatataatgattactgactcacttgacttcatttgaaacaagtgggtgggacttagtgtgctaaagtctgtttatctttgaaatatttgtatcttggtttatagtccagaatttatgcagcattggccccactgcgtagctctgtgctttagaaaaactaggtggagaggattaattaaatgcaaatcactgaatctctctgtgtcactggtcagctaaataaatagcctttgtgtcctaacagcagcagacattttctggtttaggttttccacatggtttattatgaagtatgacaacttgtcatgtgtaatcagcatcacattagtctcaagagaataagctctcctttaatcagctgcttttctttaatctggtggggtgaggcatatggtaaccatgacatttttgtcatttgctttgtgggatggtggtggtattgatggtggtgtgattggatgtgtgtgggtgtatgtatgttttgggtatgtagattttccaaaaaggggcagatgacagatggcagataaagcattcatgtattccttgtcactgtgcgtcaaaaattatagtcgtatgtcctgggagtcaataataattctatttaccagaatatgtagtttctaatgttatttctctgttatttattagaacttgggctagtcattaaattctctgaagtctcatattctttatgtaatgaggatagacttgacagcctttacagactataaacctgtaaagttctatgattcagtcactgattaaactctcataagtatgcaagtaatagtggaggtcttattctttccattcctagttctcagtatctccatcgtgactcatcgccataaataaat

SEQ ID NO: 102687 - DNA, 1034 bp, Homo sapiens
atgttttgaagtccagaacatcccgggcctttaagttgatacacaggttagcaccactggttcataagccactccttacctgcttctacccgaggcaaaatataaacagttttttgtttgtttgtttaatagtgtaagttttcttattgaggaaatgcctaatggattcttctttatagccctatactactccatcattgttaagaaggagttttcaatatattttgggctggagtgcctttagaatgtcaagaagtaaagatattatgtgttcattgcatgcttcctttcagattttgatagagattcccccagggctgctttctcttcgtttctttagaagccaaggaatattagtttgaaatataaactcattgttttttgtttgtcctcctgcagaagtattttgtcgtccctcagttatttccttggcagtctactaacaagcaaatggaattggtttcatttccttttgcattccttttgcaggcatatggacctcttgatgttttaaacaaaagagattgcatgcagatggctacctgaatacttagtttttttcaatatgcatttttttttaagggaagacagggactctagttagtttctgttgtaatttttgacgacttttaagtattgagccacatggttattaggtatagattgtaatggcatcttttatgtttgacttttgatgagttttacaagatagctcttagtttttaaaagttcttattttcaaataataaaagcacatggtacaaaatgcaaaaaagtacagaaagatatgctttgaaaaataaaagttttctctcatccttgttgccagtcacctagttcccttccttttaggcaaccactattaccaatttcttgcgtatttttctggagaccctgtaggattatatagacatatatatatgtgtatatgtttttattacacaaatggtactgtatgtattcttctataacttgccttttttcacttaaagtaaattgtggtgattgggtagtaagcaatttaacaactatat

SEQ ID NO: 102688 - DNA, 1004 bp, Homo sapiens
cactctgcctttttacccggcgaatgatgaactgagaaaaggattagaaatcacaagatttgtttcttgccccagctctgccaaatactagccctgtgttttggaaggattcatttaacttctctgaacctcagtttcaactacaaaaagggaagaatagcttctctgtctcacaaaaataatgatgtgaaagtgttttgtgaaaatgtcacacttttacaaatgccaggttttcacatgcgtctctgaagagtgtggtttttttccctctccttaagtctgatcaccatttcctcttagtttcagttttgacttttatttgccctgcagcccggtgagggcacagactggttcatgtgctgtgattctccctgagtcatccttgctccctccctcctcattctcttttcatttcctgggcttgtgttgctacgttagaagtctgtctgtctcctggaaagggcagagcaagtccactgtggtaaggcttgtattttactttctccgtcgtcacatgataaatacttcttgtgaaagatttacttttagattccataaaagattactggagggaatgtcatctgtctattgtaatatttaagtattttgaataaaattaatctttgtcattttctcttgacatgaagcttctgattttagaataggtttttgtttgtttaatctaggatatttaaagactatctcttggaagcttttaggttaataatttgttagaatagttttcatattgtgggaggtgacacacagggatgatctgaaattaatgaagtgggttgcagctaaaatcaatttagtaagagtaagtactgttttgggaaaatctgcctgctgtatatgtgggtgtggatgtttactgtgttgtactctgaaatgtgttttttgtggatcttcctcatcaagttgggtggaaaattacttctctgtaatttcttcagcactctccattttcttattttaggttaataatgatctgagaggcgcat

SEQ ID NO: 102689 - DNA, 1034 bp, Homo sapiens
aagggtccaaagcagtgatctgtttccattttgcgacttcgaggcctcagaaatataaaactagctggttgatcccggctagttttatatttttgagccctcaaagttacaaaatgtcagtggagcctttgtgtgttttgtgtcagtggagccaaagagatggatactcccaacaatacaaatattttatatgaagaatgatttagattgtcagaatcgttctaagactacttgtagatgttattctaatgtaagttgtaactaacgtattatccaaaacagctctttttcttgacagatatatatataaagtctgagaagtaatgatagaggtttgttggcataaatcttaagggaaatgagtccttagaaaatttaccaacgtagatgggctttggaattttgccaaagcttcttcagatggaaaagttaagttcataggagctcagctcagcagcagctgtgtctcagaaggtaaaatattgcttgagggggcagaataatttgtaactgatgtgaccccctgcccccaccaaaaaaaaagtgaaacaaaaaaatacaatcaatatagacatcatgatgcagccaatttttgtaataggtctctgagcaattgtcaacctgatttttacttaggtctaccaccaaagtaaagttatgtttgtattttattttacatttattttgatacgttcctttacttagttttttacttagttcctaccaccaaagcaaagttatatttgtattttattttacatttattttgttatattccttttatctacttaggtttcttctctacttccctttttaattgaagagtttaatgcatgtatctgtgtgtttgcttgaaaaaaaacaccaagtataacatgttctatctatgaatacttctggccattaactcaaaaggtactatattacagacagaaaagcaccagaaagcaatcagggacttcatctaagaggtaggacagcatagttggtaaaaatacagaccctggaggcaaactgcctgggcttgaatccca

SEQ ID NO: 102690 - DNA, 1046 bp, Homo sapiens
tagatattttgatagtttgtgtggtccagactcagtgccgtctaggagttcaggaggaataagagaggaagattaagtacagtggaacttaagccagaccctgctggagccggatcagggtcttaaactggggtccatagatgtgcttcagggagtctaaaattccctctaaaatggtatgctgctttgtgtgaaagcacagttttaaggcagagaggtcttaatacctttcatcatatttgcaaaaccttttctgctcccctaaaatgttaataccagtatctatgtgaataaggagacagcgcttgggaatttagtatggcatttgtagggcacaatgagtaacctgccaggagaagcctcccctcccataggaaacacctagcacacaattacagagagatttgggtgaaatgatggccctagcgatagagaagaaagattgactttacctcctctaatgcccttcactgtgctgtagcctttcaaaaatttatgtttggtttcctaggaaaacattaatgtgctcaagaagggataatgtatcattctaaatattgtatgagtttgccggcttgctttttaactgagtcagaaaattataaatagacttcaaatgtagaactactttattttgtaacattcaaactgagcctttatgtaatggccggatggtaccttagattcatcttttctcctctaagtaattgatggtgtgtaagaggtgccatattgtgggacagggtcttgaattcatgtctcagcaagactgagggggaaacatgcaccttttatgagatagaggctgatagaggcaatgttttatatcaagaaaggtactgatattttacttctcgttcattggcctaatctttcctcctccagctccagctttgcctttcttcaccccctgtcctatgctttggcatacagaagagccagtagtctgcatatatgatgatacttttcagcaccatgtttttgtttatgcttttccttctgcctggaatatcttgctcatctttgatctgctggttttctctttc

SEQ ID NO: 102691 - DNA, 1134 bp, Homo sapiens
ggaagaggctgctgtggcttctgtggtcttgccagcgcgggagctgcaagaggcacttcctgaagccccagctcccttgcttccacatatcactgccacctccctgctggggacaagggaacctgacacagaagtgatcacagttgagaaatccagccctgctacatctctgtttgtagaacttgatgaagaagaggtgaaagcagcaacaactgaacctactgaagtggaggaggtggtccccgcactggaacccacagaaacgctgctgagtgagaaggagataaacgcaagggaagagagccttgtggaagagctgtcccctgccagcgagaagaagcccgtgccgccgtctgagggcaagtctagactgtcccccgccggtgagatgaagcccatgccgctgtctgagggcaagtctatactgctgtttggaggggctgctgctgttgccatcctggcagtggccatcggggtagccctggctctgagaaagaaataggaggcttttcagaagagaaagacagaaggatgtaaggttggagttgtattggctggaatttgaacctccagcagctgtctggacatttgtggaacactctgggataattggggacttctgctcaacatggcagtggcatgttaggcatgttagggcttgaggtggggcattcacattcatctgactgtaaatcccaagggcctccgctcatgctaaattgagaatcttaggggtaaagcaccccctccaggaccgggtttctcagccttggcactagtgctgttctgaccattctctgtgttggggctgtcctgtgtgtggtgggctccacccactagatgccagtggcaccccctcccagagatgacaaacgaaaatgtctctagacattgccaaatgtcccgtgtgaacatcccctattgagacccactgctttagcgagagagggtttacttaggaagaattgggatagaaattcccagctgagagaacttagctgtgggctcctcagctactgacttcttagctcttaatccccttagaatttcatctttctcgatgagcaggctctgcacccactctttttttgccccccgccctcatcctggagtgtgagggtgctcgcccgtact

SEQ ID NO: 102692 - DNA, 1018 bp, Homo sapiens
ttcaatgccagggtaataaaccaaaatagtcctaatcagtatatgctagttgagcatcggcataattttctttcctctggctgatcccagccctaaaggaagggtagacccgtgtctttccagccctaaaggaagggtagacccgtgtctttccagccctaaaggaagggcagacccgtgtctttccatgcccgagggccacgacgtcactatgcagggcacacgtggcttggtttaaaaaggtcatcttagatttatcttagtaaatgtaataaattattttttagatcttgaaatttataataaaaatactttacctaccctgatcaccaaaacctgatgttttaaatgtgctttctttttgaaatttatgttttcaaataaaatctccctaaagcaatatttaaaaattggtcaaaacaaggtctgggagtatgtttgtgtgtctttccagctttatcctgtagcgtgtctttgttctgtgttttagtgtcccatttagggagtgatgttttaagggtttttgtgtacttggattaagtaattagaggtgagtggggggaatgggattattgaggcaatgatttttttcttcatgggctctgatagttgcattgattgttctgtattctaattgctatatttgtgtttgcataggtgaagagcaaactggtgcgttatcttgatttttaaaaagtaataaatcctatgagttccagtattaacacttgccagttctggatcctcacacccattggctgagcgcattcaagcaccaatcgaagccaggttcatctctgagctgctgaaaggaggtgtgaggcttaggaaattggagcctgtgttgcccacgaaaggaaagaataaggaagaaatgtggtatggaagcggctacttgctgctttattttcccacctgttagacattcctccacagtgatttggccagttgtatttcacggtaatggaactagatagtgttttccattggctttctctggtagctcttggtcagctcc

SEQ ID NO: 102693 - DNA, 2515 bp, Homo sapiens
gataggccacaagttaaggggtggtatcttctcttcctggtcaggaggtaaacaaatggacaaggcatctattctggtggcccctggagaggggcagtagcccaagaaagagctgagttaaatgagcatgacctgagggcagggtgcagtttacaaattcacatttgtctcgtttaacaagacgggtttcctccaaggagacctagtacatagcaagtgccaaataaacattgagtggcaaaaaagagggaaagcaatgtaagtcatcctaagagagcacacagagcaggaggggtagaaaccagccccggggagggcaaggtccctgctggcgaggtcgctgacggggtgaacagggatggcaggacacgggaaagcgcaggccccaggaagggggacgccagggccccatggctgcaggcaaaccttgggcctggcttgggagtggaagttccggcagcatcttgctcggccctctttgcacatttgccccgtgtgattcctgcgggccagggtgggcgcggcactccctgcacccgacacaagcgttctctcggcaggcatgggcaagaaggacgaccccaagctgatgcaggagtggttcaagctagtgcaggagaagaacgccatggtgcgctacgagtcggagctgatgatcttgtgagtggccttgggtagggggcgtcagcgctatgcttgtcacagccggcatggaggtccttccagatttgggggtgaggggtggtccccagtcactgtggcttgtctccctcctgccctgcctcctcagtgcccgggagctggagctggaagaccggcagagtcgactgcagcaggagctccgggaacgcatggcagtggaaggtgagtggggtaaggcacccatggaggccagggtgggtgccacctccaggcccctcacctcatgccttcttctccttcaagatcaccttaagactgaggaggagctgtcagaagagaagcagattctcaatgagatgctggaggtggtggagcagagagactcactggtggcgctgctggaggagcagcggctccgggagagagaggaggacaaggacctggaggctgccatgctgtccaagggcttcagccttaactggtcctgagctcccacccaacgctccattttctgttggcatccgcctggccaggcagtggcatccaaaccacccggagccgcgatctgaggaggcctggcacctccttggagtttacgctcagatgcccgtgtgctgcttggaaagtggtcgagtcccgcgtgcagtggggagccccaggtgacagtggttatctgagacggctccacctcctgggaggaggcccacctggacctcccactcagaggagcagcacggcgtgtatggcatgacgcaggggaccaccccgcgcgctccctgaggatgtgctggctgtgccccttttttccactggcacatttggtaagagagggaagctgctccccgtcagaaccacagtgcgccgtgcgaggggcactgtcttcttcatgctccctggagcaccaccaaagaaacgtaaacaataccccacgaaagcagggtcaggggtcagggtgcgatcgagacccaggatgggggcgtccagtcatgcccaccccagcatcacaggagacatggaggtgcgggcaggctcctgaattattatgcaaattaggaggacgcaggaggggtctgccctccagccgaacaccacacactggaccctaagtggccaaatgcctgggccgcttgctggctgtggcctgaggcttgtgggttgctgcattttgcttgtagttcacaaccattttgacactggaaaatgctgactttgggggacaggatgaggccctacattctaagcccccagttggcagacaggcattgtccctgttccacatttatgtcgggacaggagatgaccttttcctccgtgtttttcctgtgtttgcacgttgaaatgaagctgacaacctggcaagacgctcagccgcttcaaaccctttttgtcaattaacttattttttaatacttgaaaagaagtaacttcgtttgtgtatctttactagaggaactgatcacctgcgcccgggtgcgggagccacagcggcatctggtgcgtcctacgcgacctggtccggggctgcccggtgctcctcacgtgcatctatttattagcctttctcttcgtatcactggcctggctggcatcagggagctgcccagaacccctgtgtgggtcctcctcacagctttctgtcccctcctccacccggtgcctgcctcaccctggcgctagaccatctggaccactcatgtgatgagggtgcatttccgttctgttttgggccaggccaacagcagagctgccactctcaccctcccagtgagaattccggctctgcagaactcgcccttgtctcagtttgggggccagggcatcaccttcctccgcacatatgttaaagaaggtttcaggatgggccctcatccac

SEQ ID NO: 102694 - DNA, 1067 bp, Homo sapiens
aaaattgtcctggctcagaatttgaaggagcgcaggtgtgagcgtcctggaggcccgtcaccggatggcgtgctgcccccacagactcagaggcccctccttgccctgcacttgtcaaggccagctttgcctcaggcacatacctgtggtgacatcttagaggattccacgtgggtctgggaggtgaccccaggttgtcacctgcaagcctggaagccatgttggccacttattgaatgcagtctgtctcagagccaggcagacctatccaggggctttgaggagggggcccaaggccccaaaggccccggtatgacaacccagatgccactgccctcctgataaggagtagaggcaggagggccctgtggcccgagtgctgccatcattgtgtagggaacacatcatccctcttggaggaatccacactgtggctctggccccccgccccctctgtgatgctgccagagctggatctgctctcgttcagttccgtgctgaaaaaaggacttaattcatttgtagactttgtttcccttgtttctgcttctccatttcttgtattattttcttttcctcctgttgttcctttctcactttttatgctttttgtcctctgcttgtttttattccaccttctccctgtccctctccacttccaaattcctgctcctctcctcctcttccttttttgtctttctccgtctcctcctcttccttgcttggtcccttttgaagttgagcccagtggcgggactccacgacgtagacctctctccttctgcccttgctgtgtccaggaaggtaacgtaacctcgccaaccccatccccactgcctcggagggggtgtagcaacactagtcaaacacagagccagaacccacctacctctctctctttctttctctctgaccctcaatagtcctgttacaaaatgtcatgagtctgtggcagtttctaaaggtacagtatccctttgactgtctatggggaggaccagggtgcagagtaaagccagagagcctccaggtctgggtccttcagggctgcagcattggctggccct

SEQ ID NO: 102695 - DNA, 1083 bp, Homo sapiens
attggagggaaaatcacccttttgagatctggagcctcatatgtaaaacctggttgcccttgcccctctgtgcctgcatccccaaaaggccaccccgaagccccatttctgtgccatagcacccgtctcatttctcccatgggcagagcaaagctccaagcagccctcggagcattgggaatgccacctcctgtccagaggggccgactcctacccctgccctgtgctctgtgtgtcacgctccaggctctttcagtggctctcagtgaactacctaaaggctctgaaagttccttttttcagccacagagtataaagaatgaagatttcccttcctcacatagctggactttgtgatttccaaagaaatcattaaaaagactcaaaacaacccttggaccagagaggaagggtccccaggtggccactccccttctttcttctgccctgggaccctgaacaggccggcccagcctgctttattgcactagaacagacagatgactggaaatctagaagaaaaccacatttcttctaaaactgattgaaaatacacacacataatttctagttttcggggacctcatctcttgatttatatgtctcaaaggaaatttaaagaacacaaaaggtttagaaatgtaacatgaaggactggaggtggcctcttgctgttgtgagatggaggtgcagggacgccagcccctgcccttctgagcagccgtcttcctgttctctctgcttctctgagtttcatgttgataggttcttggtttgcctgaccagtccaccatcagcttggttctgctttgcttaggaactttggaacctgcgaggtttcccaacgcgtgtgtgtgtgtgtgtgtgtgtgtgtgtgtgtgttttagagtgaggtttcccagcgcgcgtgtgtgtgtgtgtttgtgtgttttagattgtaattcttacatgcatttgtttggttttttgccttcacttttcctcccaacctggagctttatctctgcattaagtctgtgtagcaccaggtgtctcccagccccactatgtgtatgctagactgggcctgccggaccagcctca

SEQ ID NO: 102696 - DNA, 1051 bp, Homo sapiens
acaggttatagcagagagtggtggacatgaccaagccccggcatccagccagtacacacaagaactgtagttgctataagtgacaacatggttttttttatttggttggtttttggtttttttaacagcttacttggaaatctcaggatttctgcagtttaaatgatgtagacactagaagtttaaaatgaggcaagagcttttttttttttttttccacagttggatcacagcaaatctaacagcagttcctattcctcatgacaagcaagtctcaaacaagaggctcccaaacaaagtaaacaaaaacccagccatgctgtaataccgcagcaaaacgtgttacccacctacataaagggactcgctgacaggcgtgcgtgctgtcagtgagctgtagctctcccggacagaccctgaacggtggcaggtgagcactatgctgcaggccagaatttaaataaacaaatgaataaaatgtcctcttcactaacacatttacagggagttcagccacttacacacagagagaggcggaaacttgatcctgagggctccacaaaatcaagctcacctggcagcacaaattattgggttgatggtctccagtgggtgaaaagttggcatataaaacatttgggccgggcgcggtggctcacgcctgtaatcccaacactttgggaggccgaggtgggcggatcacctgaggccgggagtttgagaccagcctgaccaacatggagaaaccctgtctctactaaaaatacaaaaaattagcctggcatggtggtacatgcctgtaatcccagctactcgggaggctgaggcaggagaatcgcttgaacctgggaggtggaggttgcggtgagccgagatcacgccattgcagtccaacctgggcaacaagagcgaaactctgtctcaaaaacaaaaacatttgaaggtggtgtgtcttattttaataagggctcttgaaagagctacaagtatttgtacatcaggtatttgggagaccccttggaatgcctttggaagaaccttagggttccac

SEQ ID NO: 102697 - DNA, 1113 bp, Homo sapiens
gagccaggcgcatcccgctttgctgctgtcagttgtgacacctgtacttttcatctgaggatatgtgaagttctctgtggattaagaggttgtggactctttctccattgatgcaaaatggtaaaatgaacctgatcttgggtaaaccaagaattttctgtctttctctcatgtttctggtcaccgctgctctttcctcacttcgtaaaacgttctggtacttttcttagagtgtgtctggacgtgaatgtgtgttggcaggaagggggcgggaggggcatgtttggaagtgaaatgaagtcttgggaagagatttctgtccaggaggcctccacagtagcatcgtctccagccccaggctttaggtgtgacggtctgtgtcacacagtaggatgaagatgaaccttattctggcttttttaaataaaggaatagcaataagagaaggaccgtggagactgctgagggacgtggtggccgctgtgccatctttcctggcatgctgtcttccaaatacccaccctcggagtcacctctgctgtcacttctgtgcgtgcacattttcattcagcgccggtcacgggccacaccccctgccaggctctgagcatacaaaaggggcatttcctgccatcataaaacagcattaataagacgtttgttcctccctggccccaaatcttcacttgtaggcaagaccaacctccgtttccggcttgtggtggcaccatgagcacccgcatcactgggctggcctgtgagctggggagcgctctgcagccctgggccggcggtggccctaccttgggttttccctcttctcttctcatcctgattctccatcacacaggctaacatcagggctcgcaccccttgttggtgccagacaggcgtctgtcctgaatgccttctcactttctttctctttgggattttaaggatgaccttggctctcctcgttgggaacgcatattgctgtgtaactttgtatttgtcgtctgttttaaattcagtgcccgaccttccctccatacgccacgcggcggtgcaggcctggctggagacggtctccggaggtagtctggtgatgttcactctctccccactcaccgt

SEQ ID NO: 102698 - DNA, 1503 bp, Homo sapiens
tccatctaaaaaaaaaaaagaagaaaagggaaagctcaggtgtttcagggtcccagaatgtatgttgtagagaacagtcattagctcaggcccatggtaaccgcctctactgtgcactcgaccagtagaggcgatgatgacggcacttgattctcttgtgtgtaactcagccatcctccctagacccacgtcccaggaggcagggctggtaaagctatgactgggcagtgtttgacccagctgtgcttttactctgtgcctcctctttatattgtggcatttctctcttctcctttatgttctttttctttttatgccaaaattcttgctgttgccaaaacaaaaacaaaaaaacacacccacacccaattacaacctgcagttcaaagaaccactctaggtcggctttaaagtattgtctttctctggtaaccaaatctgtacctgctgcctaatttagtgtttgggggcattgtttacagtatttctgtttgtaatgtgcttttaatatagaaatcctcttttttgttcttaaatctatgaatgctgtgtttccaagcttatacttactactgcgtgttagtggtcctggcacagattttcttaccctggccttgtactgtccaccatgactttagaaaaagcttgaacaataggcagagaaaggaaatccccaaaagggattattttccccttggacatgagaagtttagttacaggtttcttgaattcgtttttgtccagaggaatcctctttttatctgatacggttgatgaccaaaaatgaagtagggaagccgaaggcatagccggaaaggaacagaagagctttttccccgagtgctcatcaccgggttcattaccggccagagatggacggggagaagcacgttagtttcctgtcatcttatggaaaagatgatctgaagttaaaaaatgaaggtcacaagtggcagttgcctgacccctgtccccagacattccttgcccgataaccatgaggttccatagttcggatcctgaatgggcctttaggaaatgcaggcctttcccacaccagctagaagggtagccaggcagtagaatttcattcaaccctagggttcccacctgacagagggaagttcggaagtcttactgcttcccacgtccccttcccttctaggcatttatggaaagctttttagtggagcaagagaattctacaatccagcttacctcccaccttaccccaagagccatagctgacggtgatgtgtgaatgtttatatataggtacacgtttgtatgtatatagatctaattgcacatatatgggtagatatttatttatatgttgcaccctaaattatagtaattataataattgtgaagctgtttctaaagctgcttgttcctggttctgagaaccacgggagcctcacactggggagccgtactccaggtcagggctttggggatgcacagcagcgtacgggcagcacgcctgtaaggaggtgagtg

SEQ ID NO: 102699 - DNA, 2699 bp, Homo sapiens
tatttgtctgtgaattttttccttccttatcctctttttaatgagggtggcttctccacctgtctttgtcgcggtgaacccagcagtctcttcagcatggttgccaccttgtcagcacgcctgcctgtcagtcccccttgagggcttctgttgcctgcagagggactggcaggaagaggtgcacctaggtggatctagactttgactccgggtgactcaggaggctgaggtgggaggattgcttgagcccaggaggtcggggctgcagtgagctatgatgatgccgctgcactccagcctgggtgccagcaaggccctgtctcttaaataaataaataaataaataaataaataaataaataaataaaatttaaaaccagcgtgtcagattgtcagtgcctctagggatttgaggatttgagtgcatcagtcagagtcactcttctttttctcatgaactttcctaggaggccaaaggacccctgcaggatggcgccaccacagatgcaaacggacgggccaacgccgtggccagctccactgagagaaccccaggtagcctcacttccttgtttggctgggtggcgcgtcactccctcggcctctgtgacaaggccaagggcatgagccagcacctccaaagcaacatttcttcattcgggcaacaagtggcccaaaaccctctggactcctttttcatgtgccagctgcttgcgttcggagtcccctttctctatggcctgtcggaggtgctggtgcaaatcagaggggagttccactggcaggctgtggcccagtgatggggccgtccggtgggcggcagagccgtgaagtgctgtccctcagccccgtcccgcaccatcacacctgagggcggcccaggtcctgtgtaggtagacaggagctcgcaggcgctcagacactgctcccatcacccgccctggtgaggccaaggccactcggccttcatgcagtttgcttccaagctcctctgacggcctggagctgtgttgattaagccccgtggtcttgttttgggttcaccttcacttaagattctgcgtcctgttccctgtcactgtgtgtggatgagctgtggctgctctcctgtctgccctgcaccgtgatgggacatgccctgtcctgaccccttggccactgggcttgtcatgaggtccaagccctcacctgtcccactttcatgaccacttccttgtgttgggaggtgaacagtaccatctctacctctacaaacacatttattcttgtcatagcatgacaggactcgcagggtttgtgggtaccaggcctgttgggaagaattatgtagattttccttaaaatggcctctctcagcaacttgtaaaacttgcctgtgagatgcgtccagagctccacaaactgctgggtgttctgaatgtcccacatacagctccaggtggttcacggcccagggtcactgtggcaagagggggccagcagggctgtgtttctgtctgtcacactttcctcttgttcaaaacacatgtatctcaagcagctatatacaaaactcataaaaattaaagatggtcagccagtgccaggaaatgtggaggaggagttggtcatagaatttccatggtgggacaagagaattacccatttggccttcaacgagaggttcccagagttgcatcctttcccttccctaacagctggttcatgtaggccttgtggtgctcattctgggagagggaagatgcgcccagaggctaggcggtgtgccctgggagccatgagaacccagccaagccaggtgaacgcagcttctgctactgcacgtgcccttattatcatctgagcaagttttttaagtaccctgcaggtgggaccaacattttatagccatgtttcaaccattaatgacttttaaaccttctacaatcttgaagatctttataatccatctttctcgtgaagtacccacaggcctttgcagctgacactctcagagcatgggcagaatcactggtagagaaaaataaccaaaggggtctagacagagactttggctttatgctatagaatgtacattcagttggagagagcaccaccttattagtctgggccctatttcatcagagatggattttgtgaggaacctgactactcagtagaacaactcaaaagaaactaaactttccatttcggtttggagtacagaacattttttaaaaagaattaaacacagtgaagtttaggttattcctgaatgacgccaggtttgctgactttcccatctggtcgaggttgccattcttgccatctaattgaaagtataatgggtttcaggtttttaggagttctaaagaattacgctttccatagagaataagaggaagaatgttctacatagtggggagagaggatgagggttggcagtgtggttaaagagcaaaaccaccaagaaagagtcagagccctgaggacgtctctgtccgcgtggttcttgattctgagccagaaggtgacttggtatagcacgggagttcaaaatgtggtgtcccaaaggaatcacagtgtggacctttacagttaatgacaggcactgtcccccagcttgggtggcaaaggccagtgagctcagggctgaggggcttaccctccggcagctcagagtccagaacatcttagtccggcagctcagaatcagggca

SEQ ID NO: 102700 - DNA, 1006 bp, Homo sapiens
tttgtctaagaagcactctctacaaatgaggaaaatgaaatgggattacttctgtttcaacagtttctatagtagggtttatcacttgagattcaaaagtcgtcagtcgctctttaagtgagagtaaaaaagagtcagaaaaaaatgactgcgtgggttaattccattaccagagtcatgggaaaagccaagttcagtggtgttcagatttttctgacgacaccccccacggggatgcacgttacattgagacccagacacagctgcaagttccaagaaataacgttttattctcatcatgccacagtacactctggattctattctattctattctatattctattctattctattctattctattctattctattctattctattctattctgttctgttctatgctgttcccttccatcctactcatagtccattgcagtattttttgtcttctaatgtcctttcctgctgatcctgaccctctgaggggactgggagggggtgagagatagggtgcgggagggggagcagcagagatgggcctgtcagagccaatgccaggcgatgccccacccctgcagcctccacgcctccaccctgcacttgtattcattcttggtttccccagcaatgctactcccagcgtttcatgtgaccacatctttgttcctcacacactgccactttgtttgctggccctgccacacaggcctcacatctttgctctgggcactgattgggtgatggctcaatggccttcacattcccaaaggaaaagacccccttcaggccaagggagaggagagctagaatcaaagtttacccggaggaactggcttctctggacaagaaagctgggcccagggaaggctgggtggcttgatggccttgtgaggctggaggagatggaaaggagtggctgagaccagggaggcacgttcaggatccgtgcctggctcatcgcctctgtccctgcctcttgctgtctgcaggtaaattctac

SEQ ID NO: 102701 - DNA, 2637 bp, Homo sapiens
cttccctaacctccctaacctccataacctccctaacctccataacctccctaacctccataacctccctaacctccataacctccctaacctccataacctccataacttccctaacctccataacctccctaacctccataacctccctaacctccataacctccataacctccataacctccctcacctccctaacctccctaacctccataacctccctaacctccataacctccataacctccctaacctccctaacctccataacctccctaacctccctaacctccataacctccctaacctccctaacctccctaacctccataacctccctaacctccctaacctccataacctccctaacctccctaacctccataacttccctaacctccctaacctccataacttccctaacctccttaacctccctaacctccataagctccctaacctccataacctccctaacctccataaccctgcatgtgtacttgccctctctgccccacctctacccagtcctacccagtcccccactcctccccttggctctgactgctctgccccccagggggctactgagtctccctcttgcttccttctgaggggcggtgcttacagccatcctctccagctccctctggggcctgtgttgctgagcccagggccaaggagctggctgagtgtctcaagcagagggtgttgaagtaccaggtaactgccagtctatgtcgccaccccacggagctatgaagtgcacgtggctgaggtagggagtgtgaccaatctggcttggagctggaggagcagagggctttctagcatcatgacttaatgctgtccttcccacctgtaaatagttcattctgaacctggtgggaaatgaagcagttattggttgccaaagctttcggtcactgcctcaatctctggggactgggttcctagctgcatgggcccacggctaagggagacccttgcccagttttgttacgtgtgctatgtgcagtctgcagaggatttgggctcaagtcttttctcctcatctttgcttgggattcagctggctctttggcaagcagagcctctctgagcactaagtggaaggaagagatgctgcattcctggcccttctgtagaaggagcgagcttcactctagatttgctgtctccgctgcctgctacttctaaggccaatggagtgatagggtggcgggagaatctttttgccctggagaaatcccagctcaggccgggggttgcttggcagagcacagagcatgtgagtcgacaagccatccccctgcccttcctgcaggctgccttacccattcagagggaggccgaggctgtgccgggcggcccacagctgcgggaccgcgttccagggtgtgctctgctgcaagcatgagggaaggacagttaaaagcaaaacggaagccttgcatgggccgcttatgcttctggagctactttttttttttttttttttttactatacatggtatttagataaaggtctagagtaaaaggctctacaaccatcttatgttcagaggtcagtgtgtgacttaatttaacatttcctttacttttgtttttctccatcttgtattttatagccagagcctgaacctcctcgtcgattttttgtcgaccagtgggagctttctcttagtctccgctcctctgcccgccccgcctctccctcctccgactccctccgacaggtagcatggcctaggactcactaaaactctgccctccgcagcctccactcacgtcactttcgcaagtgtcatgtaccccaggaggctgcagtgttcctcacttgggcccgtctcctgtagggagccagctgcatgtgttgctgtttgcctgtgtcggtctcgtgtgtgaggtctgtggcacactcctcagctaaagtggctgctggctttcatccaactgtatctgacacatccaggtctgttgatgtgaacccgctttgatcctatttcaactatatcaaataatgataaatgttttgcagccattggcttttttaacttcacatgtcttccaaaataatatgtgttaaaaagtaggaaccacaatgtaattaaatcacctcaatggaggggtgatgatgcggtattctggctgcctgttgtcatcatttgaggaatgtacgcggctgtcacctgaagtagcgctggtccagttgtagggagtttctagagagattggaaggtctctttgccactcctactggtatttcccatgcctgagttgacgccagacctcacgtcctatgtgcatggtagcatatgcacgcgtatggtgtgcggcgggatctgaagtagcactggttcagttgtagggagtttctagagagattggaaggtctctttgccgctcctactggtatttcccatgcctgggttgaggcctatgtgcatggtagcatatgcacacgtatggtgtgcggtgggatcgatcccgcaattgccacatttctgctattttttatgagtgatgagaaggaaaccatcgcttttcatgccagaaacaaatagaacttgagtcttcacctctcttgcagggatgcttgtcagtgttgccaacttgctgagaactgaatgtggc

SEQ ID NO: 102702 - DNA, 1283 bp, Homo sapiens
gctgtgtctccgtcagttctcacagtaaccctgtgaggcaggtgctgttactggctccgttttaccagggaggagactgaagtatagagtggagaggccatgtcacgtgtctgagccgcatagtaagcaatgcagccagactcgaatctggcttgtgggaccggggctacgctctggcctccctctgcccacagagacattatgctcacgggtgctagataggagcagccacgtcagaggccttggggctgtttttccacccgcacgtggctgtaaggtgaacccttagccagccagagagtaatgcgaggagccttccctggtcctgtgattgccgcttctggctcctcggatgagcaaggccatgtccctacctgcaggtctttaccctttcacatataccttcccgtccattcgccaaaaacacattcacttctccctttagtaaattatgctttggcccgatgctcctattcaggaaccacttcccactctggagtttcctctggactgctgtcttagtcatttattctagccaattcccacctccccacctttgctttctaaaatgtcttgttgtggaatgtgtcacccttttaacctgcctctccttctaaaccttccatttgatgcctctgatcttatgccactgtgtgaaagaaatatgcttgttccacctttgtactaaccatagttcttcattgatccgtgtagctggcctcgtcggaggccagtggggggtggaatggctgtgcagaaagtcggccttgtgtcatgggatttgatacagatgggattatggttacctggggatggggttagtaggggaaggcgatatgtgttgaactctgcatttctgcccctgaatttcccactgtcgtttagtaggtccaaatagagcgatatgcatggagcttaagtttctactttgttgccaacagacatacagggatcttgatgctgacaaccgtggcaagcagagcccccaccatgagagggtaaaagagcatgaacccgtggcatgggatgctgagagccaagcacacggggcacgctgtggtggtggggcagcgggaagggatatgggggacggccccctccccttgctttttgcacgctcttgtcacccagccaagagccagaattctttttgctagcagtgttgaccaatgcaaatagcattcactgtaaagcagtcacccatctggcattcagatgggatgctgatcctaaatgtgcgtattgtaaagggccttaatgacttcccatttctgcccactgtt

SEQ ID NO: 102703 - DNA, 1048 bp, Homo sapiens
cagccagcttccaacttttgaaaagcaaaagtgcgggttttggtaactgtagtagattgggaagaagagtcatttttgtttatgtggatgaacaaaagaaggttcaatgtccatacccaagtatgcatttcctccgtggcgtttcctactgagaccacatgcttgtcctggagctggtgaacctttagagccttctgaggctctgcgaaccatccacgagggagagtagttttggtcaggattttgcggcgccctcaagggctgtgcttgaacatcactggtttctattcccagacaccttggacctaaatgccgaggagaaagcagtcctgatagccagcaccagatcccctatctccttcctaagcaaacttggccagaccatctctcggaagcgttctcccaaggtatgtggaggagtctcttgatgggctgcaaagctaatggcaaggtatgtatggctagaataatgcagtttccctcctcccttggtacaggataaaaaggaaaaggacttggatggtgctgggaagaggagaaagaccagtcaatcagaggaggtgagattcacttggggaattgctagaatggtcatgtggaatagccccttttggttaaaattcttcatttccacattggtattgctaggtcttttcatattcatcctttatgagaatttctgttgggctttttcttttcttttttttattttcttttttttttttttttttttttttttttgagacaagagtctttctccattgcccaggctggagtatagtggcacgatctgggctcactgcaacctccacttcctggatttgggttcaagcaattctcctgcctcagcctcccaagtagctgggattgcaggcatgtgccaccacacccagctaatttttgtaatttttttttttttttttttgagacagagtctggctctcttacccaggctggagtgcagtagtgcaatctcggctcactgcaacctgcacctccagggttcaagcgattctcatgcctcagcctcccaagtagctgggattac

SEQ ID NO: 102704 - DNA, 1502 bp, Homo sapiens
ttaaaatgtgtttgtttttctcaaaccccaccttatttcataaaagatttaaaggtcatcatcctaacttctgtctgaactttacccagccttctatcccagactttcctttcagccattctgctcttaggtaggaatttgttacttgatatttgattttctttctgtttgactttgtaaatttctgccaggtgcgccatttatatgatactggcgaaacaaaagatattcacctggaaatggagagcctggtgaattcccgaaccacccccaaattgactcgcaatggtgagttctggtggtggctttttaaaatgcaggcagccccttcagagaagtctatactcattccctgagccacaaggtgcggtccgaggcagtggccgaagtactgtctgagacagtggctctcaacccagggtgattttgccctccaggggatacttggtagttgtctggggacatttttgatggtcatgattgggggtgggcaggagccagggatgctgctgaacatcccgcagtgcacgagacaggcctccaccacacggaattaccttggcctgaggtgttacgagagcacagagagaaaccaggtacagacgcggggcagaggggagagagggagagagtgtgagagctaaggtttcgggagaagactttgtggaaaaagtctttggctgggtcctgcaacatagccaggattcagtgacaggtgaggaccactccagattttgtatgtattgaaggccctgaatacttttttgaaagagaatgacatgagtacacctggtcagccacacgtgagaggggttggaggagggaagtaccagaggcagggagaccaggtagaaagacctcgccatagtcaggctgaaggtggtggaggcccagatctgggcctgatgctggggatgaagaagggaggaggcagtggaggagacctcagactttgggccaggtgcaactgggtcccaggccaagctttgctgctggtgaattgtgcggcctcgaagaggtgattgaatagctctgaacttcgatttccttgtctgtgaagtgggggcagcagtgtctacctcacattgtgatcatgagtgccgggcctgtggtggatggtcattgccattgttggttatgtgagagagaatggtaaggaggtgaagtcgatgggcaggggcaattgatcaccttgtggggcaagaggtaggtgtttgtagatggtgctacatcagcgtaggcaaggcagagggagggctgagagggttgagaggtttgagtcatttggacattgtgaatttgacgtgccattgggatgccagggtggatgtgaggaccagcaggcagttggaaacatttgcatttttctccactggagcgtcttctctttgaaagcagagagtgtatctttattcactgtttttattttagagcatggaatattgaagttgcctgttacatattggatggttggatatacacataggagacagatctgagta

SEQ ID NO: 102705 - DNA, 1095 bp, Homo sapiens
gtgccttcattctcttgttttctagaacttgatttcttttcattacatctattttttagattaattaaaaagtcagtagttcactctctgcttccaggcgtcaagttgtctatcctgttcttaagaatctaggagattcctccagcttccttgatgactgtcccaagaggcttaacccgataactaatccaagccctctttagaggttagcctcttttttttttgcttgtttcgtttttattcccgtaaaaacagttctgtttactgtcagtcatagtttttaggattgtttggggtgttgagtgaatacagagaaacaaaactccctgtatttccatgaactgatgatacaggacgtgagaatctgggcttagacacctttccctgcctggagcctcaggcccttgtctctgtaggcctgtgtgtaacctttcagcctgccctgatgcaccttcatctcagcaaacttacatgcacacgtttgtcttctggccccaggtattgacttggagaacatcgtttactacaaagatgacacacactatttcgttatgacagccaaaaagcagagtttgctggacaaaggagtgatactacatgtgagccacggatttccttcaaaactctttcttattgaagtggttaatatcaccaagagaaagaattgtctgatgggtttttcctgcaagggaatgaaaatgagcactgaatgcatcttctggtaacccctgatgttttccagtttagcgtgaacaactcttaactatggctaatttcaaatgtaaataaaaacggggggagaatagtgtaatgaaccctcacgtacctaccgtccagctttcacagttctcaacacgtggccagtgttctgtcagtaatatttctgtgcactccttcttcaccactggattcttgcaaagcaggtttcagacagcatttcatgcataaatactcagtttaattttaggtgatttggtttgtggttattgtgatttccatatctgactgatgattggttggttgaagagttatcttttgggagggggagcaacagagggaaaggagtttgaccaagaagcaataattggtgtttat

SEQ ID NO: 102706 - DNA, 2024 bp, Homo sapiens
agtcgctgccatgcctggtgcctgcaggtgctcatggacgtcgaataaatcaatcagtctcactatgaaaataagcaagattgtcagtcattctggcctcagtttccacagctatagaccaggaatgggagggggaatggtaggaggatctagttggattgcgatttcccttccttgccttataagaatgtgtgatgatcaaccagggaatgggctgaaagacgcctgtgggcggggaggtcatgcagcagctctgcatctgaccgtgggctgcaccctgtgggtgcacatctgcctcctagcaggattggagatgctgccaatatggcagccccaaattgggaagatggaaaggaacctcctgtaggccacagtcccatgttgtctccgagcttttgattgtttaaaacactgaacccgagacgtgggagtgtcctgtgtgttgctctagaacagctcttccactgggttatatttgcctttaagaaaggaagaagttacagagcgtggctttggaaggtctcctgctacagcaggctttgggaatctgaatgaagggggcgtaggtggcggggtgggagcctgagctgcgacacggatgggtacccccttctccatgtgttcccatcaacgtcatctctgtattctcccaggtatccgtcagctccaactaatacttttgaaagtagccttgatcctaggcattgaaatccacgtcaatgtggaattccaaggacttatacagcctcctgaggaccaagagaatgaacgtaagttatactggaggagtgaagaaggcgtgagagggtgttgatgggtgaggaagatgagattgagggagcaaaccaaaggctcctgagggctgcttccagagctagccaaagcctgtgcctttggggacttggcctggatgcagccttagatgtcgcaggcgcacatgtggtgggaagggccccgtgagccctctgcaaggcttctttccttctgtggtttgtccccactgctttttctttgttagatgagagtctcactctgtcgcctagcctggagtgcggtagctcaatcttggctcactgtgacctctgagcaattctcctgcgtaggtctccagagtagctgggattacaggcatgtgtcaccatgcctggctaatttttgtattttagtagagacagggtttcaccatgctggccagggtggtctcgaactcctggcctcaagtagtctgccagcctctgcctcgcatagtgctgggattagaggcacgagccaccgtgcacagcctctgtctccactgcttctacacatagtgtttttggcccagggttttgtgcagttcacatgactgggtatctagagatggtcctggctgtgaatgtggtctgggtggtgacccccatttatttggttttggttcacagggataggctggcgggcactggtgcaccccaagactcatcctgtgtcagagtatgaatttgaagtgatcatcggtggggatggtcggaggaacaccttggaaggtattggtctgtgctcctctgcctggctcatagcagagggaaagctgatgctatcctacctctggggcgagactgtgcgtgaccagcgtccacccttttgagagcctgaatgtgtgcttcctgccctgatggaatggcaggccccaccatcctctagccagctggcagtcaggctgctgcttttattttatttaattattttatttttgagacagggtctcgttcttttgcccaggctggagtgcagtatcatgatcacgctcactgcagcctcgatctccctggtctcaagcgagtctcccatctcagcctcctgagtagctgggactacaggcgcgtgccaccatacccagctaatttttgtattttttgtagagattgggttttcgccatgttgcatgggctggtctcaaactccttggctcaagcactctgctcgcctttcccaaggtgttgggattacaggcgtgaaccacctcacctggcccaggctgctgctta

SEQ ID NO: 102707 - DNA, 1082 bp, Homo sapiens
agggagctggccaaggaccctgctttctctctgggccagcgcccaaggtgccctattaatttagattttcatgtgcattagtggacgagggtgaaggagacgcaggccctcggctggcagtcgttttacaccaccaccggctaggctgaaatggggaaagaaatatggggattgggggcttccttatggagaaaggtaaaggctgaaatggtgtgtgagagaggacttgaggcttttttcctgggggtcagggagagttggagttgacagcactcagccctaataggtatagactgagtccagcctgaggtattagaccctatatttattggcttgatcttaattttacacctggtcatactgttgaaaaaaaaaaaaaaaaaggtcccccagtgcctgagtgcgaacttcatatttagtggcatttgatagtatatttattatttctagtaagtttgatgatctcagaggtgtgcagtgatgttcctggaagtgaatagtacagcggtccccaggaactgtggggagaaccctgctccgcctcagcctcttctcccatctgctgccgtggcctgctccaccctcagatagctgttggaggacccagcagcctgtgcttctcttaacatgtccagttgtaccctattttcagttaaaaatgcggtttctcccacctgctttcccctggagcggcacgtgaaagggtgtagtgcccttctcttgacacctgcctgtccccacagtcctatcgtcagtgggtgcgtgtgctcactgctgcctggcactgctgggttctcaggaggcctgcacaccgaaactttgcatggaatgttgcccttgtgccattagcaaagcggaggctgggtcggctctgctctccctgcctccgacttcattgttcgggacttaatgtaataatatgcttgaacaggcgggagatcacattagcttggctctgcagttgtaaacaatatttgctctgtgagcattctccttcaccccctgctctcctggaaccctgcgccctctcctactgccaccccctctctccttgcatattctaaccttggctaaacagcttc

SEQ ID NO: 102708 - DNA, 1073 bp, Homo sapiens
gatgcaaaaccagaatgagcagaattcactgttcagttcatgttggtaattctatctcagtggtgcgcacagaacacggtgaaggtgagagaaagctggactgcaaattggagtttggagcaaggcagacaccgaggtcttttcctctttccttaagggatttccttgtcccagttacctcttcatgaagggaaaacattgtctcattggcagtttggccatgctggggggcccactgtcctctgggtgtgtagaggctgtcttggcgggcacagtcttgctggcagggcccaggctgcaagatgaacgcgtgcagcggctgtaggctggcctgggagaacgaagtggggagagggggccaatccagccatgtggccttgcagcccggctctgatcttagatggacagcagatatttgatgtgctgcgtttctcttctgaagtctcactcctcctttctttgtgatttaaacaatttcttccctcccactttttgtccaaattcctcagtccatactctttgaaatctgaagtatggagaggcgatagcagggccctccccacccatcttccggcttggaaggggtatcatgtggttcagctgggccctttgctggagagcagagggaggggtgttccccagggaagagggcaggaaagaccagaggttaaaaataggcagcttgtaggaacttgcccaccactccctcaggtcctcctgtgatgtgcacacttggagtagaatggctttggagcagagaaggggaaaatagatcagccctcacttaaacatcacattagccattggcttttcctctatcttccacataagaggaactttccccaatcacctggtggttttggatttgtgtcccctggtactttggggatgtgtccacatgtgtgtgcagtgcctctgtctgcatgtgtgtggcgctaagatgactcagtgtcgcatgtgctgagacattccggggctgcaggtgggtgttctcacagaggctcgcctgagggatcttttgcacatacaaagatgtgtcccatttataagttagttccctacactaaatgaaa

SEQ ID NO: 102709 - DNA, 1025 bp, Homo sapiens
gcacagcatctctggccctacccaggcctgctggacccagattcgcattgtgccaggctccccagttgctttgtgtgcacacagggagtatctgcccctgcatcgtgtgttgtccttatcatgttttattaggggtcactacctggctgtttcgtcctctgctttacagatccgtcttttgtttggacccctttgtagcacctgacgcatccttggcattgagcaggcactacggtatttgagattgactgacagtccccatttatttgaaaacttgtcggatcatatagggaattgcaggagagatgtggcatgcacgcttataaaagtttatgacagagggcaagaaaaagtaagagagggcatagttaatacatttgaatccaccaggtaaggcaccgtttggggaggggcacaggtgttggaagcagcccacccttagcaaagcagttctccctgctttgtcgctcactgtgtgtgaacttcctgaaccttaatttagttgcctgatttctacagtgaggtaacattatactcataatgttgctcggaagataaaatgagataatgcaggtgaatcatgtcacagtgtttggccatgagtggtagctgggtgtatgtacttagccagagctaagtgttcagttacgttagttggattcttgttaatctttgagaaatcttgttatatttatttatttattttcgagataatttctcactctgtcacccaggcttgagtgcagtggcacgatcttggctcactacaaccgccacctcctgggctcaagccatcctcccacctcagcctcctgagtagctgagactacaggcacatgccaccatgtatggctaatttttgtatttttagcagagatggggtttcaccatgttgggcaggttggtctcgaacttcagacctcaagtgatccatccgccttggcctcccaaagggctgggattacaggcacgacccaccgtgctggccaattttttttttttttgaggcagcatctcactttgtc

SEQ ID NO: 102710 - DNA, 1066 bp, Homo sapiens
tgctgcagtcccgttcccatccttgcagttcattccaccctgggtgttcatgcatcacatagcagcccttgagttctaagtgatttggctcttgtggggcacttttaagaaattttacgcccggcacagtcgctcacgcctgtaatcccagcactttgggaggccgaggcgggcggatcacttgaggccaggagttcgagaccagcctggccaacatggggaaaccctgtctctactgaaaatacaaaaattaaccgggtgtggtggcgggcgcctgtaatcccagctactcagggggccaaggcaggagaatcccttgagcctgggaggcagaagttacagtgagccaagatcgcgccactgcactcaagcttggatgcctgagcgagaccctgtctcaaaaaaaaaaaaagaaagaaattttaaacactggttttctagaggcaagtagttaatagataattctctagttattccataatggaagactgtttgatttcatggcaaccctgagcagtcattttattcctcagcagtcatggatttggtgtttgacctgaacaaggtcatgtttgttctctgtgccctgagtttttcctttggcgaagcagggataatgaatactagatccgaacagcagcagagtgtgtcatgcgtcacacaggggctcttatctctcagaccctttatgatacttgccagtgtgtgaagtactttccattgctgaatttcaccgacaatagtaaggtagatggagcttgggtcatagtttgcattttgtaagcatgaagatggacgtggagaggttgtgtggctcactgaatgacggaccccgggtccagatccctgtctcctgatcctaatccagtgctcccggctgtaccaccctgcctattcacagtgggcacactgcagggttgcgggtgacctttccttacagtctgggcattcatttctggctgtggaggaacttgttgagtaagggcagtgccactttgagacagtggaggaagtggcccagccaggaagccaggccacatcaccagatgcccagttggagagagca

SEQ ID NO: 102711 - DNA, 1056 bp, Homo sapiens
tagctgggactacaggcatgcaccaccacacctggctaattttgtatttttagtagagacggggtttctccatgtttgtcaggctgatctcgaactcctgacctcaggaggcccgcctcggcctcccaaagtgcggggattatagccgtgagccaccatgcccggccggtagtgcatggatttctgtaggtaccatagcagtgtcagtgcaaagcttggcatacctgggaggttgctgcctctgtgtttctgggctcttctccccatcccctttctgcaactgtctgtttggaagttgtgatcttgacatgtggcccttctagccccatggcttagcactgtggggccccggaggagtgggctctggatgagcatgcagcacccttgaacatgttggattcagccagtgtggatgtcggcatgagacgctgacacaggcatgtgtgtgccctctgcagctcccttctgcagctgcctctcctataagaccaggaatttcagaggacactctctcaggagcccctcttcctggacattttcttcccttgtgctcataaacattcataaacaccgtttaatggtcgaagattttggtttatgactaaaaatctgaaattcctaaaatctctgtggattcaagtccttaggaaagctggagcaaacatgcagctgagtggggagtcggagatctctcagatcttttcccggtccaatcctcagcagttctgtgatgctggctggggcttctcaggcatgagatctatttccacctcccactctaggctggaagttgtccaggaaattgtcactgacatattgaggtgcatagcaaatgcagctggtagaagaaatgtggggttcatcttagaaaatgctgctccaaggatcggcttgagaaagtgttaatttgtaagaattaaatgaggatattatgggatgttggaaggtgggaataagtgtgtgagtgagtgtaggcatctcttggcttttcagtggttctcagccagggctctctctggatgcagtctgcttcccctgccacacacagcttcctcc

SEQ ID NO: 102712 - DNA, 1056 bp, Homo sapiens
ctccccgatgtgccttgctgtccctactcccgtacgtccgttcacctgttgcgtgtgcctggtccaccctcccaggtagcttagcctggttcgctccagatttcagtttctacttggagtcccaccctctttgggaaacccgttgtcaccaccttacctgggaattatttccccttccagtggaccatgtgacttgaacatttcatctggtgtttaatcagatactgcctcaggatatatattttcttgtctcaagatttttttgttttttgtttgagatgggatggtctggttccttttttctacaaaccaaattataaaatttgagggccaagattttaacagtaccttgcttattaaatagccactggtttgtaactgatttgctgaactgagcatgtgttcttagtgtttgccttgaggagcgcactgggcttgggaacaatgaaagatgtaggaaaaagcaaggtccttgcatccagattcgttaagaggccttgcctggccttgtgtggagtggcctgcctgccttgccatcctcctcttcctctctcactgagccctgagcccactggccggtggtcctggaaggccatgtgcattgtcgcctgtgccggtgcacgtgtgctgcttctgcccctggagcaagctcctcctttccctgggcatcctccctcccgggtcgggctggatacctcttcattaccacctgaagggccagggggccccttccgatgttctgtcttaggttctgctgttctttttctcacagtgtgtaagtatggatgtatctatatattgacgtttttacaccgatggctgtgtccaccactgtccttccatctctggggcacaggagacataggagttctgttcacattctgtgcttagccccaacacagtgtctggtgcctgtgtatgctagatgaatgctagatgtatgctagatgaatgctagatgaatgctagatgaatgcagtcaatgctagatgaatgatgaggttttttgtttgtttgttttgacatggagtcttgcactgtcgcccaggctggagt

SEQ ID NO: 102713 - DNA, 1032 bp, Homo sapiens
caggctggtctcaaactcccgacctcaggtgatcctcctgcctcggcctcccaaagtgctgggattacaggtgtgagccactgtgcctggccaggtgtatatttttatttctcttgagtatatacctaagagtgaaattgctgggtcatatggtaactctatgtttaactttttgaggagctgtcaaacttttccaaagttgcagcactattttactttcccaccagcaacataggagggttccagtttccccacatccttgtcaacacttgttattgtctgtctttttttttttttattatagtcttcctagtgggtatgaagtgatacctcatttgagggtttgatttgcatttccctaatggttgccgatgttgagcatcctttcatgtgcttattggcgtctttcttttcttgtgcttctgggtcttccttagataaatatctgtccaaatcctttggctgtttaaaaagttgggttacctttttattattgagttgtaagagttctttatgtcttctggatacaagttccctatccgttacctgatttgcagatatttttccctattctgtaggtgtgttttcactttctggatggtgtcttttatgctttgaagcatacacgtttttaattttggtgatgtcaaatttactctcgattcttgagtaaacctggatttgcacatcagttttctgtgctttcagatgtttctattgtagttaagtctctgccgggcgtggtggctcacgccgtaatcccagcactttgggaggcggaggtgggcggatcacaaggtcagatcgagatcatcctggctaacacggtgaaaccccgtctctactaaaaatacaaaaaattagccgggcatggtggcgggcgcctgtagtcccagcttcttgggaggctgaggcaggagaatggcgtgaacctgggaggcggagcttgcagtgagccgagatcacgccactgcactccagcctgggcgacagagcaagactccatctaaaaaaaaaaaaaaagaagaagtc

SEQ ID NO: 102714 - DNA, 1047 bp, Homo sapiens
ctcagaggcacaggtgctcctggctctgcctgcagcctcccaggcctgtcatctgggcctgttggtgcggcacatggatctaggtgctgtcacgggctgtcagttgtggcacgtcctggcagggcctggctggcccagcctctgctcatgcagtattcatctgcacgccaggagccgtgtggaccatctctgctgcgctgccccactcagctccgtgtgcagttgctttcctttaatgcttgtctccaggccatttttgtaagcttttatgaggtccaaatgcttaggcacaggcaggcaagaaaatccagcagggcatatagatcattcccagtagtaaaagaggtcaaggggtttggctaaaaacctcacttatattgggatatgggaaaagtgggagagaactgatttctcaggagtccgcttcataatatgtgtcatggcatgatcgccttcaatcctcatgacaatcttacagagttacccgtatgaggcccacttgaaagatgaggcgcagtgaggttagatgacttgcctgagatctctcacccggtaaatggtggagctaaatcagagtaagacactcaaactgtgttgtggttaagagtttggactctggaacccgactgtgctgtactataccggttactagagtgtgtgaccgggagtgtgttccttatcctcccgagactcagtttcctcatctgtgcaatgaagggcgtaacagtcctactcaccttgtatggtcacaagcatttagaatcctcccagcacgtggtaagcacccagtgagcaccccacgcatcagctggtactgtcactgactggtgctcatgaaacttggaatggaattctgaggcttggggcttcctgtcatccagagacagtcttcaggggagcatgctgggtccagactatccagtgagtcagcacaggtttctttgcggtgtttggatgggtgagaatgaacagtgccctccaagggggagttctttcctatcttgctggtcccctcctcatcccgcttgctcccgctctctaactgcc

SEQ ID NO: 102715 - DNA, 1021 bp, Homo sapiens
tttccctgtgaaaaaggaaaaaggaaatattttaactagtgacatgggcttgggtcagtttctttccaaaacagataggctttctcaaaaccacccttgcatgggtaggaaaaacaaataaactttctgcttttggtattctaagtacctttagacagtggggcctgtggacaattatataagaaagtcataacagtgatcgcttcgccttaccgtggccagactgcgcacacatcatttctagtcttcaggtagagtcctttcaccccattttacagcagggaagctgttccagtgaggtaaagggccataaacccaataatttgcatagctaatgactccaaatcccgtgagataaatgttcagggagcaaaaggaagaggaatggggcagaaaaagacagtatgaggcagggaagaaattcacaggtggtagcttgaattggcggcctccgggtttagtgagcaccgtgctaggccctagtgaggggtggggatacaaacaagcccctgggcctcaaccaccctcagggagccagggagcaggggggattcctacttcaggaatcctttacacactgacttttttcagcacatttattgagcatctgttgtatgtaagtgccacgtggtaagacagcctgtgtctgcaagaggttgatatttctaaggggttggatgcattgtcagccatgcaagtgcagtaacctggatttaactggccaggaagccctggacgtagagtgctaagcaaatttatgccaactagtaaaatattcttgatttggttttatttcttgcacataagattgagaatttctagaatttgcctaccccctgtgtctgctgtttgtggaatgtttgtgttttgcaaacaggatcattttgcaactccttcctgaggaccagccctgcactttggctgcaggaaaggctgggaccatttcccttgcctgcaggctgcccttgggcccgtcaccactttggagctggtgctctcaatgtgcttgtccttgcccagc

SEQ ID NO: 102716 - DNA, 1001 bp, Homo sapiens
ggctgggccaaggtaggagtattgcttgaggccaggagtttgagaccagcctgcgcaacatagtgagaccctgtctctacaaaaattttaaaaattagccgggcatggtggtgtacacctatagtcgcagctgctcagaaggctgaggtgggaggatcacttgaggccaggagtttgaggctgcagtgagctataatcacaccactgcattccagtctgggtgacagagtgagaccctgtctcttaaaagaaaaagggaggacagaaatcagattaaagaagagagaagaagtgagactgttggcttataccttgatgaaaggtggaagcggaagggcaagagcttctgctaagtagtgaggaccttggcaaggacaacagtatctttttcgtgttctgttaggccgtgtctctctagcgcccagctcagagtgcatgtgtgttatgtgtgagggaatctagtgaggagtcttcctgcattaggcacgtctgcaggtgtctgttgaattgtatatctgttgaaggattcagtctggttaactctggcaggagattcggtctggttaactctggcaggagagggatggacagcacagccttgtggttaactagtggcttttattgacttttcctgtgtaaaggcgaaataaaccttagtgggtcccaggcttctcttctctcctgcccatgcttctttttttttcttttttttttttgagacagagtcttactctgtggccccggctggagtggccccagctggagtggcatgatctcggctcactgcagccttgacctcctgggccaggccatcccccaacctcagcctcctgagtagctgggactacaggcccacaccaccacacccgactaatttttaaattttgtggagagacaagctctctctgtgttgcccagtctggtcttgaactgctgggctcaggtgatccctgcaaagtgctgggattacaggcaccccactgcacccagccctctgtctc

SEQ ID NO: 102717 - DNA, 1032 bp, Homo sapiens
cctttgctagaagcattcatctagccaggtggggggtcattactttagaaaaaataatcagagctgagaaaacgtctgcatttgcagagaatgaagtatttaataagaccagatgggccgggcgcagtggctcatgcctgtaataccaacactttgggaggttgaggtgggcagattgcttgagcccagtagtttgagagcagactgggcaacatagctaaaccccatctctacaaaaagtacaaaaattagctgggcgtggtggtgtgtacctgtggtcccagctactctggaggctgaggtgggaggattgcctgcgctcaggaggccgaggttgcagtgagctgagatcacaccactgcactccagcactccagcctgggtgacagagcaagactctgtctcaaaaaaaaaaaaaaaaaaaaaaagactagatggggagatgagggacagagagaatcaaagagaatcaaagtggtttgtggacagaggaaatgagtgatactctgacccagaggccatctttagtgtccaggccattttgcttgagctgctggtgaaactgtgaaactggaggcatggcacttgggctaaagtctgtgcggtgaataaggccctcagtttctgctttaggtggcagagctgaaaatctgattcctttttggtctttagcttccggtgtacttcaatgcagtacattgtgggcgtggtggggatgtggttcagaaatttacctaaactctgtggacttccccctctctccagccacgcactctgtcatctttggttccagtctttagaattcagctcggatcccctgggtgatgggtggtgtcagacactcaggtgcttggattgccccggtggagagaacagcatcctgcccccatgggcttcagttgtacgtgacttgctgttttcttggaggtgggctttagtcatctctagctataaagacacaaaaaaactgggaagaatgaccaggaaactgtcaccccaagccttgcagttgattgcatttttttttttttt

SEQ ID NO: 102718 - DNA, 1056 bp, Homo sapiens
ctgacgtgtaaactgcttccccagcctccaggcgagcccagcttttgcctcagataggccccttccttttccttctcggggaatcgacctcgggaaggggtgtgggcaaagagatgaggactctccctcttcgcccaggccaactcgggatatcccggagcctctggggaggcggtcactccgacgtctgaggacctgggccttggacccggactcgttatgaagagcgattcttcgacctctgcagcccccctcagggggctcgggggacccctgcgcagcagcgagccggtgcgcgcggtcccggcccgggcgccggccgtggaccttctggaggaggcggccgacctcctggtggtgcacctggacttccgggcggcgctggagacctgcgagcgggcctggcagagtctggccaaccacgccgtggcagaggaacccgcgggcacgtacgtgctgggctcggaaatgaaccgatttccgggcgctcttgtggtggggctcaaggtctcaggagttctgtccttcccagattgcccacaaggagctttacacctcgctttcatcagtggtttgtctccgagagggtggtcgctcatcgtgtgcccattctacagagaagggaagtcgtgtaacaaaaacttagtggggatcccacagccaattatttgctccttgttccaaggtacaatgacatgatgggaaggctgaatgtgtattaagtgctaagttctgtcagtaagcaggtggtaaaagtcctctcccaggtacctccgccctccccgccccgcccaaggttgtttattcctgaccttggctgatgatggggaatgggggtcatggcaggagcagcgttctggtccaattagaggactggattaaagaattaattcagggccgggagctggggcttacgcctgtaatcccagcactttgggaggccgaggcaggaggattgcttgagcccaggagttcgagaccagcctgggtaacataatgagccctcttctctaccaaaaagaagaaaaagaaaagaatccggagaaaaaaaccttg

SEQ ID NO: 102719 - DNA, 1019 bp, Homo sapiens
cacacctgcatggaaacagaaaccccgccacggagccccctcccatctccacagggcctctagagcgccatgtgcaaggacttcatgggcggggtggggtggggtcaggagcctgctgtgggctggccaggccctggccctccctgtcgcaccctgcgctgcctccatgcacctctcagggctgtcatggcttttcctgtggcttctgacaggtagagtcagcgatgacggcttcatagccattaagctcacagcactggggagaccccagtttctggtaagtgctagaaccttccacctgcagagtctggtgctgtgcgagatctcagggcagctgtgggcatccaccaaaaacacaggtgcccatgccttagaggcctgagctggccacaggggctgtgtgggggactggggtgggcaggggcgtgtgcagatggcattcaggcctgcgtttgcagctgcagttctcagaggtgctggccaagtggaggtgcttctttcaccaaatggctgtggagcaagggcaggcgggcctggctgccatggacaccaagctggaggtggcggtgctgcaggtggggcagccttccccttccccactcctgtggcttgtgagggggtgggcaccgtggggtcacacggggcatggtgggcagtggtcggaggtggttttgggaactcacccagggcatgtggctcactctgcagctgctggggttggcctggtggggaggaggaggtcagagggactctgaacagagaggggagatgctggcaggagggctggagacccagccctgcagggcgtgggcgtgcatcagcagcggggtgggaatagacctgtctatgcagtagaaacaaaccagacatggatcctgttcttactaacgatgtaataaagccagaaacagcaccagaggccaatgggtggggggaaggataaaatatgagtgaatggggctgatccaggccttctcacttctcaaggaaagtgtcgcaaagttgggcatcgcatccag

SEQ ID NO: 102720 - DNA, 1027 bp, Homo sapiens
acactgttttagccgcatcagcctaggggtactagagatgacggttatctccaggtgaccctgggaagagtttgcaaggttccgctttttggcgccagggtatctggtggtgttgatttctcaggtgagactgtacagaggtcgggggctgcacccctggcctcaacaggaggcgggggaaggcgggggacggtgtcagatgagaagcaccgagccacagttgagcttaggtgaggcctcggcgggtgcgaggtgagggcagggatccacgaactcagagtcagatgctgttggcccgaatcccatggggagcgccaaggtcagcctaggacccgtggtggcgggagtgcggaggatggtggaggaagaaggagctgaactggacagatggagggctctgggagggcattgctgtgtgtgcacacaaggatgtcttaaggtcaagttttggtcatagagagccccggccaaggagacaggagggcgagaagggacatcccaggtagaggaactggcaaggtgagggacggcgatgtggaggctttggggagtgcccacatctaaggggcatcccaaaagaggagccagtgctggtggtgctgcaataggaggaggaggcagcagggcagaaatgccaggggagggagtggccagccacaggtccctgcccagggcaaggacgggcatgctaggtggcagctggggccagtcgtgcagaagccatgcccaccttgtggccgggatggagtggggactaggaaggcaccaggtcaggtttctgtaggcacagccctaagcatggctgggatggggagggggctaggaaggcaccaggtcaggtttctgtaggcacagccctaaggtttcttgtctagattcaagacaagttgttgcacagagaagccagcagagctgggtgtggggtttggtgcccagtctgctgcggggaatgccaggtgctgttccgtgactgtgggaggaaactgttggctccgctgtcccttgggtgccttcttgaggcaagtgc

SEQ ID NO: 102721 - DNA, 1067 bp, Homo sapiens
cactgagccacgcacgcccctggcatcatgctcgccttgcggtgcagctggtgtggcgcagactctgagagtgagcaccaggactcttcctgtctggcctccaatctaccctcttgccatgctccaccaccccttaggtcttgccactgggagtggggagggactggggagagaaaatactgaggtaggggtgacaggagagaaggttcttcactggcctcccctggcctaaacccctgacctacttcattcttggaccccagctgatgggatggggcttggagagggcccagatgactggcctctcagctcagcctcctgcccactgtctctataggtgcctggtgctatgactcccaggacctcaagtatggtgaggacagagtgtcatgtgaggctgtgtcagatcagtctgtgtcctgggaccaccagagcatgtgccagtggtgcaagagtggccaagagacagtctgcaccctgcactctgtggcctttgcaggtttctgtctgtagtcgtctgccccagtagactgactgggcatcaggtgcaagtgcgtgactgtccccctgtgtgtgagtctgggcctgctgtgattgccggtcccgagtcagtcaaggctggtgtgcccgttactgtggccagcccaagtgtgtgcaggtgatagaggtcccagtgtgggtgtgcaactgtgtgccggagacccttccaccttcatctcaccatggggcagccaactgggagactagatggataggtcagatgcagggtacaagagaaggggggtgctgtgacctgttcaggtgtgggggaagcagggagctaggtttcctgaggctgggctatcctctgggtgtatgggggccactctctgctgcacccccaggctgcctccctgaccccccccccaccccaaaggccccagtccttgttccagcagtccccacccactggaagaagctggccccctgcctgtgggggcccaggccagtccctcatcaacattgactttcacagggtccggcggaactctaccctagggcccttcatcttccgaggctatgactca

SEQ ID NO: 102722 - DNA, 3308 bp, Homo sapiens
ttcaggggggccttcaggcaggaggagtgtctcctggttttgcctagctcccctgcatcccctgtgccaggcccgtacctgcctctgacacccctctgtctcttcctgcagacgatgatgcttttgagcctgtggaggtcagcctgccagcccctggggatggtgggagtgaaggtgcattactccggcgcctggagcagcctctgcccactgcgggggcctctctggcagacctggaagactctgccgacagcagcagcgccctgctcgtgccccctgaccctgcccagagcgggagcaccccagctgcagaggcactgccagggggtggccgccacagccgcagctccctcaatactgtggtgtagacggcctggcctgtaccccaacggtctgggagcacctgtctgttgtagaaaacaccggtccctggggagacttgaaaggcccctgtcccagcctggacgccacgcactgccgcacgtcactggcgggctcgcgtgtgtacatagagaccacagcccgccttctgccaaaagaagtgatggcctgcaccgagcttccttgagggcttcagaaacatgcatagctttggatcactgtcttctcctttataaatggcagaagagtgacaaaattcattcagaccgcacatgttagaggcagggaatgaagaaggtactgtgggccatggccacacctgatgcgtttttggtgggcttacttggtgcagtgtgctgtccagagagacctgctgacccagtctgggacaggcacagtgggagctgccacagtgccccttgctggccgccctcaggagggggcctctggaccgtcagtgtggcgtaggcagtgggtctgcttcagggaggcagcctcttgactttgtcacaacggttgcactgaagatggcccccacaagcccagttgtgaatatcaaggtgaccctgcccctggctgggagctcccctggggctctggaacctgaagccctgagaaggagagcttggaaggaggttgagctcttcactgtgtctttccatctgggctctgcagcccagctctgtggcaggaggcctgaccccaccccatcagtccctctcccagcattgctgtgcatggctccctcaggaagaagctctggagtggggccgaggccccagatgctctgctggggtctggggactgagctgcctcctgtctctccactctggagccctgggctcttgcctcctgttgaattgcccctgggcctgcccccggccccatttgtgccataaagggttgcttcattgcaggaggggtggctgaaaccaccatcctgggctgcatctatctccttaaagtccactccttacatcaccgccactactgcagctcagtgcccagcggccgcatgcacacctcccggcccctcctcagcagcgcaggggctgggggcccttcctggcacccttttgcctgacggaccctgttgcctgctcctgggcagtggttttgttgcctgacacagggcctttaacatttctgaggtttggagattaagcgggttctgtgcgatttttagcacatccatatcttttctacgttgaatgtctggatctttcctttgtatgtttgtgtctctgtgtgtgtatgtggccaagcgtctgcaggtgagggtggcacatggaacttcacgggtcactgggggcccactcttccagggtcatcgatgcatcctgggctgtgctgaggcagtgctgtctcgctcagtctttccagaccagcggggcagcacctgggaggcctgtctgaagcatgcagttctgtggtgctgctcggggatggactccatgcacagtccacttcttgacacattctcacactgtggctggagacccattttttccatcccatgtggaatgagaatcttgagttgcccacagacagacttgacctttgtgccagaactgtccagagctgtgagttttgttactgaattgcctgtccctgagcttggcctgctggagcatgatgctggaggctgtgtgcgggcaggcttgtgctccccttggagaagggctgctacttaacaaggaagtcctggccacaggagtcccctactggctgcagaggacgaagcaggaagcatgccgtggatcccacatgcactggggcagggcagccaggttccagagcagcaggcatgtgcattatgggtgccaggtggccagtgagggcccgaggaccacgcagcagagtcccccacgggcctgagcctgagagctcagaggattcctgccaggcctcagaactgtgtgtgcgggacagggtggctggcacgagatgtgtgggactgggacgcttcctttggggaccagaggaacattaggggccggtcagacacgtagggggcagtgaggaaacggggtaaagtggaccatgcaggctgcagagggtgggccttgggctggccggggttgctgggtggccccttccccatgggcctccacaagcactcaggccactggcacgttgggccaggcagaaggtccacatggcagggctgcctggaacaccgctgccactgtggctccaggaggcccttgggagcatgaggagagctggactcgctcatctgttcttgcaccaccatccagaatgccccctttgcaaggcctgctgcagtccccagtctgaccagcaagtcccggggtcacccttgctgaaccttgtgctccaggggtcctcctcctctaggaccagcttgccacggtttctcagagcccaggtgccctctgacctgccatgcggaggtgggatttgatactgtacattgtcttgatgcctgtttttttatgttttcattaagggtttttagtttttggttgggttgacactaacttttcttaagatgctgtgagaatcatttcatccaaatgccaaataaacttgtgttccggaagaggcatggttagtccttggtgtggcccccacggctgccacaggctaaggtggaagaggctgggtacccacctttcagcagaatgcacctagggtttgcagcccttgcaggcgtccatcaaaccccctgaggaccaggcagagctgagcctggagcccctaggtggagtgtgcagggagagcagcagccctgagctgcctacagctatcctgcagcacccagccctgcttggggcatcggctgctgccttggcaggtgttgctgacgtgcacaggatccacataaaggcaaggctgcttgacaccatctgggagctagcatgggacggggtggtagggcagggcttggaacctggccgtca

SEQ ID NO: 102723 - DNA, 1790 bp, Homo sapiens
gtgtgcagccctggcccctggaaaaggatgtgcacctctgcaggagggccgctccccagccacacctggggtacacagcacatgagcgcagcctcctaggagtgctagtcctaggacaggaaatcctagtttgctccggtgatggtcagaggggtgttggcacacagcagcctggggccatggtgagatgctcctcctgacctgggattcgctcttctgcttctgtgctgtcaccatgttcttgattttgagcggccttatttcacatgtatcctaaagatggttgggtgcagggagacactgtgtgccttgtccacacagcccgcctgggcaggaggacgacagcatccccagcgtagcacgagggtggcccccttctcagagcggccatttcctcccctccccctcagatggcaacagtctgtttgactccatggccagcgggatgcgcctggtcgtcagctgcatctcctccttcctcatcctgtcactgctgctcttcatggtccaccggctgcgccagcggcgccgggagcgcatcgagtccctgattggagcaaactgtaagtgccctctgagggccacaaccctggtccccatccccaccccaggtcaccccatgtctccatgagctccccagccctggacagagaggggcagaggcaggtttgaaggccacatgttgtggggtctgtgtcctcacctgtgggccaggaaagttcttgccaagaccctccttattcccattgagccacagggtgggcagaactcggaggcctctgagggtcagaggcccggatcacccttccagctggaggggtgtggtcagccagaggctgggtctgacagaagtgtcagcccagagggacaggttggtgtggtgagggtgagacatgccacggagcacaccaggggtctcatggggatgccgaatgtggccgaggggtaggcagcggggcacaggtgtgtgcactcagggacggcaggcccagcctgggggtggggggctcaggagccaggcagcctgcccccagtgacttgtctctgttcccgttgcacacttttgatggcccagtgcaccacttcaacctcggccgcaggatccctggctttgattacggcccagacgggtttggcacgggcctcacgccgctgcatctttctgacgacggagagggtgggactttccatttccacgaccctccacctccctacacggcatacaagtacccggacatcggccagcccgacgaccctccgccgccctacgaggcctccatccacccggacagtgtgttctatgaccctgcaggtgcctgactccccagggagagggaacaccttgtcaagtaacctggcacgtggggctgagcccagcactcttgcccagctgcagaggcctagggacctcacttctttccggctttgtctttggtttttcctttaaggcttctcctggggctgcccgtgcagaaggggtcctgatctccctgcctggccgcccttggcaatctgtgcagagagctctgagaaggcctgggacccctccctcctacctccctgccttctgtgagcacctgtcatctgggcagccctcagggccctcagcccagctctagagacctggggagcccgacagtggtggttgtgaagacagggctggcccagacccaggagccaatcacttgtctgtagacacatgagctagagacaccatggtgacagcccctcctgtcgtgtcaggaggcagctctgtgaggtgggaggaaagcgtggcttctgtgctactg

SEQ ID NO: 102724 - DNA, 1050 bp, Homo sapiens
tttgccctggctagatgtactttgttctaacagtgttgtagtgactgctcttggacagccactccctgtgccatgggccagagatccatggcattccagccctgggaagactctcagcacaatctggccaagtcttcagttgccttgttcgttccccaggcccaggtggggaaggtcagctcatgtcaagtggtgcagcagtgatggcagtgtttgctcacagagctgtcttagaggctttgatgccattactctagtgggcatgtctcacatgccccctccagctgcctccttcccattctaaggtaacaggtagcattcacaggcccacacggggaggctaccttttttggcagtgtggcccacacggggaggctaccttttttggcattgtatacatctgtacacaatgtatgctcattgcaggtcaaacatgtgttgacatcaaggacaacgtggtggatgaagggttctacttcacccctaagggggacgacccatgcctgagctgcacctgccatggaggggagcctgagatgtgtgtggctgctctctgtgagaggccccagggctgccaacagtaccgcaaggaccccaaagagtgctgcaagttcatgtgtctggacccaggtgagactcttgataggacgtcccaagtcagcctccctatttggggctggaggctgggcgtccctttgcttcctcagtggtgaggactcaggagagtttatggagcatcgcgcagcagcaatggcagcgtttgtcacagagatgtctcagagactttgatgccactactctagtgggcgtgtctgacacgacccctccagctgcctccttcccattctggggtgacaggcagcattcacaaatgaacttgaactcaagtgtggctgtttgttcacaagtcaccactgacagcttcaaacttgtcttcaaacttacgcctccagggtttaagccgttctcctgcctcagcctcaccagtagctggaactacaggcgcatgccaccatgcctggctagtttttgtatttttagtagagacgg

SEQ ID NO: 102725 - DNA, 1050 bp, Homo sapiens
ttgcccattcccctgtttgcattttaatccagtgtgccacaatccattactttgttattatgctgttgctctaactttaaatgccacccactaaccgtgatccagcaccctcttctggtgctcaggctggcacttactgctacccagggtttgtggcctgtgtgcttgcaggctccaaggagtggctcccgctaggcccagcacctggggtgactcccaggaggttggggagtcccgagtgaacacctggccacagtgaccaccagtacttggcggtccaggccctgtggttgatgatcctgtctgacgccatggtccccttgaggactgcacagcttgtcctctgatgtgatgttgtccagccccaccttttgtctccccaacaggctcttcagaggtgttcctgcccccagaccccatctttgcctcggccatgtctgagaacgacaacgtgttctgtgcccagcttcagtgcttccatttccccaccctgcggcaccacgacctccacagctggcacgccgagagctgctacgagaagtcttcatttctgtgtaaaagaagtaagcccccttgagctggcgttcttggggaatgtctgggcccttgtgtcactttgttggaccctgagttcaaggtttcggaggcagaacctgatttgcagtgttgcggtggacgccccttaccagctcacaccttgttcttggggcccatttgcagctctgtgaccagggcagctggtcagcatcttagagcccacggaagcatcttagagcccagcttcttttcccacggaagagacaatcatccctgtcctccctgttgcagtgttgttaagagagtaaatgggaatgaggacccaaggacttggcatctctggagcatctaaggctgtttgtcacctccccaccccccatttctgccatccttctctctgcttctctgcttctctgtttaccttgccagtctatggtgtgtgtgtttttttttttttattaaagccagctaactctattgcttttgggggacaggggtctcaggagctcttgg

SEQ ID NO: 102726 - DNA, 1105 bp, Homo sapiens
gggacagataggcagctcaggccccaggacaagggctgcagaggaaggttgcacacgtgggtctccttcatactgggagagaaggccctcaaggaaggggtaggggcagcctgggctctggagagaactctttcatgggccatccccatggggctggaactgctgagggattttaatttatgcaggaccctttgctgtgctagcaatgacctgttagaaaatgcaatgaagagggcctccatttcacaatagtaacttaaaaaacaaaaactgccacggcataattttaataagaagcacacgggacccatttgatgcgagcggcagtgtttcatagggctctaaagaaagcctgcattgccggactctgtgctacaggccccccctccggccttgcagccctgagtggtctgaaccatgctggccagggagactgcgactgcacaggcaggactcacagcacacatctccttttgctttcagaagtgaccggggaggtgcgtcctcatcatgggaaggaggctgtggatccgcggcaggggcgggccagaggaggcgacccttcgcacttccacgcggtgaacgtggcgcagcccgttcgcttcagcagtaagttgcagacctgccctgactgggacactggggagtgcaagcctgacatgacccctgcctttccagcactactgtgctgcgtgaggggtttctcaaagcagcccttggaggccagtgaggggaatgaatgaggctgcatgatgacccacccgcagtcacccagcgctggagtggtggtatgtgactcaaggccctaggaagtcaaccggctctgaggccaggctgcttgttctcacaaagtgactgcttttcagggccagaaggcactggcccttggaaattccaaagttgtattattcccttttataaatgaggaaaccagctctgagtttagatacagcaataaaatgggaaggctcgactccttatttatttatttatttatttatttatttatttatttagagacggagtctcacgcttgtcacccaggctggagtgcagtggcataatctcagcttactgaaacctctgccttccaggttaagtgatt

SEQ ID NO: 102727 - DNA, 2348 bp, Homo sapiens
agtcttttctgcagctactcagctcggctgctgtagcttgaaagcagccatagacaatacatatttgtggctgtgttctgataaaacctgattttaaaaacagatgggggccaggcacagtggtacatgcctgtaatcctggcacttcgggaggccgaggcaggcagatcacttgaggccaggagttcaagaccagcctggccaacatggcaaaaccccgtctctactaaaaatataaaaattagctaggcatgatgacacatgcttgtaattccagctactcaggaggctgagggacaagaattgcttgaacacggaaggtgaaggttgcagtgagctgagactgcaccactggcactccagcctgggtgacagaatgagactctgtctcaaaaacaaacaaacaaacaaatgggaagagattgatccagcccatgggctatggtttgctggcctactgccacttcctcaatggcctctcaccctttggtcccacagagctgcggtgcaaccctgggcagtttgcgtgtcgcagcggcaccatccagtgcatccccctcccctggcagtgtgacggctgggcgacttgcgaggatgagagcgacgaagccaactgtccaggtgagtgtgttgagtaggcggggtacacaccaccttgtctctttgttgtagctgggtgactgtgcctcttgtgaggggtggaggtgtgtgctgtcttaacacattggaaagttagtttgagccgaccccttcctctctctctgtctttctgtctttttaaaaaataagtgcccaacctaggcagatcccagaacttgcaagatggcagggctgtggggaggcccgtgagatgcccaggaggctccacttaaggaggcgctgcactccctggacttggatgatcttgagtgtgaacccctcctgaggggtggcaccttggccacctctctgaccttatccccatcctggctctggatgtgggtgcctcttgatcctgaatgtgctcttttagactggccttggcacgccctcccctcctgctcactcattcacctggaactttgcactcacaggttctctcctggccattatgtagtctcctaaagatgtatggaaaggccacaaaaaggctaaatcggagaaccaggttcttcacctggtttctgcctcagcaccctcaaggaatacagggcaccccatgaataacaatgttcactggatccgttgttctcaactttggttgggtgggaggtgtagtgagtacttgtgcatgtgtgtgtgaatgtgtgagacatacatatacatgtatccatgaattcgtttttaagactaggtggtgctgataaagccactaaggggaaagtgtgtcttaccccagcttgagaatcacaggcttaaatgctttggccagacatgcagactccttcacaagctggtttaggtctgctttgccaacctgatttatcactacttccccttcagtggctcagctgggctgtttcttgtgcccaccccattaataatcttgtagatgtgtgcttcctttatgttttcctggaattctcttgttctgtttctgcatagacaagccttaccatccttcaaggtgtagctcagatgttaccccagtgggagaatgtctgtggtccctcattttatagattggcttcttccagtcccccattcgtccctctcttatagcatcagaaccattggtaattctcaccattcctggtgcccaggcttgatttttccatccagaccatgagttcccagggggcagagacctttctccttccttagtgggacttggcctaggacatgaaaggtgtgctgtaattcctataggcttagtactgaaggaaaaccaattcattccaaccagggtattaggtaggggattaggtgacatttgaacttgtggtagttctttgagggggggttccaaaataagaagcagagatggtctggtcagattgtatttgcctgtaaagaatgctgtttaggcagggtgcgaaggctcacacctgtaacccaacactttgggaggctgaggtgggtggatcgctttaggccaggagtttgagatcagcttggccaacatagtgaaaccccgtttctaataaaaatacaaaaattggccaggtgtggtgctgcacacctataatcccagctactcaggaggctgaggcacaagaattgcttgaacctgggaggaggagattgcagtgagtcaagattgtgccactgcactttatcctgggctgcagaacaagactctgtctcaaaggcaaaaaaaaaaaaaaaaaagccaggtgcagtggctcatgccttataatcccaacact

SEQ ID NO: 102728 - DNA, 1123 bp, Homo sapiens
ggaggatgagagccttgtggcagtcctgcaaaaatgccttgggaggatgggatccgggggtaggggacatggctgtggagccagctggcctgggccccaccctggtaggagcttgcttctgtgatgggagctgagctgagaggtgagagcaagtgtggcttctcattaatgtggatcctcactgaagctcaccagctgcccagcctggggtggagggttgaggggctcccagagggagggaccccagcaagccggtgctgagggagctgcctctctgatggacttgctggcacctggctttgagaactggactgccctgtgtgaggatgtggctggaccttccctgggttgtttgcacagtgcagggcttgtttctggtcaagagctggctgggtgcatgggctgcatgggctgcacatgcttgcctcttggccttctcctcctcctctgcctgcggtagctgttgcttcagtcactctgagctggtcattgttcttagtgcccttgtcccctacaggtccctccctgtaggctgacttctggctgacctctggcaaaatggcagacagctatcagtttggttagcttgtcttccttggttagtctgtcatccttcagctgttggctgctactgttggacaggacagtactgaggacagtattctggtgggtatggtggactaagggtcccccaggtagaccctgccctcttccttgcctgggaagtctcattttctgggaaaccttccttaggagttcatagttgtggagaggattgtttgtggctggccagggcactggatgaggggcaggagtcacagcagagggacccagaaggtcaacacagggatgatcagcaggagactgaccacaggaccgggccagatgctccattgaaactaggtctgctgatgcagaggtctctccggtgccactggctgcttcttagggcctccaggtagattagtttacctacagaactctgtctatggtcttagaataagaggacctggaagagttagaggcttgttgggggccatggcaggcctttgctgcagttcttggaggtttcttggccactcctgacagtgggagcagctcttcggatttccccatctaccct

SEQ ID NO: 102729 - DNA, 1136 bp, Homo sapiens
ccagcgtcggagtcgggctggggacagtggctctcaggggcacctggtttcacagacgtcctcccagcagtggcctagtgccagcctctcagtcctggaaactcctcgcctggacagcggtggttgtggctgtcattcagtgagacgttgcgctaaggaagtcctcaggtcccaccgggcctagaggaggcaccaggagtcagcctagcgttgtgtggccggcgcgagcgtcccgggagcagagacctcgccactgtgcggggcccttagccgtgctgcgtgtatgtgatgaatgagtccgtgctttggaactcccctcggagctagtgtgttcttaagtctgtggtggggaatcagaaccgtggcaaccaggagacccttttctacctatttcggtgtacctccccttgaactgcaccaaaaaatcaaactccctaaatgcagggccgatgtatccatcaggcacaggaatcctggtatcacttgcccacggtacttttagtagccttcgaatgttattttatttttttttaaagtcagcagaaaaaaaatgaacttttaggtcaaataaaatgttttcgtatgtatattaatacagtcatctttatactaatacagtgaaaaagcatgactcttaatatttcttaatggaggaaaggtcccatgaaggcagaagtgccagggccatcttctctgatgacctgggtgtgggagcacggggtgtgtggccctctcctgtgccctagccaggctcccagcccagatacaccgcacctcttggctctgcgcttgtgtcatctatgtggaatgtctgcctcctccctagtgcctgcctggtggccaaggccctgaccggtgctcaacctggacagattcagtgatgcttctctggtctccccatgtagagctagttgctcactgcttttggctgctctctgggcagcgggatgactagttgtggggtggccttggtaagaacagaagccaggaaaagggctacctgtggaggagggtatcatataggctcttggaggtcagaaccaatgggtttgtggattcttgtgattaacttctttagaaaacatatatgtacgtgtagagaggtagaaggtcaccgttttctgattcttgagtcc

SEQ ID NO: 102730 - DNA, 1070 bp, Homo sapiens
ctcagggatcccccgcatttgctgccatgctggcagtaccatcctcctcagctcagagtgactgtgtctctgcccaggctcttcctgggagccaagggaggccctgctgccggcagctctcagcccacctaaccctgcctctctcacccattcctccaccccagcctcacccccaaaggcctgagcccagccatgtcgccagccctacagcgccttgtgagcaggacggccagcaagtacacagaccgggccctgcgggccagctacacaccatccccagcacgctccacccacctcaagaccccggccagtgggctgcagacccccacaagcacaccggcgcctggctctgccacacgcacccctctcacacaggacccggcctccatcacggacaacctgctgcagctccctgcccggcgcaaagcttcggacttcttttagagccaggcctgggctgggctcatagacgcttcacagagcctgcagggcagctgtacacccagcagaggactccagccttctcggggcccaggcctgggccagaagctgttgaccataccaggagtcactggagaaaggggctgtgctggggccagactggcacaaggcactcgtgcccacaccacaccccagggccttgccaagctgtttgctgtttaattggccccttgaactgtcattaaagaacacctaggtacagtctggggggttgcctctccatcttgctccccacacgagccctagccttgccctggggcctgcatcacgtctcaggactgcggggcttgaagcgaggggccccccaggtgaggaagctgcaggtggggcggctgtgggagcaccgggtgactggcgttgctttctgcggcactcggaacctgtgttctgagttgagctcacatcctgcagtgctttctgcttctctggggggatatgaaggagaaacggagcccttggaagttgtacccttaggttcccctgcggttctgggcccaggtctgcagcctccactctgggcttgccggctgtgaggtgcgctggttataggactgtgtgggggctgcata

SEQ ID NO: 102731 - DNA, 1037 bp, Homo sapiens
tctttgtctgcaggtgtgaacgagtccccgatgatgacctggggggaggttgagaacacacccttgagagttgaagggtcggaaacgccctacgtggacaggacacccggcccagcttttaaggtgggttgtggtgatgggggaactgtgtgcgaccggggtggacacctctggagccctgagtgcctgtggctcaggactgagcactgggatcggcccccagctgctgacgggcagagtgctggcttttctgaatgccagggtgctgaaggcaggtgtgggtgggtggacctgtcacagagggatttgggggtgtaagggctgagacaccaaggcagggagtggcttgggccctctggatcctggaggccgggtgctgttcatgaatgaggcaggatggtcacagacacgtgaggagctctgcaggcctgagggccataggacgaggctgtgtgcttgtagagaaggcccctggttacagaacacgattgggacacgctggattacacggctcaagcctggtgttgtaggagtggtcagggtggagtgtgtgaggcccggcacagaccaggggaggctcttcgtgggctgggtcagatacaacaggcctccccataccactgcgggcctttccccagaatacttagtacaggtaacccatgtccagacaaaacatggggagaggttctggttaccttggttctaaattgtctgggacacaaggataaccaaggcaaacgtgcgagagggataatgaagaggatgccgtgctgtccaatgtgagagcgcaaggcaagggctgaggtgcttctgaggtatgcctgccactgcttcccgagtctccaggccaacagtaaacagataaattctgaaacaaaccatgatccaagtcagaatttggggcccgataaagatggcaactcagattgcactgaatagcagagtatttagaaatgaagggagctgggtcctcaggatgtgtagcagcatacattgtggaaaggtgaaaaggttacatgtaaaaacaataaccataa

SEQ ID NO: 102732 - DNA, 1094 bp, Homo sapiens
gggtggattctgcccccgtggggagtccttggcagtgtgggctttcatgggcagaagccaggaccaggggagaggattccagccctgcatgttgggggctatgattcctgggcctgggtgtcctcctctttcctgactgcaaagggtgctgtgttcctcctcccgcaacccctaagcaggagaggctggagaggaggaggagaaggagccgctgcccagcctagatgtcttcctgagccgctacacgagtgaggacaatgcctccttccaggagatcatggaggtggccaaggagagaagccgggcacgccacgcttggctctaccaggctgaggaagagtttgagaaggtgtctctggggtctggggtgtcacataggcgtaggcaccctctgtggtggttggggagccccagggccatgggtacaatgcccaggggcatctctgaccatcacttttccccatgtgattgcagaggcagaaagataatctcgaactcccgtcagcagagcaccaggccatcgagagcagccaggccagtgtggagacctggaagtacaaggccaagaattccctcatgtactatccagagggtaagtggcgggcctcgcagccaaatggggaggtgttgggtagagctgtgtgtgtctggctgtgtttggagcagccttccaggtgtgtatggccgtgcccccttgcagtttgggcttctgatgggtactggtctgtctaagggtggacaggtctgtgtgaggtcagcagtgagtgagaccctctccagcggcactggggcctgcgttctgctcaatgcttttgttcatctgggagtgacttggccgagaagcgagctcctcatgctccttaggctgctgcccttctgacacctgctgctacctttgcttcgtctgccaggtgtccctgacgaggagcagctgtttaagaagccccggcaggtggtacataagaacacgcgcttccttagggaccccttcagccaagccctgagcaggtgccagctccagcaggcagccgccctcaatgcccaggtgagcaggcgggtcagcagggccgcatgggccaggttggacagggctg

SEQ ID NO: 102733 - DNA, 1111 bp, Homo sapiens
cagcctggctttggtttttcatcacaagacattttattttatttaatttcattttatttttaattttttgacacagagtctcgctctgtcacccaggctggagtaaaatggtgtgatcccggctcactgcaacctccacctcccaggttcaagcaattctccctgccttagcctcccaaatagctgggattacaggcgcctgccaccactcctggctaatttttgtattttgtagtagagacgaggttttgccatgttgtcccggctagtcttgaactcctgacctcaggtgatctgtctgcctcggccccccaaagtgctggtattacaggtgtgagccaccgcgcctggccaagacataacgttttaaaggcatttctgtttatggtctctttccctaattggcatcccttgcacaagagcagaagctttgttttgctttcatctgtatgctccgtgttgggaacagcacatgtggtgttgtgggccttgcacagatacacatggaacagatgaaagagttgtcatcttcagcatgtttgctgggacacacagctctatatggtaacatcgtgacttgatgggggagtcggtttaggaaagggcactccgagtcctgttgaatgcaagtgttctgcacgccatgggacttctgcgttgtcaggccctcttttcatcagtagtagaatgtcagtgcatgtatagacaaacgagacactctttcttatcagtttgtagactccactgtgctggagtagcacagatgtgttgtgtgtttgcacaaacatgcaaacatgatactttttgctttacaatccagctttttcggccattaacacagtccttgttgtccttgaagcttgattatctgttgaaatgtagcttgtgcatcacagggcaatttgtagatttttttcttctccttttttttttttttcctatagagatgaggtttcattatgttgcccaggctggttttaaacttctgagctcaagtgatcctcccaccttggcctcccgaagtgctaggattacaagtgtgagccatcatgcctagccagtttgcagattttcaatacctgtacacctacatgccagtaaatataggaat

SEQ ID NO: 102734 - DNA, 1076 bp, Homo sapiens
ttctagagccacagcttttccattggccaactattggaggcgcctgcgcaaatggtgcagtcccgccccctccaccctgtgacgcgcctgctgggcccgagctttttcctgggatagcgatggagacgccgggcgcatcagcgtcgtccttgttgcttcccgccgcgtccaggcccccgaggaagcgcgaggcgggagaggctggggctgcgacgagcaagcagcgggtcctggacgaggaagagtatatcgaggtacgacctcggtgcggacgccggcgacttctgggcccatcctctgcttcaagctcctctcaggttccctctctcgggtgttgacactccgtctcctcgtggaagtggaggagccgggtgtggacggtcccacgagtcaagtaaacagggcagaggaagacgtctgtggtggaagaggctgtagtagtgttgtcagggaaaagagagagcggctctctttgtatgggacgggggtcagggaaagaagattttctgttaaagtgtgagtaggagtttgacaaactggaaggatggtggcaaagagggctttctaaagagcggtggcagcaagtgtgaatgctggggttcctggaaagagaccgcagttgtgacagcatctcgagtgagtggacctgcgtcgccccaccacacgcacacagaaggaggagctgaaacggggattggcggaagtcagtttggttttagacctgtttaattcgggacaccttttgggatatgtagatggatggctttaacggacggttgggtgcccagatatgcagctcgggagcaaggtctggctggaggtgcagacttgggaatctcaacttgtggtagtgactggctgaagttactcaggaaaaaggtttatttttattttattttttgagacggagtctcgctcgtcgtccaggctggagtgcagtggcgcgatctcggcttactgtaaccaacctctgcctcctgggttcaagccattctcctgcctcagcctgccgagtagctgtgactacaggtgcccgccaccacgcccggctaatttttgtatttttagtagtggtg

SEQ ID NO: 102735 - DNA, 1086 bp, Homo sapiens
aaaagagcagcaaacataaagggagaggctgctcacagggctgccctgtgtcccagagcatggtccgtgtgggctgccctgtgtcccggggcatggtccgtgtgggcagcccagggcggccttggctgcactgcttcctggggaagagttcccagttccctccaccctggatgggccctgggcctgccagctagccaggacccacccaggtggcagccgagaacctgcgcctttgcttctctctctcaggtgaagttcatccacgaccagacctccccaaaccccaagtacagaggattcttccacggggttagggagattgtgcgggaacaaggtgagccactcgaccttcctgatagggctcagggacctgggccagggtgggaagggcctgcacctcccatcctgccttgggctttgtgcaacacccaccccccacacacaccaattcccaaccggggcctgagaggctgcagggtaaccccgtgcctgccttcccgcagggctgaaggggacgtaccagggcctcacagccactgtcctgaagcagggctcgaaccaggccatccgcttcttcgtcatgacctccctgcgcaactggtaccgaggtgtgtctgcatcacagggccccatctctgcacatggccagctcctctcctctccttggggccacccctgggtggcgggcacccaccttttgaagtgctgatccaggcccctcccggcaccctctgacccacctcacccctcctatatccaggggacaaccccaacaagcccatgaaccctctgatcactggggtcttcggagctattgcaggcgcagccagtgtctttggaaacactcctctggatgtgattaagacccggatgcaggtggtggggccgggaaggggaggggaaggggggaccaggccagagctagctgctgagcccctgcctgctgatgtcccccatagggcctggaggcgcacaaataccggaacacgtgggactgcggcttgcagatcctgaagaaggaggggctcaaggcgtgagtgggggaggggcagggctattgtccccacctcaaacctttcccggcct

SEQ ID NO: 102736 - DNA, 1042 bp, Homo sapiens
tcacagtttctcacctgcagaggaattgttctttccttctcccgtgagcagacacaaggttctctgccaggccaggaaagtccccacaatctaggtctcttcactgacacttgcactcagctgtcactctgtgtccacagggtctgcggaagagggagctgctgaaggagctgctaccagtcatcgggcagaacctccgattccagcgcctcttcaccgagtgtcaggaacagctcgacatcctgagggacaagtagcctgccccagcctgccctggctgcagcaagggcagggccacactctcgccgctgatgacatgcaggaccgcctctcacctgaccaggctgtagggggaggagacactggcaggagatgtgctgtcctgcaccagcgccagcccagctccctgggcagatgtgccctgtgtcctgggtctgacattgcctcaggagggggaagctcatccctccctccaagcccccgatgcggagctagggctggagctctgcccaggtgccctggggccagcaaggcagtcccaggcctgccgtctccagcacggccccaaggtggacactagcccctgctgctgcaggcaccatgctgcttcagcagtgacgattgagccatttgtgagagagaatccggaagcgttaggtattacagcagactgacctaagacctatgtaaaaggaaagctgttccaacacacggactatttttgtactagaatttgctaacttgtaatattgaatttcctttggccgataatcaggatttccctataagtcacttggacattggtcacttgtaggaaatttaaactctaattatgacagctacactgaaaaataattgtactgaaattaacttgtctatcttcatttggttttaatttttaaatgtttgtaaaaagagactgttttgggggaatggggcaaaggggtgggcgatttcttttgtaagtgtaaaataaatgaacacgcattgaataccaaaccctcctgatttctcttgccttttccttctaactttcatcctc

SEQ ID NO: 102737 - DNA, 1523 bp, Homo sapiens
aggggctctgggcttggttgtgaagacaaaagacggaaggtacttccctgccttcgtggagctcggtctggtagggatgcacacataaacagggaggcagttaggtcaacaaaatattttcagactagattcagactaagaaggaagtaagcagggtcttcagatgagagtgcctgggaaggagtgaccaggaaggccttgtgagaggacactgcggatgaaacccaaggagaagagtgagacagccatacagagacctggagaaagtgtttcctagtagaagtgagagtaaaagcaaggagtgcttgatctgtttggagccactgtggctggcacatagaaggcaaaaggagagggtggtgtgaaatgaggcaggaggtggaccacagagacctttacaggagctagcgttttcttcttggcagagttggcacagaggtgtcatgaactaaaatagaaaaacagtcagggagtatcttctgtaacagtcccaggaagagatgaaggtgacttggatcagtgtggtggccatggagaggggaaaggagacagattcaagatgtattttggaggcagaaccaataagatttgatgggtggttggatgtggaaggaaaaagcataatgaacatgtggcacctccaggttcagctgcaaaaaatggatgccagaaccattcattaaatcaagaaggtaacaggttggtgggggatgggagaaggtatggatctaagagttagctcacagcttcattcaatcattgagcaattactgatggggcacctcccctggccaggcatgttataggcatagggcaggcagcagtgaatggggcaggcagcagtgaataaggcagactgagtccctgcattcatggatctgctttcttatggagagagacagactaagcaaatgagaagaggtatctgtagtgtcttgagtggtgatggatgccatgggaaaaaaattaaaagggcagggagatatagaatactggcaggctgctatttcatgctgggcaattaagaaaggccaggctaagctttcagtgagccaagatcgcgccactgcactccagtctgggcaatagagcgagactccgtctcaaaaaaaaaaaaagaaaagaaaaaggaaaggccaaacaaacagataagcagagaccagaaaaggtgagggatgaaaccatgcatatatttgggagaagaacatccaggcagagggaaagtgcaaaggcctgaggtgggagagcttggagtttaaaaggaacagcccaacgggatggtagcagaagggtgaaaggagttgacatcaaaaggccagagggtcagccctcacaggccttggtgtgtacagaggcctaattttttattccattcttaaatttgactgtggtgtaccttaattgactaggtactttgaatcctgggttcaaagtcaaatccccttaagtccctgaaggcattgttccatagactttgcatccagtgttattgctaaaaaaatctattgtaaatctaatttcca

SEQ ID NO: 102738 - DNA, 1881 bp, Homo sapiens
atcctcctgccatccccgatctctactttgcattgcacaggctcctacgtcatggcgctcaccgctgcagccacactctctgtctggtgagaggcaggcacagggtggggtgggcttcagccagggcaggacagggctgtgtaggccccacctcactgcaggggcagggaaggcagtggacaaggctggccatcaggccccagaagaggccctgagcagttagtgatattgcttgtgttgggtgccctgggtaggctgagggctgaggggtagtgtgcaagggggatggaggcagcttgcctgctcgattatttccttactggagcagcccatgcgaccagttgcactgccagggtcctatgcaagattcatcagaaatggagtcttagctggcagaatgtggccatgttcctgatgtggctgctgtggcctggcttcccccaaagtggtgtgggcgctgagggttccccatggctctgttgcctgggctttgtgctgcagccttaatgcagagggagtgtagtggcacatggagagcagaagccactcgtagcccagagcccctctcactaggagaggccagggttagggtcgcatgcagtagggccagggtgtctgagcagccaaggcacactctgatgtgtttacctgggttggtgagtaaactgttccctgtctccctcctagggatgttcacagacaggtggttgtggtgaaagaagagtctctacactccatcctggcaggtaatgcaggcaacaggctgtccctactcttttgggggcccaagttcatgtctgatgctgcagaagggccccgctcagagagccaggctctggcctcagcccagggctctcagtgaggcaggaggtgtggttacgctgcaggagacacacactttttgggggcatgtttgaatgggtccccaagaggtgacaaaagcctggtgtgtggcaaggagaatggcttgccctccctatttgccaaggcagtgttgatgcatttgctgctgggactgtgggagcctagagtacagatttctcctttgatatgtttgaaaacacttgctgatcagagcacacccagaactcattcccatgctgtcctcaggaagtgatatgacggtatcacagatcttgctgacgcagcatggaatcccagtaatgaacctgtccgatgggaaggcgtactgctttaatccgtcactttccacatggtaagcaagctgacccccagtcctattccctggaagagtgtctgtctgctctagacagcagagcaaagggtcgtggcctacagggctgcctagccctgcttttcctgagagtcaggccctggagtgcaggctgcattgactatctgtgcatgctcccctgtcccagcaggacactgcagcctatggcctctgccctcagagcctgtgtgcaggagcactgtcctcctgcattattttcaggaggcactttttgaaaaagccccaaaatttttatggtttttgctgtggcccccttagccaccatgagcataggttagtgggctttacaggagccttaacaggactagtcaatttctgtgagcttagtaagcacttcagacttcctcagtgaattagtaaggatgcttatccacttacccaggcatgatggtctgtacttttcctctgtccactcaggaatttggagcccttttttgtacttgcaaaataatttatacatcagagctcttaacccagacacgtgaattatgtacgttgtgttccagccactccaagttcttttcttctgtctatacctttggtccttaagaaccaaagcttgctacctcctagccccttttctgttaagaactgccatgcagaagtctacattcacactgagactt

SEQ ID NO: 102739 - DNA, 1093 bp, Homo sapiens
ccttgtccagccagatccccaaagtctcgaattccacactgaggtgtgcctggctcaccttgacctgggctggttccttttttggatcccagatttccatccaagttggtcaggatggatttctgactgtccctgaagtccccatcccagcccatgccagattctgcactgtgagggggaccttgattcagtgattagtcacccagtatcttcccctgggttcctagaactgtacgtgagccctgtccctacctgtgttcaatgtggaaggggaaccaatgtttctcctcaggttcctgtctgatgtagcatcccagtcaggaccagatacagtcatcataattacacccttaatcatctgccatgaggtcccatgtaaatgcttttacttgtgtcaaagcacatggccttaggtcttagaccacaattctcgtgggccctgagtgagttttgtgtttttaggcctaggggaccccactgtttgttctgttcctccctcaaattccccctccagatgagccatttaaattcccagtcccaggcacctgtgtatcagatgcttccacaggctcccactctctgtccctcccctcaaggcaggtggcttgcccagctgagggctaaggggtgtcggcacagcctctcccacagtgacatggcagctgtggggcaagcctgctggaccacgtgggacctctcctcctgcttagtcctgcccagttcaggcccagcctgcagacctgttccccagtgttacagcccaaaaatgatggctttctttgcagtgggctggcttgagccaggctctgaccaccagagatgggcagatagaattcagtcacagtaccagcctggccaacatattgaaaccccatctctaccaaaaatacaaaaattagccaggcgtggtagcatgtgcctgtaatcccagctactcgggaggctaaggtaggagaatcgcttgaactggggaggcggaggttgcagtgagccgagatcacgccactacactccagcctgggcgacagaccgagactctgtctcagaaaaaataagaattcagtcacagcactgcagagagctccttgttgcc

SEQ ID NO: 102740 - DNA, 1049 bp, Homo sapiens
ggtggctgttatttgtttgaacagaaagttgtctctcagatcagttgggaatatgaaatacaaaagattctattttatgttcattgttttttttctctaacatcactcttcctttcttcatgcagatgtgagtttctggcctgcatcatttatcttctctctgaaagacttttaacatttcttgcaaggcaggtcttctggcaacagattccggtgtctctttgtttatttttgtctgacaaagtcattatttctcctttacttttgaggcataatttcactggacacagaattctaggttggcaagaggtttgtttaagcactttaaatatttcacttcactctttcttgcatgaatggtttctgaagggaagtgtgatgtaatgtttttgtgcaggttaaaagagcagaaccttgtgaaagagctgaggccccgagacctcctggagagcagcagtgacagcgatgagaaagtccctttggctaaggcttcctcactgtccaagcgaaaacttgagcttgaggtagagacagtagagaagaagaagaaagggcggcctcggaaggactctcgtctcatgcctgtgtctctgtctgtccaggtgaggccagtgggcccatcctgccttctttagcccacctttctgtacttagagcttgaaggccctgtgtgcatggtaagcctcagctgggtgggtcaccttgggaaccagctggcttagacatgcagcccctggaatgtagcatggaggccacgctctccctcagatgtgcccttgactcacccagggcccttgagcaggttccctggcatcaactggcttgtccatgaggttaggatccttgtagcattcccctctgcttcctccctcccagggtggaaatgctctggtcgcaggctcagcctcacttctgggtgacctgcctttaccaaatgctaccccgtagtgttagagcaaggctcaggaacgtttctggctcttccagtctccagctgccctaaccgcagagaaggaggccatgtgtctgtctgcaccagcacttgcact

SEQ ID NO: 102741 - DNA, 1176 bp, Homo sapiens
ccccagtatgaatgctacctctactcctgctgcattgtcaccttctgtgttaacgaccccgtccaagatcgaacccatgaaagcgtttgactcccggttcacagagcggtccaaagccacaccaggtgctcctgccctgaccagcatgactccgacagctgtggaaaggtaggtggtagctgcaggaccctgaaggaccaggcagggtgcaggcatgggtcaacagcacagtggcagtgttcccaccaagcaacctgccttcctgttggggaaaagactctagccactcaatacatgggagcaagactgcagagcccttagtgagccaccaggagaaagaggtggttccttgaagtgggaaggtggctggaaggagtcatgggggaggacgcggcaaaagaaccacaaggtcaaaggcacaaggattggtcagtgcagaggctgaactgagaataatggtgtttggatggagcccagagtttgcacggaagagagcatgagattagttggagaggtggaagactctgatattgatacatcatggaagtgacggccttccactcagaaactgaccagaggtagagagctgcaataaaaatgatgtaagtgaggtctttgtcaagtcagattggcttctgagctcttgtggacactatgctgcttatccattctctgggtctcccctcaaacacagctgtgacatcacgcaggttgtagttctttatttcttggagttttgcagtagtgcatcctcctgaggtggccagagcgaatgtctgcagcctctgccattggcactgaagttctctgcctcctgagagggcccctccctccaagcctagcttgacaaggagctaagttcacatcccagtgagtcagagcctaggagaggagaggcagatgtgggctggactttgggggcttaagagctgtcccttaagagttgcaccccactgcgaggtttatagggctcagcagccctgggcagacacaccctagcctgtgccaccatcagccaagtacaaggacactggtcagaaacttgcagtagccacacagccagcaggtgcccaatgaaaggagcatttgtatgtgacctgtccttgcagtagatggtgatttggagctaaagccacagcatgctacctctggggctttgcttatgaaaagccctgt

SEQ ID NO: 102742 - DNA, 1046 bp, Homo sapiens
gagggagaaggccaaggtgtctgtgctggatcaggtagtctgggcttttccccagagtggagacgtagaaggctttgagatctccattttaggaaagtgactctgttaggcggtggtgccccaaataggccactccctggcacatacagctgataccgtcagagcgattctccattggtggaatggagtcttgtgttactgcagccccctgcttctgggatacagctgataccgtcagagcaattctccattggtggaatggagtcttatgttacttcagcctcctacttctgggtgctagcaccatggctgtgaaggcatgcccaaacattaggtcactgccctggggggaccctgagagggtaggaagagaagactgagcagcaagaccagtgaggaagcaaagcatgccaggacgaagggagcctgggaaggacagaccatgccagatctgagaactctgtggggatggcccattctagtggccacagatcatggaggagaagaatggggctgtccagggtgactaccaggcatgtggtgtggtgtctgggcagataggagtggaaggtgttagcctgggtgtgcttaggaggaggtccagtggccatggtcccaaagcgtgtggtgtgggcttggacatgaaggatggaccaggcaggcttctgcctggcctctcctttctctgtggaatagaagatgaaagttgtgtgatgagcacttggagcataatgctaagaatgtgacactgtcacagggagatatgggaggggccgctcaggatggaggatgcctgactaagggtaaaagcagaccatggcttcaggaccccaggtgcaggcttatctcatgagactcattgtcaaagtgggaaaggtgagtggctggagtggtttggggtagaggtgctgtatttaagttgtggagatagggcagtgtgactagagaaaagggttgtaagaaccatgttctaggcctcattctacccgcaaaagctctcagaacagtgcaaagggggaaatgtgaatgcatttgctcacaacctt

SEQ ID NO: 102743 - DNA, 1065 bp, Homo sapiens
ttccctgtgggggacagagaagggggaagagactcattcaccacttgctgttgtcccagtgtatatagtgaagattgtttttgaattggttaatcttcccaaaatgatgtgtgttgattcaaaaaaaaaaaaaaaaagaaagaaaaatgataaagcactgtgtgaaagaaatagacccccactgtcaaggcagttcactctgggttttattctcattccgtctatctgctcagggcatttgtaagcccttcatggaggccacacactttaggcctctgcgttttgcagttgtccatccacgagctattccaaatcttccttggtgtctaaagaaaccttcactcgtacagtgtacagatccagtctcctcatgttagatgtgcaggctctgaggtccccacgagtagagcaagaaccaggtctgctggctccccacagagcactcattttcttttgactaagtctttttcctattgtgaccctgtagggggtaatgcccctacctaccttttattgagaccaagtgagacccagtgtgtggttgagctctgaacatactgggcctgtgggatggggaggtggtggtggtgatggtgacactttgttctgtggatccttccaggcgttacctggtgagaaggtgtaggtggcttcctaactggtctggggccaactttctgacataggatgcatatttctagcatcaggacctgatccttttggtattaaaagctttttgccctcctgattcccacgttctaacacgtagcaacaggataggtccttattagcttagctaatcaagaaagaagagaaaaagcataaatatacaaagtaggtataagtgagaaataatagacaaatcaaaaagatgagagacttctttgctgaactctgtgcaaataaatttgcacagaaagtggatggtttttgaagaaaataaaattactaaaagtgaaaaattattgtggaagaaatagaggacagagttaaccccaccaaagccaccggactaagatggcttcacagggaaacttcaggaacttttaaggaacaggtaactca

SEQ ID NO: 102744 - DNA, 2397 bp, Homo sapiens
ccccacagcctcccagaagctgcagcagcacctatgggagcccaccatcccgtgaggaagtgtgtttcttccctgcccattgtcctgcagttcagggccagccagcagggtagccaggcacttgtgcacaagtggaaaggcctaccatagttgtgggaacgtggagtcagagtgtatgccagcaattgagtgactcgatagagaatatgcacagtgcatgctatgcagtcatccagaagagacttttacaggatatttaatgacatacttattgtgtgttaaatgaaaaaacagacacaactatgaagaataaaataaattcttactttgaagaataaaataaatatttgcacaaaatagaagataataattcatcaaagtattaatagtcggtaactaggcccagattaagggcccaggtgtgtatttctgtactacctacacatagtgtagaatgagccttggataaatgtgtaccagagtcccttgggcccagggaagatgtgttgtgttctctctcagggtgcctcatcccctgtctaggctttggcatcgtgtctcctgctccatagaccctctcagaggtccaccctggggctgtccctctcctccgaccatagcccttcagaaacccactcccactctgccttctctgttgctagttatctgtgtataaagctatttcccctgtcagaccacagcaagccctggaggcagggtccactctaggtagcatgcacatttttggcaggctttggttcccacagtttgggatctctgcagctgcagtttgaatagagttgaagatgccttaaatatcagcagccactttgacccaggcttctaggttggttatgttaactgagctgaatacagaaggggatttcagtaatttcattaaccttgactgtgtctttccttccagctcacatgtctgaaacggccgctggtggtcatccatgaactgtttgacaaatccatcatggatatttcctggtaaggtggattctacttacaggaataggttaagaaaggagaagccacacattggaacatgaggccttctgggtgtgactagggtcaggtggccagtggcccctccccaggtgtcatagtagcgcagaccaagagtgctgtttgcacgtgatttgggaactggcagcggtgtacctgctgctgcgagaatgtcctgcctgtgtagaatttgccactggaaaatgccttttcaggatttgtctaagacgaggagaatgacgtgatcctagtatgttccactttactccgtcagtgcatgaaccaaagtcagaagcacactttctgcttctcagtgacctgatttatatgtatactttgtcaagttttttttattttaatagtttcaaaagtaagataagtaaaattgaaaattcttacagaacatatggtaaaggagatattttgtacacctgcttagagctaaagaacaccagggccctttgggatacaattgtcgccccctcccccccccgcccaggccaaagaagggaaccaggccacagaagggaaccaggagtttccagcatctccctagaacactgcccaccatcctcacaggccagctactgcggcacatgtgtctgcctggggctcttgctaccaggctgctgatggccatgtctttcaggactctgaatgggctgggcatcttggtatgctctatggacggctctgtggcattcctcgacttctcccaggatgagcttggcgatcccctgagcgaggaggagaaggtaggctgacggctcttgtgctgctgggtgctctgtggccattgccacaatagctctgagagacccctttgactacaccctcttcttgtgagatacacagacaagtcatttcttaacatgtaatggggtattcatcttttatatcttgtaatccttctttacaaaatagattaattaaaaaacgagtccccatttcagaaataagtcctggagttaagagtagaactattttaggcatctctttttgagctgataataggccatccactgggaggtttttgccctgggaaagagctgaagtgactcctcaggggcccctgctcatgtcactttcaccttcatggtagtaatattggtcatttcttagaacgcattgtctgccaggctctgggaatgtgttttgcacatatgatttcatttaaattgcacaaaacccttcaaggcaaggctcatccatttcgtggatatggaaactaagcctcagaaaatagcatggctctttgcccagactgtatgtgacccttaggtcagaagagtgaacaaggcctgctgcctctgggccaggctgcctcccctctgtgctctgctggggtgatggggtctctctgcccttctgccaggctttgag

SEQ ID NO: 102745 - DNA, 1066 bp, Homo sapiens
ccctgagatgaggcgatgtcttcagcttcttttttttttttttttttttttttttgagacagagtctccctctattgcccagcaggctggagtgcagtggtgcaatcttggcttcttgagtcactgcaacctctgcctcctgggttcgagcgagattctcctgcctcagcctcctgaatagctgggattacaggccaccacacccggttaatttttttgtaattttagtaaagatggggtttcaccatgttgtccaggctggtcacaaactcctgacctcaggtgatccgcccgccttggcctcccaaagtactgggattacaggtgtgagccaccacacccagcccgatgtgtcttcagtttcattgttcccctcaccttcctaactcagtgccctctacagagcaggttctcagcagatatactcaatggtagttggcgagtgagaacccaagggtaagaactgtggcggtttctaagtgagggctcctgaagggttaagtttctcactgccaggggctggtgtgctgtgacctgactgtgtggtaagagacacctccgcatgcagtgcagggagcagtcttggtgctgagcatcaaggtgccaatatatttaaagtttgataaagcaaagtgcacacacattaattttttttttttttcattttgtaaaaaagtgtccctataagcagagcaagttggaagttctgggtttgaaggttatcctctggctgcatttattagtttggtatagagaaatatattactgtgtgcgttgtgatttttttttttttttttaggccaagtattcacttaacacccattctggaacctgaaccacagtaccacagattgccgttcaggggaccttccctgtttcctcccagccagaggccctgtttgtggcgctgcaaccaaaacatcactgactgtgatgcccatatttcttagaatgctcaggttaggcagtcacacggcctgtagatttctgaggggtctgtaggcacatttatgagaggagggacaaggcagctttttctagaagtggaattaaggtggaggcgaga

SEQ ID NO: 102746 - DNA, 1134 bp, Homo sapiens
cagagattcacacccctcctgcccatccccttggcctcccttaggagatagggagtgagtaggtctttgtttctgaagcccccttgcaggctcagcttttctgcaggtcctagggctggccctgcctggccagagggaattgagaaggctagtttcagtagctacgcatcccttctacttggcaagctccagaaatggagagtttggtagctctagtttcaaatctgcatttcccagcttactcatttggtgcctccgcacatactttctgacctccctaagcttcctttccatcatcagccagatgcctcataggtggtcgggaagatgaaatgcatgctcagtgcctgggctcagagaatgtctgtgggagactcccttcagtgggctgggacttgggcacaggggacatgcctgatgcttgattaattatttttaacatctgttatttggctttagaaattcaacccaaaaatcttcaaaaagaagcagaagaatgggagttctgcgaagcctagctgcccgtactgctgctgtgctgttggcagcaaggaccgctcgctttctgtctgggtgagcctgctatcctgagcttttgttgcaggacgggaggtgtaggttggtaaagtagcaagtggaggaaagagacctgctttgggtgatgctaagagtgtatttctattctgcacctggggtcagcccctccttggaagctcacaggctctcctgctctcccagaaggaagtgctgaagactgggtctgtgcccagccaggagaggccaccttgacccccacctagaccagctcttgtgtccagactcaggcagcaccctcagtggtcaatgccatgagcagcatgttgggcttgcttcctattagaaaaatctttatatggctgggcgcggtggctcacgcctgtaatcccagcactttaggaggccgaggtgggcggatcacaaggtcaggagttcgagaccatcctggctaacacagtgaaaccccgtctctactaaaaatacaaaaaattagctgggcgtggtggtgggcgcctgtagtcccagctactcgggaggctgagacggagaatggcgtgaacctgggaggcagagcttgcagtgagctgagaccgcgcc

SEQ ID NO: 102747 - DNA, 1579 bp, Homo sapiens
cacagtggcctaggatttatgtgtcttgtcagtttttctttgtcagttacatttgtttaagctttaaaaagagattcatgcttaagaaaaatggtaactgagtgctagcatggcatgccacagatcaggagggtaatggatgggcagctgttgttggggaccctgatgctcctaaacctgctgtgtgcacccccaccactgggctctgggctcagctcagtcaccatctcctctgtgaaacccttgagcagatacgggctaacacaaacccagttttgcaaaagattgatttttcttattcattgtgtttaaagtcacaacagatggcataacctggcacagtgctgcagtttataactagtaaaattcttctcatatttcagctctgtatttgaagtatgctttccttatggatccaggtcattttaactctttgaaagccaccagcatgtgtggaaacactcagtctggctatggagagggaagctttagagaccggagtagcatttggattacagatctatatggggtaccgtcgtacacacctttgtcttcagccataacttataaaagactcagccacagtcaggccctttgagctagtaggcctcctccttatcagggagctaccagggaggctaacgtcagaagtgctggtgtcacagcccaggaagggcagccataggcagggccgctagatacagataagacctggatcagaactagccccttggtgcctgcctccttgatgctgtcatttcttcaattggcttttgccttggtggagatcaaatgaggaggcccttctgcttctgtctggtgtgggggctggccatggcagactgctgagtcccctctcttgcatatccatcccatggcccatggattgcaggtcatgtttccctcagacaacacctctccacattccttttttcttcacagaaattctagctactctgagaggtcattctggcttggtcaaagggttgacatgggaccctgttggtaaatacatagcttctcaagctgatgaccgcagcctaaaggtgtggaggacgctggactggcagttggagaccagcatcaccaagccttttgatgaggtaagtggggacagctcagggagctgagcccccgcagctgccccagcctcttcctgacttctgtgtacagagagggagctggccatgggccaggccacctggggaatgcacagagtccgggggcctgagcggattcaccaaggctctctggggtgggactctggccctaagagtcagataatacagaatccttcatttctgagacgctgtttaatttccaactttgaaataaaagggatttatagttttgttgttttttgctttgttttggcgacagagtttcgctcttgttgcccaggctagagtgcagtggcacgatctcagctcactgcaacctccgcctcctgggttcaagcgattctcctgcctcagcctcctgagtagctgggattacaggtgcccaccaccacacctagctaatttttgtatttttaacagagatgcggtttcgccatgttggccaggctggtctcgaa

SEQ ID NO: 102748 - DNA, 2122 bp, Homo sapiens
tgagagatagaaaatggcttcctaaattgaaaggctagatgaaatacattttttcccaaattaatatttacttgtccacataccaaacatttattgagtgcctgccatgttccaggcactgttcttctctcaaggagatttgttcttgtaaaagagacagacgagtgagtagtataggagatttgaagatgagcctagaaggcagagtcctgtaaggagttggaagatgagtgctgggggccagtgaggagatgacatttgagggaagactggacggcagtgaggggacagccagtgcgaaggccttggagcatggacatgtgcttactgtgcccagtgaacccctgggagctggggcgggggaggagggtgcgggaggcagtgtgcctttgagaccgtggcagaggctcttctctgagcaagaatatgaagtctccgcagggatctaggcagaggagttgagacctgtggcagcagtgtggattctaccatgggggtctcagggctgcactgggaagactagtaaaggagccgctccgaaaaacaagggagagacaatggtggtttggagtcataacacagaagtggtgagaagtgatcagaggcggatttcctggtgcattgaatatgggatgtgagataagcagaggagtcaggatggcttcccggactatggtccaaacagtggaaaggatgcagtggctgtaacctgaagcaggaagtctgcaggtgggacagaaatgtttgttaagggaagtgttttcagagtttggttttggatatgttaagtttgccagtgtaaatggacatactgtgtagacatttggaaatatgaatcttggaaatatgaggttctgggtatgagcagagtccaaggatgagcctagggattggagagctgaaaccagaaaaagaagctagaaggagaggccagttaagacagtgaaaagaagcgaggcatgaggatcacttgaggccagtagctcaacagcctgggcatcatagcgagaccctgtctcagcaacaacaacaaaacggacagtgaagagagtatttgaaggagaggggaacaggcagcgtattgcttattgctgaggggcaaagtgaagaccaaggatagactgctgggcttgacagcatggagggtgctgggggcctaggcaagtgcaatattcatgtggtgtcattgggccaaaggtgtcattggagagtactcaaaaaacactaggagaggagctgagctttgtcaggcgtgtaggaagatggaggagaagaaaagggggagtggtggtgggctctcagctggaggagagaggtaaggaccaggtggttggcaagtggtgaggggacggcagcatcagtagatcggagttcctggtggcgtgaaagtgctgttggagctgagggtgagctaggagcacggggctgatggttggcctgtgggaaggttggaattgagacagattgcagtgatttgtcatggaaggcctctggacatgaccgtggggtgaaagtagtggaagccacggtcatcagaagggaaggaggaatttaaggaaccaagagcctggagtgttagaagaatcatcctcttggagtcaccaagaatgatggtgagaacagtggccagaaatgtaaatctacaagtgaggggagggtctcctgtgtgtgtagatgcaccataaaaaggaggtgctatatagtctgaagacagaaactccaaactgggagtttaggagaaaattatgtcatgtatgtggatttactcagcagtgattctaaaggatcgtatctggaaggataagaatgttacggatgaaaacattcaaagttccagtgatagaaacatcatgggtttgagggtaaactcgtaacactgaaagaggctacagtatacctaagaagttggtgtgttgtgaaaggaggcatcgcttatcaaaatggattcttcctcacatggagcatagtaactgttaagcagttagtgaggagaaattaatttcaatcctcaccaaatacagcacacaccaaaccagatactaaagagagaaacattctaaataactacacaaggaaaaaatagaattgaatatttaccagacctctagcagagagaatattt

SEQ ID NO: 102749 - DNA, 1512 bp, Homo sapiens
agcataagtgagaaagtcttggtgtgaatggggatttggaggcatttcaccatggctggatctttatagacaaggcagggagcagcacaaagtgaggctggtcaggtatgccagagtcggatcatggaaagcttgtgctccctgttactgagggagtcccttgtcatggaagagatagggagccactaaaagctttgaagcacaacagagaggtcattgtgacagctcagtgaagtggaggttcttccagtcgtttagatggacactgtcagggcctgagctaggcctgtgataattgaggtagagaagaggagattgatttgggaatacttaggatagggcacagagaggtatgagatagattcttggctggatgcctagatagtcagaggtatcacctctgctgagaccctaaggacaacaggcttatggggacggataccagttcagaatggagttgcccctggcttgaggggtaggggaagaaatgtcaagaaaccttcaaattgagcctggagctctgggcgaggacagggcaggagtgagaggtgtgggaggtggcatcagctataatccattgttagtgtatgcttagcagattccctgtagactgttaaaaggagaacaaacccatcttggtggcggccatagattgagtccacatttgtgaaagctgaaacggttagtgttgtgttattgtttgataattaaattgtgtaattggcccttacttgtgtcacagtactaacagtgaagtctagttggacttttctggaacttggtgcacatgtctatgagggtgcccaagtgtggggtaggcctcaagtgaggacttttacaaggccctaaccagagccttgcattctctttcctacccaccgcccagtggggctcctttaccagacaagtagagttgaccaccttcagctggggacctgacactcattactcactggtcctggtagcaggtgcaggcagaaccattcaagaagaaaaatcaatgaaaagcagaagtaaatgaataagaaagaaccggatctttgaaaagcaaagtgtgagaaatatatacttggtatatttaattgggggttgggaagaaaaaacctagacaaaattagagtttaaagatctagaaaaacatttaacccagacagaaaaaaatcatcaaacagtacaatataatgtttgtactattaagctaaagaacaaaatactaaaaaataattttctagaaaataggaactttcataattgataccataggattaggaaaaactgaacagaatagtaaccaatgaagaaatgaaaggctgtcttcagaaatgcttcttggttctaaattagttgtaggtgcattgttttgagcttttaagaaaaattatacagaacaatagcaatatttataattgaaaggaagatataagccagggttattgtatctggaaaatacaagaaaacctaagaaaaataatgtaacaaaagcatagaataatatgaataaagatagaaaaa

SEQ ID NO: 102750 - DNA, 2950 bp, Homo sapiens
ccctggtggatccgtgttagaggccagatcagagctcagttccctcctgattgctagtctaaagttctttttgtaaagtcaggttgacttctgctgactgctaagtccgctccgtttcgtccccatgagtacttatcatcttttctgtaacttaaattagtaatttaaattcagtctccttagatctagttaattattgtttatggaagctaagtgaggacttctcctaatttaatttgacattaaatattaatatcaaatttctactccttgcacattcagccatttctgctcctttgttccagggcaggattctgggaaggttgtgatctggaatatgtctccagtcctccaggaggatgacgagaaggatgaaaatattcccaagatgctttgccagatggacaatcacttaggtattacagagtggccctttgcaggctttgcgtgttggcagagtgcccaaggttagcacatgtgtttgtaattagaaagataaggccccgtgcggcggtaactcccctcggcctgctgtctgaaggcacagatgttggctgcacacctgggtgagttattcagcagaagactcggcccgcccacagaaccatctttggacagtctgcaggtacctctggtgatttcctgctcatgagtcgttactgcctgattccatggggctttggggccagcgacctggacacagtagggttctggggaagggtgcgcaagagacaatttgccaaaacatctcaggttgttactgtgtcactctgaggctctctgccaggacccttttggccatcagacagtgtgatggtttcctttcctgctgtagtgccttagtttcccacccctgagatgcttaatgaacagtcactggcctttggacatcagctccttcctttcctctgtgtgttcttgtcctctcaacatgcctctcagtgtcttcagacctggagcatgttactcacgggccatgtgggggctacaactttgatagccatctttcaggtcttccaaaggccaagttgtgagtgctcttggaggctctggcccatcaggggcctgggggaatttctgctgatcttagcttataagcgcagagtcagtcaatctgcagtgctggcgagtttggaaaatccgaatgtgacagggctggctctgacagatgagatgaagtcagagttttatactgtaacagactgttcatctgaaaaatctagaaaaagcatctgaccctttttagcacgtactctttttttgagaataatctctactcagaaatgtgtctcattaatagatgacccttttgaaataatgagatttggttatcattttttgattttcttagaaagaagccttctattgactatgtcattcagcactaacgattctcagataatgtatatttttccccctccagactgttctggtaatttgtttttatagcacaagtaggttagtgcttaaactgaattgtttttctggggctctcacacagtagatgccttaaatagattagatagattagattttataaaccctttacatcttgccaaactctacataaagcaaatgggcatgactactggattttcatcaccttatttttttttcttcccagcatgtgtgaactgtgtgcggtggtcaaacagtgggatgtatttagcttctgggggagatgacaaactgattatggtgtggaagcgggctacgtaagcatcattttcctttcttcacattttatttttagaagctgctttgctggtctttatcaaagtcacctttccctaccctgtcactgaagttcccatagccctgacctcataagtagtggaaagtgcatgtaggtcaggagcaggtggagcctgaccaggaattcaggagacctggtcagctgccccctcacaggactgcaggctctcacctgaaaaggaaagtctgatctcttctagtgccgatgtgggtggggcttcgttgcttttgttttttcaagtgaaatttcacatggaagcccaatatacaaaatggttaaaagtcagggtgctctggttcttgcccaggatctggggcaggggatccagagtccagcctctttgccattactttattctctgttggtccccacctggggcagcctctgctctactctcaaaaggagctaaccatcacctggaaaactattgctcccaggtctctgggccagtcagtctggggcaccagaccctgcaccattgctcaccaagagtggccctgtggctgtggcttcaagagcagaggcagaggctgtctcttcagcctacttggctatctcagcacactctttctgtggatttgtgatgagctctacaagagcaaaaggtgttatcagaggctctgatcatcggtgtgtcagcactgcctccaccaggccccaggtgattgatgctcctctggctcctgtggtgggggctagtacctatagatcgcgtggtttctctgcctcagatgtcaaagccatttgattcattgtgagatgcttaaaaataaaatactgttgattttgcttctttaaatagccaacataagtaacatttagtatacaatttagaaaactaaaaatacaaaagaaaaaatatccctcatcacaccacctaaagaaagctacagttaatattttgacattttgggatgtgtgtccttctaatccattttccatgcatagatgctatccatgtcatgtggttttttttcctttacataagtgatatcatattgtatgtgatgtcctgtggcctgcttctttcacttattgtgaacgttttcccatgcaagatttgtaatggctgtgtagtatttcatcaagtgcatggatcataattcacctaaccagccccttttattcaacaacccagtgctttccagttcttgtttgtttttgctttgttctgtgtgccctgataagctggct

SEQ ID NO: 102751 - DNA, 1050 bp, Homo sapiens
tttccaggcaagccgattttttcagttgatattcaccctgacgggaccaagttcgcaactggaggacaaggtatgtttatggaataaagaaagggaaagcttaacagccctgccaccttgctcttctcctgctgtccatttagctgtagagggaatacttgctatttttcaggatggatgcaacgctgtttaaaatgtacagttataatgtgttatctgaatgaataaaatcaaaatccttttatggctttagtgtgctctctgtaagtattttggcagcggatgtatcattctaatttctgtttattgagttaatattaaaatcagtttgtatccccaaacttgtagagcatcgagagcggtaggtggtccagtgggcaaagcccagccccagagacaagggctctgtcagcatttttctcatctgaaaaaagggaatgagggtaatttaagcttctaaagcaatcgtgtagttattaggcccattttctcgtcaaaggaattcagttaggttaaagagaaagcacactgtgggcaagtaagaaagcccacaccatttgaaactgttattggtagtattgcccttatgcttcagccagcatcttttgcaatgttgcatggttctatttggaaagacagagctgttcttcatgccacaataccaagatgtatatatagtgacacaatgtagcattccacagagcccagccctctgtcatctttaccccagagcggggcctccctccaaccaggcctccccaggcagcacttagagagtgcctttgtgagctctaggtcctcaggccaggtgctgcagggtgggtttccagcagatgcttccacccagaatcaaggagctggaagggagtgtagggaagctgtgggcagggaagcctttctctccttccatgctgtggactgcacccgagaggaggaggtgcagcacatgagagagaacacatggacttagctgaaggaatcagagggttcgcacctgtacccagaagacacacattttgccaccttggtccagcagagatgttttggaaa

SEQ ID NO: 102752 - DNA, 1035 bp, Homo sapiens
tcagggtacttggacttctcacatgacaactaggtttctccagagagccaaagttgaactgctagactcttaaggcctacacctggaactggagcaacattacttctgtcatttccctttggttaaaacgggtcccaggtgtttcagataagggatactcaacctatactacatagtgaccagtaagaaggaaagtgtattttatctcaagttcatgcttgatttgactacatggctgcggctctccacagctgggtgctgcctgggtcccatgctgggcagtgccttttgggcaccagcatttaattttcacacttgcatgggagccctggcaggacttcacagttctcagacagccactgcctgcccacacactcctgatcccagtacttgctgagtgattctagggctggtgactctggtactgtgtccacattgcctcctcttgggtgacagagacagaacatgttcaattaagagactcttggcaacagcccatctatatcagcaattgttgatgctcagatcattgtcatgtatctcctttgtcaatgaacaaatattactgcgctactgtacactgggtactgtgctagaggctgaagatgtgatgaactcaacagcaactgacatgccacttgtagctcttaaacctttgtcctagaagcagggagctggacaaatgcccaccaggcgtgagtgccttctatggtctgctgggtttcaagctcctacagtgcttttgccggtctgatccacccacccagccagccagctagcttcatgggatcctagtgcaagcctaggcccatactgggctctttggggcttctaagaactaatagccacagtcctttctcctggaggaattgaacagctaatttaacatagagtacaaactgtgaaggaggttcagccagaggagatgctgagatggcagacggtatgggaacttcacagcacaaacaaaagagggctgtttggaagcagaagtatgacaagcgaagcaatgctccttggttgcagccagcgctg

SEQ ID NO: 102753 - DNA, 1141 bp, Homo sapiens
gaggcaggagaatggcgtgaacctgggagacggagcttgcagtgagtggagatcacgccactgcactctagcctgggcgacagagcgaaactctgtctataaataaataaataaataaataaataaataaatagtttcattcccactaatggaatgtgagtgactgctttccttgggatggaaaggcctagtgctgtaaggaggcggggagccagcactgcgctggtatctgtgtaggtcccctaccatatttcatctaatctgcatagcactaggaaaggaaacctggtgccaatgaaccaggcacgccttctcaaaataataaaaataaaataaaataaaatctcaaggctttgtagctgggtaagtggcagggctaaagattcagcccatgatgtttaatgccaaaacccaaacttgttgccagcctccatccctgccttcccctggagccttgaggcccccacccccattttccacactgctattgtggagccagaatgtgaatctgaccttggcattaccctgccttgaaagtacctttagagaaatgtctcagctccttactgatgcttgctgagccatctctgtctcctcttctttctcacactctctacctgcagtctgctctgcaacattacatcagcctatttcttgattccatgccgtgcgtcccctcagcctgaaaaccctctccttcacccgatcttctggctaactcttactcaacccttgggacccaattcagttattatttctgcaggaagcccgaggctgagtcaggtggctttctgcttgtgaagtgtccatcagtggacatcttactaggggagtttgtatgattatgtatctttactttctcattgcttagcctaatgcctggcacatagtagaaatctgcaaacagagactgagtgagaaaacatgcagttgatgctgtgagtgggcatgatctaaagcgcatgggctgtaattggttacttgtgcagctgagccctcagcacagcctggctcagcctgtacgtgctcttgggtagtcaggggaactgtgacttgcaggtaagggtttctggtgtgcttcttgaggggactgatgtaatacaatgtctcacagacttatggaactgaaaagcactccaag

SEQ ID NO: 102754 - DNA, 2087 bp, Homo sapiens
tgaaaactattttcactttatgagcagaatcatagttacacagctgggagggacttctgaggagcgtctggccttgaccactgaagccaagtaggagacctgcttccactgtgctgatcttgggtcctgtcggtgaccaggaagaggatgctctgtgtctggcttgacccctccctttccccagaggttgctagcatgttctgttcatccggggtgtttgcctatggactgcagaagtgtctagcacatgaaccagaggtatggaatgagccctggggaccaaaaatttatgcaaagcacattttatcatcctgccagagtcagcaacaacacctagaagtgagtgggattgtgaacattgtgcatattgtcaaatagcacaaagggagtgttgcaaatattgtagggttgcctgccttgttccttgttagcagaaccccaatttttttggtctgccttctgcaggccaacctgctgatagccctaagctgatgtgtgggtaaatgccaaggatttgttgaggaacagccatgtgatgccattttggcccttgagactaggaggggacgtctgctgggacctcctagggaattaaataagaggagatgcttgacaggctagtctcttctgctggactttactaggtctgcgtgtaaaagccagcttggaacagggccgacactgatgacaggagaggaagacagagggacacgtctctttaagttgctaaattaatgcaccctgaagctgacctatctcaggacttgttatatacgatagaagattaccctcgaaattctctatgacttgcagcattacagttcacagatggaaacttaggctgagtgagatgaggtgaccccctggcaccaagattccactagatgtgatggagatgtgttgagagtcacacttagactccagcccaagcccagacttactctttctaatttgctaagcactggtctttgtgctgaggctggccactccgtcctggagagcttcaggcccatttcctcctcagaaggacagctttcagaaaccacgtggtacagcatgggaccaggagtctggtccctggagcttgtcctctgactgcttctgtagccattctgagtgccttggggcttctaacctggtaggtttctcttgaaatgtgcttggtgagccttttctggcatttgattttcaagagttctctggttgtggggtatcgagaatgttttcagtgagaagcagaagggagaggtctgtgccccagccttggactttgggtcttccccattggctgattggtccaactaggtcatgtgccctctcttgcatcaatcatcgttgcctactggcttacataacgggcagagtggatatctgaataaaactggagttctattagacacctccctgggggagcatatgctcctggaaaacagactttgtctttgctcatgcccttttcccagggccaggaatggtacttggtacacaccatagtagtcactcagtaaatgttgaaggagtgctgagtgctggaagttggtgatggaaagtggctgatggatgggcagctaacagtgtctgttgtccttggctggtagagttgatgtactgcaaataaacttcttgttcatcctggctggctctttctagtggaatctgctggcaattccaatgatgaggggaaacattctgcccaagccttacccaaggagttcatttacatgattctgtcttctagagccttccattttaggaaaggaagtggatgaaacagatagcaaatggttttaaaacactcctggcaaaaagaaaacccatttagattaacatttgttgctcctaaaagcattgtctgcctcgatgcattaacaaacctagggtaggccaattccctgggaggctaccctggcaaaagccactgtggtgaagaccagacagaagggacagcaggccttatttgaggtccagggatagacctacgttggagcagactccaggtctgctgcatcctctaacagaaggtctcacatggaaaaaacagttgataaattcactgctgttttaagagctgaaaatatgtgtgtgtg

SEQ ID NO: 102755 - DNA, 1090 bp, Homo sapiens
gtggtgggaaaggaagttgccagctggaaaggcatgtggagaagcagggccttcctgatgggaaagaccaaggagccacctttgtgttttcagctggggttagggggaggcagaagagtgtggagcaggccaggaacatactagttaataaagatgctgtggcccccaagagggtgtgaggcctggctggggcagcggactctgtctcaagtgcttagtctagaatgtgaatgtattagtctgctcaggctgccattacaaattaccatagactgggtggcttaaacaaaataaatttattttctcacaattctgggggctagaactcctgagatcaaggtaccagcaggcttgttttctgagtctttctccttagcttgcagatggctgccttttccctcacatggtcgtcccaatctgtttcctaattttttatagacaccagttatactggaatagggcccacctaatgacctcattataactttaattatctctttaacgatgctacctccaaatacctccaaatacagtcacattctgaggtatggggttggggggagtgggagggtcgtatgggtaggacttcaccataggaactgtaggggacacaattcagcctgtcacagtacaagcccagtgtacgaatagagccattttccccagtggcttggatcacaacctcagaaaggattttttttttttttttttttttaccaccttagtgcaggtaaaccagggaaacatttcattggaataagaacttaggttgtcttcctagcgtgtggttcacttttttcccttttttaaaaattgtggtggccaggcaccgtggctcacgcctgtaatcccagcactttgggaggcctaggtgggcagatcatctgaggtcagaagttcgagaccagcctgaccaacatggtgaaaccccgtctctactaaaaatacaaaattagctaggtgtagtggcacatgcctgtaatcccagctactcgggaggctgaggaaggagaatcgcttgaatacgggaagtggaggtagtgagtcgagatcacgccactgcactccagcctgggcaagaaaagcgaaa

SEQ ID NO: 102756 - DNA, 2927 bp, Homo sapiens
ggaaatttggacataggaagggccatgtgaggacacagcaagaaggcagccatctgcaagccaaggaaaagggtgtcagaggaaaccaaacctgctgacaccttgatcctgcacttctagcctccaaaactatgaagaataaatttctgttgtttgagccaccctatctttggcattttatatggcagccctagcagactaacataccaaccagcctatcaatgaaatatgagattagaaaaaaggaactcacaagaagataatcctcatgcatcttttctcaggaagctcctaggaggtgttcctcactaaaatgaaggaataaggtagaaataagaaagtcatagaatccaggaaataaggagcccccactaacatgtacggcacctagagaaaggccagtccaggtacggcagggcgaaggcccaggagacacaggtttgtcaaaacagatgaactccatgcaatgcaggctgtgattgaatagaggaagaagccaaacacagctattgacaccaggatgaatggaaggctgtgcggcaaaggaagactaaatgcagctgtgactcaaatttacatgaatgtgaccacataaatactaaacagtgctctattgcaggtataacatgctacagttagtggggagccaggtgcagggatgtgtgttgaacattccagaatcctcttcttcctagggaaaagttgagataatgcctcagactgactagcaataaaagcatgtgaaaaaaaatatgtgcagttttcaaaggtttgggaaaaaacaatccctctttctgctgatggaaggatagcttagtggaatgtttctgagggctggttggtctctatatgttaaaagcattaaaagtgtgtacacactttgacccaggaatttgagctctaaaaaaaatcagagttgtgtgcaaatacattaagctgcttaccacaacaatgtccactggtagaaaactggccctcctacatcatggaattcttttttacagaattcagttctgtagccttgggagtatactagacaggaagtttattggcatgagatttcagaattaagtgggaaaacaattctttaagcatgtacagaaaagtgacctgaaatgtttttgggtgatgaacttacagacttttttttttttttttttttttgaggcagggtcttgctctgttgctctgccatccaggctggagcagtggcacaatcatagctcactatggccctggctcaaaccatcctcccgtctcagcctcccaagtagctgggatcataggcacataccacactgagctatttttggtagagatgggatctcactatgttgcccaggctggtcttgaactcctgggctcaagtgatcctcccacctaggcctcctaaagtgctgggattacaggtgtcagctatcgtgtccagcctgagatatttcttatgagtaatgtggatggtacgtgagtccatagagtaaggcatttattgtaaacctccagggagtttctgaaaatagtatcttctcttcaaacctaggatgaagctggaggcagattcgtcgctttctctggagaaggacagtcattgcgtaaaaagggaagaaagccctaagtgaggactgttggctgattggaaaataataaaagaatcatttgcaacatcttggcttttagttactggcactgacagggacgagcctcatcagagaatactctgttacttaagatttatttagagttacctaagaattattaagtttgacttggaagtggagcagcaggactttgtagttgtatgcttgatttggggaaagacaaagagctgtccctgagggcctgtagatagctgcctcctcacctcttcacgctttcagcttgaggggagctcccactgcctcagcaggagcaattctgcatccctaattctgtcaaaacctatgaaggtgactaaattgtctaacatgaagtgttctttctttttcttcatttatcctttcttttcctacatcaattgcataggtgtcagtctttggcctaaaaaaaggctttaaatagacatgtgttctataagtagtggctgtcccactactgtggctgcaatttaagtatttgacaaagaatgtttctatttttattttacatatttttttcaaaaacaccactcagaagaacctgatctgaatgagtttgcacttttattctcatttcatatggacataactggctccttagtgaacctgttcatagtgaaacaactccatggagaagcaaacatgtgaatgttagaatgaacaaatgctaaagagatgttcctctccttcttccctactccccaactcccaattttaatttattaaatcatccaagcttctgctggcctgtattttttatcagtatttatttggtcttagatcttcactttctataacgtgagatcttttgacatgctaatctgattattttaaatttgttcccatgagccactgtgcctggccccattgggaataattctaagccaagaatttcaagtaaaaacaggcaataactaaagcctaaatctaaatgtttgattaggtactaacacagactggtggttgggcctctgaccataactgaaggcctgttggcaggtgctccgtgttccatctcaccattagaaaagtgtccctctggggcttctcctggagaaagtaggaagaaacaaggctgcctgatccctaggtggcaatggctaagcccagcagggtcccccatgagccagggctaaccctgcttccagacatgggggtcctgccctggtcagggcccctccaacactccagagaggagagaatggtggccccagggtctatccacgtcttcagtgaagagtgtctatgagtgtcatgatgttcagtacttggcctgtggcacaaaccatcatc

SEQ ID NO: 102757 - DNA, 1094 bp, Homo sapiens
ccaagctgttggactgctttagaccaggaaactaattgaaccctttctcccctggaaagcctctttaggtagcctggagctggtttggggtgtgaagccatcaggccacctcttcccctgagctggccttccagctcctggcatgggcaggcgggtgacaggtataccccatctgctgtcttggagggcatgtgagccagtgctttttctgggctggctggtggactccatcccacccatgctcccaagcttcttcagggcgagccagcctggaataggtactggcctttttccttgtagccaaggcttcgtctgctgacctagatccgagccctggactagccgtttgtgacatgtgggtactcggctgcccgttgtgctgtatgctctaaaatgctgcatggggagggccaggcatcagctcctcctgcctgcttagtgctctcaggcctcttccagcagcccatttctcacctcaagccctagtctgacctctctgcctgtcctcctcacatcacctatggcagtgtcctgcctctggctgaggaagccaccccccatccctggccagccttccctcaggcttgcaattgcagcccagtatccttcccctcgctgacaaatttcccacaaaaatctacccagggacagtgcgcctggcctgcgactggctaactctgagccttagaatacttcctgttagaacatcactcctggggatgccagacccccgttaccaaagccagtcacctctgcatccttctgtgcctgcctgtggcatttggtagagtgaccaccctctatttctgcccttactagcctgacaagcagctgtcagcgtgagtgcatggggtcctctgcaagcctatccatagggcccaccactcaggcttcactcatggcctaggcacggcttcccaggcacagcctcggcctcagcatgcctctccctcctcatgagctccctctcatttgtgacacagccctcagcccccttttcccttggctgttaaagtcaccttctcactgccactcccgatgaaacattcttgaagggatgtgatacctgggatttgcttcagggcatctaatgt

SEQ ID NO: 102758 - DNA, 1029 bp, Homo sapiens
atctacagtgtctgtgcatcagaagtactgtagtgtctgtgacaacctaagctatccgattccaaccacaaggtggaggtagcccctgagccagcactggctgtggctatacccagtggaggcctcagctcaaccagtaggtcaacagagctatggagttcacagttctcacgaagaccctgtcattacagaggagagaacaggctccctaaaaaggtcttcctttcaagtcatgctgacccaggagccagacaccaggggtgacccttggcacaggtgtccagaagagactcaggggctgggtcattgaggtgtagctcagatcagtgttgttcaaatcttttaagtgatgggagaaactctttctgtctaaatcttataggaagtcctctaattcataaaatgaggttctctgctttttttggagaaagtgagggggtacagagggactgggagccccagggcactgggagcctctaagtcacaaaatgcagtttgagagtcagtggactgagggacattggagtctctttcacttgcaacaatctcagacccttggctgagcccagtccagtttactgtggaccagctgtatgtcagctccatggctgtgcagctgagaggtggaccgggacagaggtcctggcccctttactgccagtgtgagagtcacccttggtgataggagggagtgcccacccttactgtacctccatgctactctcagaggttctctgtagcttcctgcccaagcttttaacttgatttgctttattagaatttttagggagatctcaaatggaatctgcgttacttcctaacactaagtgtgatttttattggaatatttgtctgaactaacaagctaaattctgctttgatggttgaatccctggacttaagccagcagccttggtttgaatcctggcatcaccacttgtgtgctgtgaggtcttgtgtgctcaccacttgtgtgctgttacttaacctgtgggccttagtttccccatagataaaaggggataatga

SEQ ID NO: 102759 - DNA, 1103 bp, Homo sapiens
tcaaggacccgcaccagcttggtatttataaggaaagaaagtgctatagtgatagagtgtgataaaggacttaatatttaagtacccataaagtatttgctaaaaacttaaacctgtacgatgccattagcctggagaggcacgcagcatagtactgtgaggtctggagagacccaatcacgtgctcgaagtcttggtctgctcctcattagtttcttgagcctgtccacgagacttgggcttgctgagtctcagcgtgctcctggggaaaactgggagccccagggcccaccctgctgtgtcaccatgctaaagcacttagcatgccagcctggccattttttggagtcccttgccacgtgggcctcgccacatgtcagggactgagtgagtttaagcagaacaactcagaggcttagtgatgaaggaaaaggggcctcctcgatatagctactttacaatatcttcctttttttcagtttcattattttattctcataaactgtggagctaatgtagacctattggatattcttcaacctgatgaagacactatattctttgtgtgtgacacccataggccagtcaatgtcgtcaatgtatacaacgatacccaggtactttttgtgctatgccctcaaactgtctgtactttttatgccatgtacaatgtctcacctggtgttcttggtaaggtgtgtgtctgactaccctgtgggactgggaacagcctgaacacaagaacttggtctttgtcatcttttttttttttttttaaggagagtctggagtacactggcacaatcatggctcactgcagcctcaaactcctgggttcaactgacccttcctgcctcagcctccttagtaggtgggactacaggcacatgccaccacgcccagcaaatatttgtttttatttttgttgaaatggagtcttggctgggcgcggtggctcacgcctgtaatcccagcactttgggaggccgaggcaggcggattacgaggtcagaagattgagaccatcctggctaacatggtgaaaccccgtctctactaaaaatacaaaaaattagccaggcatagtgttggacgcttgtagt

SEQ ID NO: 102760 - DNA, 1063 bp, Homo sapiens
cgcatggtagaatataagaaatgttagctctcatccatcctgatgtggaagctggtacaaagtgggtgtgagcttaccttggatcccatagtgctgtgggtgacagcagctagggtggatgaacacagttttgcctggagcaggtgcttgggaagcccctactctttctgcccatggtgtctggagagctgggagccagaaggggtcacagccatcccttgcctccatgcctctcttccgtaggaacaggctgtgctcggggcactggtgtgaccgtgttctctctcaggggtctgggcctactgacttctgccaaattggaaccttcttgggctgtggggataaattcctggtgcatttgctccaccttttgttctctttgtccctgtatcaggagatagtggagcaaaccatgcggaggaggcagcggcgagagtgggaggcccggaggtgagtctgtgcttccagctgctcccagcaccagaagcccacttgcctgggggtctgtggtgccacccatacctctgacttcctgtctcaggataatttattgagtttagaacctttgggccagtggctctgggagtgaacctgtggccgctgcattggagaagagctccaggttgttcgccggtcccatgagtgacaggacagccccaaggtctcccaggtacatgccatccattagagaccatggccctggctctttatttttatcaagtttttccaatgtagatactttgatttacaaattatttataagaagtgctctaaaatgaaaatattggaaaggttattctagcttgaagtgagcatgcagcagcgcccttgaggtgggtcccgggggaagcccttgctggatctctcatggaaggtctcccaggccatccagctgatgttccccctgtttcagctgagggcatgcactcctgccgctgccacaggaggaaggctgccccctcggataaggacaacgtaagacaggtgtggtggctcatgcctgtattcccaacactttgggaggcccaggcaggagaatccaggagagttcaaggctgcagtg

SEQ ID NO: 102761 - DNA, 1079 bp, Homo sapiens
attctgctaaagagtcaataagtggccaggtgttgtggctcatgcctataatcccaatactttgggaagccaaggtggaaggactgcttgagcccaggagtttgagaccaacctggacaacatagtgagactttgtctctattaaaaaatttttttaaaattagctgggtgtagtggcacatgcctgtagccccatctacttaggaggctgagttaggaggatcacttgagcccaggatgtcaaggctgcagtgagctgtgatcacaccactgcacttcagcctgggagacatagcaagaacctgtctcaacaaaaaagaaaaaaccaagagtcaatatgtgaaaacaaatagtaccatgatttaatttgcatttcattgaatactgtcaagtttagcatttttccaaaatatttggcttcctgtactgctacttcctgttgaagacctgcattttatgtcattacagaagagacatcctctttgactacgagcagtatgaatatcatgggacatcggtaagtatgaataggtggaactcactataaagttctgactccaggggtcagtgtcctcaaatgtgaagaagaaacgtagattttagagccacaaaagcctggtttgaatctgagctccatgtcttccccctgtgtgaccttgggcaggtgttgcaagctctctgagccttaaacatctcctcctctgtaaagagaataatcctcatttcagaggtaattattaaaatggtcgtttgcacccaataggtgatcaaagaagagcagcgtttatttttgttcatcaaaaacacagaatgagtttgtaccagtctctgtgcgagaagataaaacgctatagacttataatggcccatcagtgtgtgtcttttacaaaacagaatttagtgtagaaaacctactatgtcaatagtgttgagcagagctcaaggccttaaggagccctagaaaataagtttcaataaaacatcctgtatttagtcttagaatttaatactgggaccttgaactctaagcaccgtatttccagtgtcccttttattgtcaaggttccattgtcctttga

SEQ ID NO: 102762 - DNA, 1073 bp, Homo sapiens
gaagagtaaaaatctatctgttgggtttgaggggatcccttgtccaacctccagcccttgcccaagcctcccctgtgtcagagtcctcctgggccttcaggatcttccctttgttggcttttagtttcctgtcttctgatacttgcacccgctccacctctcatttgcattactgtgggtttatacattttaaaaaattctttcctttcatgtgaaagacaactcaggagggaaagaagataaattcttacccccaaacctcttcctgaaccaggaaccaagcaaactatttgtgactttggtattttaccaagagttcctgacaagcaccaccaaagccatgtgtctgccctgttacaggagtaacctggacaagctgtaccatggcctggaactcgccaagaagcagctgcgagccacccagcagaccattgccagctgcctttgcaccaacctcgtcatctcccaggggcctttcctgtactgctctctcatggaggtcaggcttcccacagagcacaggcgcctggtcacagcaccagtggcttcgtctgaccatctgtctcgcctccgcagggcactccagatgtcatgctgttctctaggccggcatccctaagcctgctcagcaaacacctgctcaagtcctttgtgtgttcggtgaggggccaggcgggtgctgtgggtacaggagggcaggtgcttggagagctccctggatggggagttagatgctggccttggggtgcctgtggctgttgaccagctgcaaggtctaggcacatccattactttttctgagctgtctttttctcagctgacccctaggaaccttccagttctctcaagctctgattcatcactggctgtctaagtcactcagacaagtagggaggggcccttgcagagtgaacagggctggggcttgtgtcctattgttgcaggtcagggaaagcgggatggttgtagcaccgactggcttcccagcaacagcttgtccactaagctgatttcctgtgcctggctttgtcttctgtgtggcctaaccccctctttgcgttggcgtggaacac

SEQ ID NO: 102763 - DNA, 1381 bp, Homo sapiens
agataaactagggacagagcatgggccttgacgtcctctaggctgtgttcaaagatgagcctcctcatttgccagttgtgtgacgtgaggtagatgatctgacctgatcctcagtttcctcatccgtgaaatgggtgaacacatacccactttacaggatccattcatttaccagacatgtattgaacatccaccacctgcccggccctgttgtggagtgactgcccatcctggtgcacatcctgggacacccctcagtcctagacacaccaggaatactggtcacctgggctgtagggtgtgggtgcagcaggcacagcagagaaggaaaccctaaacctttatcctgaaggagcgtgccggcgggggggacgaggagtggcagctgcggttaagatgaggggatgtgctgccaggggatggagcaggatgaggcggggtgggctggggcctcctggagaaggtggcagctgctgcaggacctgaaggaggtgagggagaggatagcagggcaggctccttgcaacaaacagccaaggggcagtggggctaggctggtagacaaggaggctcggggacacagcatcacagccacagtaccatgctgtgggtacgggagggcaggtgtttggagagctccctggactgggagttagacactggccttgggcatctaacttggggtggctgggtggggaccaaggcgtctcctggtgacagcgtccctggaggctttggggagtggagtgactgggcgctgttgggctctgggctctgagtgttgagctggggcccaccataccctgacggagggtgctctccgactccatagacaaagaaccggcgctgcaaactgctgcccctggtgatggctgcccccctgagcatggagcatggcacagtgaccgtggtgggcatccccccagagaccgacagctcggacaggaagaagtgagcagcttccactcgtcctgggactggagggtcgggggtgttggggttatcagcttattagccctgctgagtagagtggtatttgcctctagtgtctgtcctggggcggggggtgggaagggtccattgcaggccgcctggcccccgacatgtcttgtgtgtcagcagcttttttgggagggcgtttgagaaggcagcggaaagcaccagctcccggatgctgcacaaccattttgacctctcaggtgagagtctcctgccactctgccacactttcccacctgaccctttgaggctattgcaggccctggaaccaagcaagttggcatggctggaggagcctggccagcagccctcttgaccttccagatctggccctgggacaggctactcctggtggctcagggagctctggtgaacctcaggc

SEQ ID NO: 102764 - DNA, 1051 bp, Homo sapiens
ctgatatagcggggccatttcacaaagtgggtgaggtctcttttgggctggatgtcctgtccgatgccaaaattcttaggccttttctcaaacaggggattcaccactttcttagcctcctgcttcttcatgacagcaggggccagagccaccttctttcccttggccttctttccttttggcatcttgggtggtgggagagagctcctttcattttttgaacatagttaaggagtttctttaaagtctttatctgatatgttcaacatctctgccattttggggtcagtttctattaactgctttttccccttgactatgggtcatatattcctgcttcttagcatgtctactaatttgctgtttgtgtgccagacatggtaaatgatacatgctgaatctctgggttctgttattttgctctgaagagtgtttgctttcattctggtatggagttcagttactgactgttcaccttgagcttgtgcaggcttggcttttggctttgttagggcaggtctgtggaaagttcattcccaggcttgtttagtggggtggacctcaacttccaaactctgcctctcctgcagaccttttcagggcttggtttctagttttgttctggtagatctagggtaggccatactctaagatagaatcctattcctgaagtgaagccgttctggtagctcagctggtctcaggctgtcacacagtcttcacattcaggctgactggacccccggcactgttgacctcttgaacttgttctgtttaactgtgcagctctggtaagccctgtggagtccaccgtgagcatgcgcagtccagccctcacacaagactcatagggaccccctcagacaatcttcagctccctctgttcctttgccttgccccatggatttcagccctctggctactgcagattatgatctctgcctcctcagcttaatgtgaccactatgttctgcctggacttcatgctcatggcattgtctccaggcagagagctgtgggggcatttgggaggcccacctcatcagctgcc

SEQ ID NO: 102765 - DNA, 2312 bp, Homo sapiens
cctgccagcaaattcctgtcaagagggccctgagcaggccccagtggcttccagtgaggcccatggcgtgtggcctgttgttccctctctaccactgacttagggcagaggtcacaggagagaaatgggtgacgatggcatcaaatcagcctcctgttcttcccagccgccagttccttccctgggccactgtgttctggtccctgagagctggggaggggctcctgggtctgcaagcacaggcggcgaaccccacacgcatgacaggtacatgccagcatcccctcacggccctgcgcagcaggtgctggacttgacggccccgcgcagcaggtgctggccttgacagcccctcagccgggtcacagggagccaagtggggaggtaggggctggtgtggagggaggggaggcagcgccaaggccgggtgctctggacactgaggccagcctgggcttgcggttgccaaccaatggctgtgtgtcgtgctgcagcacattcagctgcttgtgtgtgcacaggcaggataccgccgagacccccagagccaaggtctgccaggcaagagaggtagaggacaggcagagcgtctgggatgtgctgggactgtgctggttacagtgcgcggtgggaggggaggggccatgagaggggtcagggctgcaggccttggtaagtccgtgaaccagggggccccgggccctggagaggccttgaaagggcaggatgatgggcttgcaggggcttggccttgagagacaagctggtgttgaggtaggacggcgaggtggctgagggcatggcaaggcgcctacctcactggccaggagcctagagcagtgttgggggcgcaggcggtggtatcccaggccagggtgagggctgcgctagctgtgggttgtttggtggcatctcctcgccaggcgaggctcctcccacccctcctggggaaagaatctgggtcttgaatgggtgcctgatgtcactaaatgatctcactgcatctctccaactcatacaggttttcttcttgaatctgttcattgcattgttggagttttcttaaacattaaaacaactaaaatcctcagtctgtccctgaatctcagggaaaagtcttgaaatcaccgcctgcacccccaccccccctcccgtgtgtgacatgtgctccgcccactctgctgggctgggccagaactgcccagggccacagacggacctgggcctccctctcccaccacctgcctagtgacaggagccccaggctcagggagctggtggggagcgttccctcttctcccgatggatggacacatttgggcggtggaggtggggggtcgtgagtgactgtaggttggtcttcgcctgcaccattactgggcagttattttctctgcccaggttgttttctttgtggactaatttaggtttcctgatttggggaatttttctaggaatttgtctgtgggcatacaaatcctgaaggttgtattcctagtgaccttttttggactgcttgtgatgattgtttaaatttctgccgcattcaaagctccgtccctgctttattcctgatcagtcttgtatgcgtttgtccttgagcatttctatctttctgttcattgtttctgtccttgccatgctctccctccatcccatgtcccctgggttgcatctgctgccctgcctggggtcaggtgcacagcccatcggcactcagccttcccttgccagccccacatggagcctgtttccagaggtgactgtccagctgggctccctggtgcaagaagacattgtcttcctccccccacttccaggcagaccccatttttattattttttccccatattcctcatttgacacaaagaccccatttttatttgttctctggctgctgagttaattagaatgtttttatggttctgaatgtttgatttttttccccagttattttttagttttcaatttctaacttaattaacattgtggtctgggaacaaggtctgaatgatattagttctttgaaatgcggggccgtccagttttcataagcattgcacatgtgccagggaggcagtgctggttgtcagatgccccgctgcacacgtgggcgccaggcccgtgtgtccactgattcttagccctttaagtcatcctgcaggtcaccatggtccccagcaggcgcagagaggcctgtcctgttcccttttgctgggggcctgtctgtatttgctttatgcactttgaagctggcctgggaacatgccagtttaaaatggtgatttcctggtgaatgaggtcttttctt

SEQ ID NO: 102766 - DNA, 1064 bp, Homo sapiens
gttctgagcagctagaagctgagctgctctgggcgctgggaggcagagccactctgggtgctgggtctgcatgtctggaaggggcgtctcccttgcactccctccctcctcctcaagcctggcagggatcctgcagggctgcccccatggggtccagtgttcacttggcactggcttgtccttcaccagcctgacagcaaagcgctgaagacccagacagcttccctgagagcccccggagggctcttctctgcagtttccacctctgtgcccaggaccccaggaaggggccctcctgccgtcctggcccagatctgcctcgtctctcctggtgtgtttgggaaacagctgctggaacttaggactgtaatttatggggcatgttccagtccagagatgaacttgaccggattgatgaattgaaaagttaaagcaaaagggggaccaggtattaatgaattggaaagtgagagcagaagggagaaccaggaacagggagtggttggcgtggctgtggcgtgctgggcagggcatcggcccatggtgcacatcgaaggagaggcgtttcccctgctgagccctgtgttgcatgggccaggaggaggcctgggaggggacaggcgactccaggaacaggggacagggagccggagaggctgatgcgccaccctctgcccaatgtcacatcttaacgttgatcctagaggccctggagattgcaggttctgtaaagccccagcctcagggaaagcctgtgggggcgctttcggaggtgagctgcctgagagcgttcttgccacccgggagcaagcaaggtgaccgaaggtcctcagcacccacaggtgtcctcacccaccgcctgcactgtgactccttggctgagagccacgtgggcacggctgtgtccccctcacaccctcctgccgaagcctctgatgagcccagatcagtctccccccggcgggtgctgggagtagagacgcgaatgaggttcctggagcagagcatgggtaatcggaaccagatggtggcttcgccgcaccacgcattcctggcacctgagg

SEQ ID NO: 102767 - DNA, 1047 bp, Homo sapiens
ccaggcaggtggcatgtgggggccgggcttcggctggcaccgcccaaggccgccgtgctgtctgtgtgtgtgcttctctgtgctgtgtgtgcacatacgtgagtgcctgtgcctgagtgtctgagtctgcgtgtgtgtatgtgtatgtaggtatgagtgtgtgcctgtgtgtgtgcatgtgtgtgtgtgcacatatgggtgtgtgaacatgtatgtgtaggcatgtgtcctatgtgtgggttttgcatgtgtctgtgtgcaccatgtgcatgtgtgtgtatgtgtgagcatagcgtgtgtctaatgtgtgttcgtgcctggactgcacaggggagcctgtgtagaggtgacctgtcaggctctgcttcctggactggagtcatgggagggaccctccatcctggactcggtgctttcctgctaggtggaggtgcttttgccgggtctgcattctttggctcctcttggagctgggccctgccttcctgtccccctggctagcttgcctttcttacctggcaggcatagcacaaacaggcagtggcttctgagaactgtcctccaagccagcccgctgagggcagctgttccagcccccggcctggctgcgtcttcaggagtcttggagtcttccccatcacaggctggagcaggggccgtgggtcttgggagcagtgtggggtctggtccctctgcctcccctggaagccacccttaagtttgggcatgatcagttggctttcagccaaaggtgagagaggacgaaacctctctcatccccctcaaaaaagaaaaggaaaaatgggacttggcagttagtaaaggatatcccagggaactccgcattgtcttcggaaccccttgagagaggcagggttgggaggtagagtggctgcccgaggtctctcgccaggcagggtggacctgcgccctggagtcactgcccggcccctcccaggcctcctgccctcccccatgccgcccgcttgggcactggctgctgtccaccctccactctgcaggacaccttggcaggggcatttctca

SEQ ID NO: 102768 - DNA, 1034 bp, Homo sapiens
gacagatgatgaccaagctgctttcctgctgggggaaggaggcattccccctgggttgtttttctcttctggcccccacacactggcagacccgaaggcagggtgctcaggagctgcagagcctggcagggtttgctggacatgctcagggacgggccatggtgctggctctgctttctaatcatggtgtcagtccttcacttcccttggaaatacccagagattttatttcctgaagataggacatgatgggtgctgtgagatggtatttaaagtacctgtctgcaaggaaaactttaaaataggaagtactaaggataaggtcctatgggatattggaatattttataaagccacaatagttaaagcacttagatgtggacagatgagcagagaatagaggactttgaaacgggccaaataaatatggaaatttagtacaggctagaggtgtttccaattaacgagtaaaatggattattcagtaaaagcagttggccctctggaaaatagtaaagccatgtatgtgcctcactctttatgccagtacatattccagattaaagatttcaatgttacaattatgaaagtactagaggaaaatatgggtgaatttttttttttttttttttttgcctatgattccaggattttaaaagttttagatgcccagagttgtggaggtatggagaagtggaccttctcatactgttggtgggaatacacaataatataatttgaccacgtaacaattctaggcacatgcatgctgtgactacttgctaggtgcatgaaggctcttgccaggggtggtcatggttcggtaccactacatgggggtttagagcagggactggaggttggccttgcctcctcccctccccgcatgagctgagggtccttacctgacctttttgagctgtgaccagagtttttcctcatggggtggttagaagggttgaatgagaatgatgcccatgcagtgccttggctggggtctgggccctctaacacccacctcatgggtgtcactg

SEQ ID NO: 102769 - DNA, 1041 bp, Homo sapiens
gctgggatgctctgctgtggctgggatggggactgtggaaaggtggtgtttgtgggtgggggtggcattgcctgcaggtggcactcagttgtgagaggtgaatttggaaagcatgtggggtcaggagggagcagagaatagcaggctcactgctctgtcggggaagcaggtaggacctgctgtgtgcctggtgctgggatgtaaaagagcctaatgacgacgcggtctgtgcgttgttcagagtttttggggcggctagagcctactcagcagacaaatgtagtttataatcgcgtgctgtatagtagttaagcctctggtctctccagccagtttttgctgcttccaccacttatgggttagtgtgtggctgcagacaagttacttcaccactgtgtgcctcaaagacaatgctagtaccaacctcctgtgggggaggtggcacaaatggggcactcagtgaaaggttactactattgctatcctgaaattcctgacagttctgatctggccccttttcttctgaaattgacagcatctgtcattctgccttgcccttgcaatgtcataggcagcatttgcccacctcagacctcccaggccagccccctgggcccctccttccattcaaagctcctagttgggtaccagagggttgcccgcttgtagcctcttcccaccagtccagtgggtgatggttaggcctagttcctgctcttccccaccttgtctttggacagattgcctcggatgatggcctgcgactgacagtctctcagctcttctcagctctcctgaggctgcagctgtcagctccctgatcctcagcacttgcctggaccagtgcgggtctgccacgccctgttcagccatccctgtcctgttgtgtcgtgcaagccacatctgtccacacccccaccacccaccagtgctggctctcctctcttctcccctgtgctcccagcatgcctcgtggccggtgccgtcagcagggccctcgcattcccatctgggcagccgccaattatgccaacgcacatc

SEQ ID NO: 102770 - DNA, 1037 bp, Homo sapiens
ctgcatggcggttgctggggggcgggcggtgcagtcgtctgcactcagcttgctttaaggctttgggcaggttttgttcttggggctcctgggtctccccagagcagagaacggctccagcgttccaggtgctgcctttggccttgtgggggcaaacacacatgcgccgtggtacctgcccctttaggatagtgctgtccagtctagaagggccgaaagtcttctatgccaggcagtgtggggagaaaagtagggggaccaacagactgataggcgtgggagggctaaggttctcaaaatggtgagagtgcggcccagggttaggaaggctcaggcccaaagcaggcctggctggctggtgcagggaagccttctcccagactgcaggggacacaggtgcgcaggtgagtgggcagggtaggggactgggaagaagggaaggcagagatctgggtagcacactgtggctcccgggcatggggtgtggtcattgtgggcaacctggatacctaaccttggctggtggtgggagctgggccctggatcggggtcactgcttttttagagctcagtgagggactggactggactcgactcacgtccaggccttagtataatcctgcagtaaggtgggaagccagggtcatgggctgggctttcaggtgaagaccccccccccagaggggggtcagacctgagggattccagagtgtttgggtggtggaggtagggccagtggccctggcaggttctagtgctgcaggccaccctgggaggtacctggaggaactcaccctgaggggggatggccagcagataggagatgtgggatgaaggtgtgtgcaggccttgtgctcccagtgagccggtggcgtttgtgtgtggggtgaagcagagagtttcctggaggtcgtgagtgggcctccgtttgcagagagactggggagggggctagatagagttaggctgcagagtgtaagagccctacaggagggctccttgcactggaatagaactggctactggctctggagcct

SEQ ID NO: 102771 - DNA, 1037 bp, Homo sapiens; identical to SEQ ID NO: 102770

SEQ ID NO: 102772 - DNA, 1953 bp, Homo sapiens
acaggactgccagaggcacacacctgctctgtctacccgagggcaccagagggcacgagaaggctggctccctggcgctgacacgtcaggcaactgaggcacaaggctggcatttctgaaccttgcccctctgcaaacacaagggggcgatggtggcactccaagcaaaggggcgtgtgggtgctgcaggaggagcacagagcactggcgcccctcccctcccgccctgcagatgccggaggccccgcctctgctgttggcagctgtgttgctgggcctggtgctgctggtggtgctgctgctgcttctgaggcactggggctggggcctgtgccttatcggctggaacgagttcatcctgcagcccatccacaacctgctcatgggtgacaccaaggagcagcgcatcctgaaccacgtgctgcagcatgcggagcccgggaacgcacagagcgtgctggaggccattgacacctactgcgagcagaaggagtgggccatgaacgtgggcgacaagaaaggtggggtccgggccagcaggtgctcagctctgggacagggacccaggaccaggcatcaaagcccttacaggagaagctgttatcaccccatttccagggggctgggaaccctgggatatgcccagatagggctggggggctcctctggagtcccagggtgccagggtccctgatgacccctgcaggccctgctgcctgctgccccaggacaacaggcccccacactcacagggtctgacggtggtgcagttccccttgaactctgttctggccaccatgggacctgcctggggaccagtcagacaggttctcctgggcccgcctcccgcttgaacttcagcctggggcacaggatgtgttaccgggctcacggagtgactcagggaactagtgccgccccagggccccaaggtgggcggttcggtgattcagagagggcagctctgtgttaggacacactggggccagccaggaagggtggaaaagatagggaccagcgtgagcatagaggctaagggaccatgggagctccaagcgcgctcacagtggggaccaggtcctgggggctggggacaccagggaggtgaaatacccctccagcgggtagggagggtgggcagaggagggccagcggccaggcatttgggaggggctcctgctctttgggagaggtggggggccgtgcctggggatccaagttcccctctctccacctgtgctcacctctcctccgtccccaaccctgcacaggcaagatcgtggacgccgtgattcaggagcaccagccctccgtgctgctggagctgggggcctactgtggctactcagctgtgcgcatggcccgcctgctgtcaccaggggcgaggctcatcaccatcgagatcaaccccgactgtgccgccatcacccagcggatggtggatttcgctggcgtgaaggacaaggtgtgcatgcctgacccgttgtcagacctggaaaaagggccggctgtgggcagggagggcatgcgcactttgtcctccccaccaggtgttcacaccacgttcactgaaaacccactatcaccaggcccctcagtgcttcccagcctggggctgaggaaagacccccccagcagctcagtgagggtctcacagctctgggtaaactgccaaggtggcaccaggaggggcagggacagagtggggccttgtcatcccagaaccctaaagaaaactgatgaatgcttgtatgggtgtgtaaagatggcctcctgtctgtgtgggcgtgggcactgacaggcgctgttgtataggtgtgtagggatggcctcctgtctgtgaggacgtgggcactgacaggcgctgttccaggtcacccttgtggttggagcgtcccaggacatcatcccccagctgaagaagaagtatgatgtggacacactggacatggt

SEQ ID NO: 102773 - DNA, 1058 bp, Homo sapiens
accacgcctgtgcctagcccctggggccaggtttccactttctgcccagcgtgactcctgcaggaaaggactgtacaagacttgggtgccaccttcagaacatgggccccgtgaggacagggacctttctctcatcaactcctgtatccatctcaggagtatccatcccttagaacagcatgtggcacacagtaggtgctcaataaatgctagctgggtgagtggaaacaatggggccctcaacacccagtgccaggaactcaggcctatgagggagaggcacccaaggagaggggttgctggtatggtccctggagacaatattggcctgaccagggtgaccctgcagggctgaggtggggcagacctcccatcaacaagcctgccccttggggtcagttctggacatccccaagctcctgcatttgcagaccccccatcttcaccagtgcctgggccctgggaggacacagagttcctctgcctgggttctgtgcagaaggaaggagttgttactggacacgcagccatagggcatggcccgtggggtccactatcgggagaaacctcataggatgcttgcctatctatgctatcagaaaagggtttgcttacatcacataaacaagaaaccttgagaggaagtgtttgcctatggggaggaaggacctaccagggcaagggacaccccagtcaccttgtcttggaaatttgacttagtcaccaaacaaaagttaacaagcaatctcaaacatctaaagtataataaaatcaatttgcaggcaggtgccttgaaacactggtatccgaccccacatgcctctgggatgggcctggagagtcccacagggcttgcagctgtcctggtggtgggtggcggtcgtttccagcctgtatgctgcagagaaagcagggggctttcatgtgacagtatggacaccacacggctgcaaggtcagtgaggtcaggggacagccccaaggtccggagttgagcaggaagtaccaccatgaatcatgatgtgttttcatttagaaaaaaaaaaaaatgtcctagca

SEQ ID NO: 102774 - DNA, 1064 bp, Homo sapiens
ttggcctccagtccagcagcccagtggcccattcccggaaagaccaggcagaggtcagagagggagggtgctccctgggcccacagccctgtcccaggcactgtgggatcaggggcctgaggaaatgggaccagagtagggatgggcaccataccctccaacgcccttcggggaccagcaagtcaggatcagccctggtgccaagacccttggggtcagcccacaccacccagggcagatgcttctatccacatctccatccatgtagcctgtggagttggctgccctgccctgaggttacacgtggtcctgtgccactcagtggctgcagcgtccaccatcccctttccctctgcagggcccaggcccagcctcttgttcttagggcttggatcgtggaagaagggccaccctgagcagatcgtgccgtggagcttggagccccctggcggcaggggttggcagcgcctcgccccagccaagcctgactttggggacaccctcctgcccccccaccccactccccccatcctacctaactccctaggcctgagttagctgtttactgacatggtgctgtgtgtgagcgagtgacagaaggcccgaggaggccgactgggctgctggggcagggcccagggaggtggcagggaagggtgcctggctgggctttggggctggtgggataggagggtgcccctgggaacacagtgccccagtggtgcgggccaggtctggcgccaggggcaggcagctaggcagggagggggctgggaaagaacttggacttctaaaggcggagggtctccctgggcaccctgcaggcaggcagaccacggtgtggggggtgccccacaaggcccagccctgggcaaggaagctttggaagcagcaaggtgggggtcaggctacaggtgccccacctccccagagccctgcagtcacgtgaggcccctgtgcagtagagagcctttctccagcccatgctggctggggccggggctgccgcatctgcctggagcctgggcagcacctccgggactgaccttcggcagtggctgggg

SEQ ID NO: 102775 - DNA, 1048 bp, Homo sapiens
gattctgggtgaccgtgggtggcggttgccctgcacctaggctttgagctgctgtaccagcccgaggtggtacgtctctacctctccctcctcacggagagccggaacttcaacaccctggaggctgccgccggcgctctgcagaacctcagtgccggcaactggatggtgagggaccaggtcgggcagggtgggcaagtcctgagagagggaatcccaggcacctcactggtgcagctcctgcctcggctggcggggaaaggaggggccacaccaccaccccaggatccaagaggtgtatgggctgcgggcaatgcgtgcaccctggacggtgggaaaacctcggtggaggtgccgttgagcttttggggtagggctttgtcgggcacgggagcaggaaggtccagctggagagagcggtcagcgtctggaggtgggagagtgcctggcatgtatgtctgagcaaccctctccccgcctccgcagtgggccacgtacatccgcgccacagtgcgcaaagagcgcgggctgccggtgcttgtggaactgctgcagtctgagaccgacaaggtggtgcgcgccgtcgccatcgctctgcgcaacctctcgctggaccggcgcaacaaagacctcatcggtgaggacgcctgcaaagcccacgcctgggcaccgaactgtgcctgcagctttggggtcccatcggaggggcttggaggatgagtggtttgggagtccaggccccggccctctcgcttgggcgctgtcccaactggaggtagctccagtccccccggccctgtctctgaagctcagcgccctgctcacaggggctcctgtgaccgcctgcacacaggcggtctccaggggctctcctggcagtgcccctcgccctcgcgggatccctgctccttcctggagaggtggggcagaggtgtgttctgacacctagtcctgcccctcagggagctacgccatggctgagcttgtgcggaatgtgcgcaatgcacaggctccgccgcgaccgggggcctgcctggaggaagacacc

SEQ ID NO: 102776 - DNA, 1395 bp, Homo sapiens
caagggtcccatgagggtgagcagggcagggaccccaggtcatctggctccactctgctgccttctgaaggggtagaagcatcatctgacatggggagagtggttgacagtgggctcactgtcacagacgtgtgcaagccagggctacacaaatgttaggtgggctgctgtggggtttctcctggctagtagatcctgggacaatgtcctgaccccagctgggggagtttccccctagttctgccttactgtgtgacccaagtgagtcttgtcctggtcagccttcagtttcttggcttgtatccacctaccatccagccagggctcctggcttccctcagtctacatacctggcagttgcaagggagccaccgggagggtctgtggtacagctcccagcacctggtgggagatgagtcctaggggcagggctgggacatccccaggccccactgccaccaactcctacccctaggctaaactgtctgcccaaactctgacaacggtgctccactcccacaggtgcccaggcctggacatgggggtgccttttggggcctgggtaggagagaactgtgcccaactctcctgatacacccattccccatatggggtctgcctcacctcccaccacctttcccttccaggaaagaaggatggtgagatggaccggaactttgacacgctagacctgcccaagcgaactgaggccgccaaaggtgagtgggctgagatgaagccagctccactgggggatgtctgggctcaggattgccctggtagtgaagctttgagccatcaagcaggcctggagggcctcagggaacagatggggaaacaggcccctaggtgcaggatttcctggagggtgattcagcaccaggacacctgctgagggtttagaatgggaggaagtgccatgggtcatgtcaggcaaggttgggggagacaggcacagagaggccgagggcttgctcggcctcacggtgcgtaagaggtgggaaggtttggagggacgcctccagtggaggcagggcctcctgtgttagccacaaagctgagttatctgagggggctgggagccaggcgggcatgctcacatccaggttcagaggctgggccagacgaacacctgcagggacagggcagtgcctattgggctgtatgctgggatctggcttgagagagaggtctgtcctggtggggcctagccagttggaagagcctgcatgtcaccagggtggagggctccagccgcaggagggctgtgggggagtattacaggcagagcagggctgatgcagataccccagcggggagtgtgcttggagtgtgttggagcagaaagcccagcagggcaggagtagagggagcatggggcatgaggactggcga

SEQ ID NO: 102777 - DNA, 2233 bp, Homo sapiens
cctcctcccctttggggctccttcctagctggaaaccagtactgggtgtcccccggaaccactcacggcttttgttacttcctactgttctgcatgagctgggacatgaggagagtgggacaggtcctgagcgtggccacctggggaggtaggcaggcggtgcatatggtcagcacagattggccaatcgcaccccacaggcaccctgtggaacctgtcatcctatgagcccctgaagatggtcatcattgaccatggcctgcagacgctgacccacgaggtgatcgtgccccactcaggatgggagcgtgagcccaacgaggactccaagccacgggacgccgagtggacaactgtcttcaagaacacgtcgggctgcctgaggtgtggaccagacctggtgctaaagcccacatgcacaccaggccccgtcctcgtggtcccagatagtgtggaagatggcggcgagcttaggagcgccagagcttaggagcttcagagctgtggcacaagtcctgtggatgagaagtggggcctgatggagctgtcctcacccccaagtggtgtcccagtcttcccaggggcaccctctggaggggtctctgtggtaccgtagccctgcccagctctcacctaccttcccatcacttgacagccagagggggagctgggaccttcctgttcatctgcctgggaggctcatcccagccacctgtgacctctgcccttcccctcctacccctgggaggccctgctgaccccacagagtcctgggtccccacagtcctgcttgtccatcagggtgttcccgcgcagccctgcaggctcttgaccttggggtaaggtggggcccagagctgccattggggtggcgagggacccagaattgcccttgcacaggttcaggtctctctgagagtgcacctgtccctttccaggtcagctgggaggcagggaaaccctgtctttccctgcccagctatccccagccaagatagttgtctgccagggctcccctcctgaggcctgggggcagttagcttctcccccttcactgagctccagactgtggggtcctttcccattagtgctaggagggcagcagcagggcctattttgcagatgaagacaagcccacaaggccagggtggagccagggagtttctggtagccaggggtcacctggcctgctcttggccacacaggaatgtgagctccgatggtgctgaggcccggcggcgactccgggagtgtgaagggctggtggacgcgctcctgcatgccctgcagtcggctgtgggccggaaggacactgacaacaaggtgggcagggacggtcacagcctcataccaagggctggagagacgatcatgcaggtcccaggaggctggaactgtgggagcagcacaggggaatgggcttgtgggtctggggtggcgttctgggtgtggcccgcctcgcagtgaccacactgaagtgggcaccgtcctgcaggcagaaggtgtgccgtgagggcagaggcttcctcccatggacccttcctggcggttaccgcccttttgctcccctccactgaggactccctgttcctttgctcccggtgccctcatgcacaccagctgtggccagtctttcctgagggccagccctgtgcctagggtgccctgccccacccactcacctctccctgcagtcggtggagaactgcgtgtgcatcatgcggaacctgtcctaccacgtgcacaaggaggtgcccggggccgacaggtaccaggaggccgagcccgggcccctgggcagtgctgtaggctcccagcgccggaggcgggatgatgccagctgctttggaggcaagaaggccaaaggtgggtggggcggactggggtatcatctctaccatctcaactcctgccccagcggaaggctctctgtacacccacagcagcccatcatggaggctagaggacacctggtcagcccccaacaggcaggcagggaagccaggagtcaaggaggctggactgccctgggtcacatggttgatgggacccaggtccaaccttccccatctacactgtgggacccccagggagtacacaagggaaaccaaccaatgcccagacccagtctttctactccggggagagttccacttgcccatgagttgggaaggagccatggctgctgcctgctcactgttcacagaatagctgtagactgccaccaacctgt

SEQ ID NO: 102778 - DNA, 2226 bp, Homo sapiens
ggctgcggcggtcggtcggtgaggctttcccggctgtggtttggctgcgggcggcttgggcagcccgcgggcgcctcaggtaggtgcggggcgcgaggggcgcccgcgggcggttgggcgggcgccgcggcctgcgcgagggcgcgcccttccctcccgcctccctccgggaccgaggccgcgggcggggcgggggcgcggagcccggcctttgtgaggcaacatggccgcgggcggtggagagcgcggggtggggacgcctccggggctggggggcgggccccgggcccaggcgttgccgactctcgtcgctgtccgcccgggtaaagaggctcctctcccggagggcccgaagcctagcatcgccttcaggcgggaaaggtgtggacagggccagtgctcgcctgggaccctgccggctttaacacagtttgggaaatccaagaagtcgcctaagtctttttgtccacagaatgctcacgggttgagtgtcacgtagataattgggatacggttttattgtaacaatgagcatggcggaaataaatggaaggtggcaacctgttgacagtgatgcctgtctggtgtcaaccgatggacttgggtttcttgtggcaggagtctgatttgcctttttgcatgcttgcatgtaccttgttcctgcacggcagtcctgtctttggctgtcgactgttcgaggccaaccaccaggcgaggatccactgtttcctggccagactagactcccagctgtgggagtggcccaaaccctgctgcaggccttcactcacaaaagggagtgaatggccagcccggggtacccagtgttgcctctaagtgcgggatatgaggcctgttggaggatgacaaaaggaacggatgaggtcatactgccgctgggttgggcgggaggctgcagcgggagagacttgaccaaaaggcagcctccatggcgctggcactggtgctggcccgtcacagccagtgcctctgttagccaacacagcaagtgggctaggaggaagggtgctgtccaagtgtacgggttttctccccgtgccaagggtccaggggagcttgccgtgagcccgttcctgtccgatagtcctgttggcaaggcagggtttgcatgcggtgtttggtcagctggagcagtggggaggcctacgggcagagagctcccctttgagccctttgcggccaggcgctgtgtggagcacttcccaggggttgttttgtagtctcaccgtgaccttggggtaggaaatgtgcttctggctggcttgcccagtcttagactctcttgttgtagccctctcctttgtgatgtcacccagcctcctgactttaatgccagctttccttgacatcttcacagctccagccctggcctctcttctgatttccagcctggtgtttctggccacctcttccatatctccatgtgttactttggcgccaagtagccatatccaaaccaaactcaaatcttcacccatgccaaaacattccttggcctatctaaagtccctttgattcctctctttcttacaccttcatgcagtcctaaggaggccccgtcagctcacctatttctaagcacagaccatttctcaccaccttcaagttaacatcctggcccagcctacctggtgagcctctaattctctttactgtcaccttaggtcctcactccccatccaccatctatagtttttctggacacagagtgattcttctttctttctttttttttttttttgtttttttgagacagaatctcgctctgtcgcccagactggagtgcagtggcgtgatctcagctcactgcaacttctgcctcccgggttcaagcgattctcctgcctcagcctcccaagtagctgggactgcaggcgtccaccaccaccacgcccggctgatttttgtatttttagtagagacggggtttcaccatgttggccaggctggtctcgaactcctggcctcaaatgatctgcctgcctcagccttccagagcgctgggattacaggcgtgagccactgtgcctggccacagagtgattctttttatttttttgagacagagtctcgctttgttgctcaggctggagtgcagtggtgcgatctcccgctcactgtaagcttcgcctcctgggttcaagccattctcctgcctcagcctcccgagtagctgggactataggcgcccaccaccacactcgg

SEQ ID NO: 102779 - DNA, 4569 bp, Homo sapiens
tcctgaccccagccctctgcttttcctctcagtgtcacctggaacatcccctcctcccagccctgtaacccacctggctcactcctgccttcacgtggatgcaggccatgaggccttcttggatcccccttcctaaaactgcctccccttcttcaggcgctttccttgttttgtttttgcttgaatacttcttggcatgtgacagggtgcatgcttttcttagttgttagcggtccatctcccccactaaaatgtgagctctgtagggcagggttttgtccaccttgtgtctgtagcatctaggatggtgtgtgtgtgtgtgatgaatggagaaagcttatagaggggaggaaggaacttgcccaggactgcccaccactgaggtctggggctgggcaggtttcctgctttcctaaggagctcactcacttgtaaggcaccaggctttcctgctgtgcatttcttcagtgccgccgcttggccccattagcacctttgcttggaacgtctactctagctgcttcttcgccttctgtggtagcaggcttccccattccgtcccactgttggtctctaatcccctgctccttgtggcttcttcatgtagctttttgtgtcccagaatcatggattgactcaccagggtctctatgggactgccaggttctgaggtgtgtggccctggtcttccttgtaatctgtggcactgggcgcattgacccctcggtctgttttctctaatggtctttcttggttgccaggagactgacctcaccccgcttagtgttcctcatgcctgcctggttgctgcccacagcctcttgagcgtcttcagcactttatagtcagttgttagctctgtgctgtgtttcctggatcctcagcacctttgatggacacatctttgggaacatacggtgtgaaattcccattagattcagaaatgttaggacatcttagaatccaggaaatggggtgacagtgcagtggtcattgacctgccagtgtgtccaggccctgtgaccttgtctcttgtccatatagtgcgttcctcggagtagatggccagtggatagttgttaaatgtattgattaaacctaaactagtctctggttttcatgttgtgtccccttcgaagtacatccaccatgccttgtcccttgttaaatgtgtgatgtctgcatctcctgttctttccgggaatcttgggaggatgttaggtcatgcagtgcggtttgcatgtgtgcatctttactggtatgcacgcatgtgcatgcatgcgtgttcctgtgcacgttgtgggagtgtgcatgtgcgtgtgtctgcatgtgttccttctgctctgatgcagggttttctggctgccccctcagacccatcttccctgcttcatgttgtccctttcttcatgcttcctctgtagtaaggcttcctagagttgcatccttaaccctcatctctgggtggccttcctcctgtgggtttggcgactacctcctcagtgcgtcctggccttccgtatctggaccagtcatggctccagagttgtggcctcggcaccttcagagcctgcctggaggtcccctctgttctcctcgccaggctcctgcctgcatgctggaatttgggtgtccttccttgtctttagttccctcttttctctgctatccacctccgttgggtcaacaagtgcggtcagttctgtgacactgttcttggcccattgccagggcctctttcacacctttgtcctctggcctggaggactgtccccgtgccttggatgcagttgcttctgcctggcacagctgtgggtctcccctctcaagtaggaacctacttgtggcatgagagtcgcttcaccttcagtggctccttattgtccccagggcggaacgggctgcaggtggcacccaggcctctctgtgcctcggctccagctgtctcttgtggctccccaccccaaatcctggcaggtcccttccccacagccacccacccctctcctccatcgggaacagaactatgctgccacctctggtgacctcagcacgctgcatcactgtccccgtccacgtgctaccctgtgggcccaggagagccctggggtccctgggtagcagagcgcctggccatgcctctgaggcccctagtgccgcagagttgagctgagggtctcgcgctcgccctctgactgacccagcccttgcaggtgagtggattgctgtgctctggtggcctgagggaggccacgcgccttctgtgtgttccagaaagggtgcctcccactgcatgcttgcttatctgagttagaagaatgctgtggtggagtttagtgtaaatttttaaaatattttttgagccttatgattatatagtttttgtgtttctgaagtaggaattaaagtgggcattaacaaaatatttaactttggacttaagttataattcaggttctgaagaataaaagtaaggttagtttgttttgatgcctaaaaagtcctcttagggaatattattttgaagccctttactatgctgttaatagtgcttggcttttaacttggtaccagggaattggaaggtttctgtcattttgtgacgatatttttaaatttctttgcaggtagaagaagaaaggtgccactccggcatgaagacagactcgcttagtcgccagtcacttaagctgagtgcattgtgatttccaataattgaggcagtggttctaaaagctgtctacattaatgaaaagagcaatgtggccagcttgactaagccgccagcgcacagcgcggcaggacgcgcccgggtctcagcggacttgtgcatgttagctgtgtagatttatgtgagggcttgtaaaactctggtcttgtaaactagtcttaagcgcttttaatatggagacagatgagagcccctctccgctcccgtgtgggcccgcaggagaagcggtgatggagagccgagctcgccccttccaagcgctgccccgtgagcagtctccaccacctcccctgcaaacgtccagtggtgcagaggtaatggacgttggctctggtggtgatggacagtccgaactccctgctgaggaccccttcaacttctacggagcttctcttctctccaaaggatccttctctaagggccgcctcctcatagacccgaactgtagtggccacagcccgcgcaccgcccggcacgcacctgcggtccggaagttctcccctgaccttaagttgcttaaggatgtaaagattagcgtgagctttaccgagagctgcaggagtaaggacaggaaggtgctgtacacaggagcagagcgcgacgtgcgggcggagtgcggtctgctccttagccctgtcagtggggacgtgcatgcttgtccctttggcgggagtgttggtgacggggtaggcatagggggtgagagtgctgataagaaggatgaggagaatgagctggatcaggaaaagagagtggagtatgcagtgctcgatgagttagaagattttactgacaatttggagctagatgaagaaggagcaggcgggttcacggctaaagcaatcgttcagagagacagagtggatgaagaggccttgaatttcccctacgaggtatgttggcagcccctcctctagagggctcttagcaaaacccaaagagagatttgggaattgcagcatcttttgaaagcagggaaattaaaaaaaaaaaaaacaaaaaccaaaatcccctctgaggtggaataatgttaatgtggagaagagaaagatgtaaggagtccagatttttaaagtttcctaatgaaaagtttggcccatgggtaggccctgcatccctgatctagcgcgtggggcagcaggtgctgctgagttacgctccttggcagtgtgtgcccctggaccaggtgtgttggtgtcagctggtagcttcatcctgtttgtttttcagatgatcatgcaccctaagggcacatctaggccccctgagagcacctcctttctgtgtctgttctcaggaatgctgttgagctctcctgttgcaggagcatgagcgccaggggctctggtgtctgaacagcgtgttttgcaggatgactttgacaacgatgtggatgctctgctggaagaaggcctttgtgcccccaaaaagaggcgaacagaggaaaaatatggcggagacagcgaccatccgtccgatggagagacaagtgtgcagccgatgatgaccaagattaaaacagtgctcaaaagtacgtgtgtgggtcagaagcagtgggtgttccagggcagtggaggggtggttgcttccttagcagaaatgctttgagagagctctggtgccaggtagtgggctgggtggaggcatgtttgaggacaggacagaaatatctgaggagggaaacacaggatgggaggacgtcctgatgcatgacccagatgcggatcctggtgtgtgctatggaaaccacagagcagcaggcactgtgcagaggaatgggaggggacttctgagggggtcaggaggggatgttggtatatgccaggagccagcatgac

SEQ ID NO: 102780 - DNA, 2398 bp, Homo sapiens
ggacaagttagctatgccaggtgccacatgttgctgcctatgtcgtgttggtagcagttaagcaggagggcttttggtctagacggttgcaggcagggtaaacctggggcttcagcttctggggctgggggcaggagtcttgacctcggggcctctaggaggctggtttggtgctgcattttcaacaggctcattcagaaggtaaacccacattcgtcctgcacagctcactggtcagcagccattctggcctggatgcctggatgttcacagacggacagctgcatgtgacccccacctcaggtggctgggccaactttgtgaccactcactgtcacagaggagcagccccagcggacccgtggcccgtctcttgcttggctccgtattccctttgcttcttttcctgacttaacctaaagctggcaggaggcagctccatcttggcctgactctgtggggagagagcccacgcagtgtgcatgcacccctgacctttaacactccctccctgaatcatcacctgatggtggcctgggtacaggtgtcaggtccagggtcagggccacttggtgggtacctagccctgagagtcactggccctttttccccttatgtatattttttaaggtttcatttgctttcttctgttttttaattttttttttgaggcggggtcttgctgttacccaggttggagtagctcactacagcctcagcctcccaggctcaagtgatcctcccacctcagcttcccaagtagccaggactataggtgtatgccaccatgcctggataattttaaaaagttttttgtagagtcagggtcttgctgtgttgcctaggctggtctttctaagtttttaacttgttcccaatacctgtgagaaaattaagttttagttacatctttgccttacgctcttcccagcagtcaggcctggtggcaggtgtcaagttgataagtcgtaaacctcttcctcacaactgcctataaagcaaagaaggggttgggagtagtgtattaaaccaacttagaaacggaatcatttgaagcagtgttttgtatgctgctgagagtgcagctcagttacaataaagacttgtcacctggtcactgggagcagtggctgacagccatgcagtttattagcaaagctcatccagccccaaggcgcctctggccacaaccagacaggcagcaaaggagtccagtgtccacagtgcttaccagatgtggaggcaggagctgaggctgggacttatatcttgcacagacctgttctgtgctccttcatgtgctggtttgacacgtgtaaattcccacctcaggccacatgctatctgtcctaggcctggaggcatagcagtgagcaaggcagagaggaatttcgattatctgtgaagacccagttaaacacatgctagtacccaacaatttcttgtgcaggaggtgctgtggcaacaattccaagtgtttttacagtgattataggatgttcttgtcttcctgtgcaggtcgtggccgcccacctacagagccgctgcccgacgggtggatcatgacattccataactctggagtcccggtgtacctacacagagagtctcgggtggtcacctggtccaggccatacttcttgggaacgggaagcatacgggtaggggaggcatcagtcgtgactttaggcttgtaagttctcagaccaaaacgtgcacatccacacacatggcaccgcagccaagcagaggccggtgaaaggcatcagagtttcagactctcgggttgtccttgtaatccatattgcaatttcactatccacagaaacacgaccctcctctgagtagcatcccttgtctgcattataagaaaatgaaggacaacgaggaacgggagcaaagcagtgacctcacccctagtggggatgtgtcccccgtcaagcccctgagccgatctgcagagctggagtttcccctggatgagcctgactctatgggtgctgacccggggcccccggacgagaaagacccactaggggctgaggcagcccctggggccctggggcaggtgaaggccaaagtcgaggtgtgcaaagatgaatccgttggtgagtttttgaaggactcttcccttcttgcctcctgggacccatgagctttgtttttctaatgaaggccataattgttcatagttcctagttgtacttgtgagcaaggggctgtgcacctccactgttggtgtggctgaaaggcttgtcttcctgtccttgcaagaacctgcctgggtgcagcaccctaggctcctgtctgtgggctctgtggtgtctgcatggctgaggctgctggggagatggctgctggcactggcagtgggccgttttctctctggttgtttgta

SEQ ID NO: 102781 - DNA, 2458 bp, Homo sapiens
ttgctgaggatggggaagtggcccgggaggaaatgtgacaaatgcgaggccctgtgcagggagctgcctgggtgtgttgctgactacagaggtggccaggatggccagaaggaaaagagtgaggtggtcagagaggtggcgggcgcatggagcccgggtgctgctggcattcgggcacctgttttgatacagggaggaagtcccgaaggccatctgacttttttaagctgtcttttttccttttcatttttgtattcttcctgccccaaataaagtaaaagaacatctcagaaattcatccagaagggacctgccagaataatctgagctggtgtagggaggccttcattctttgcttccctcccctttgaaagggacggggaaaggaaatagtgtcatgtggcctgggcctgccccatgcactgggctgtgagaacctgactcctatgttggaagttaagtaatttgtttctctggtaaatctgggacagatctcgaggaatttcgaagctacctggagaagcgttttgactttgagcaagttactgtgaaaaaattcaggacttgggctgagcggcggcaattcaatcgggaaatgaagcggaagcaggcggagtccgagaggcccatcttgccagccaatcagaagctcattactttatcagtgcaagatgcacccacaaagaaaggtataagcctctgcattttaacatcagcagactggttatgctgttatttctaatgtgatgtgttgagggcatgttttatgagttgcatttcgttcaaagtttatgtttatcccatgaatgcaggggtctgccacattcacggtcgtgagcccctagttactgacatggtaacaggaagctgtgtgctagcttgtggcactgcttcacacttgctgagatggttctttttgtcacagagtttgttattaaccccaacgggaaatccgaggtctgcatcctgcacgagtacatgcagcgtgtcctcaaggtccgccctgtctataatttctttgaatgtggtaagtctaaccttccccatttcagtcctaaagaatcacaaggtgtaactttggtcagggctggggaggcaggcgctgaccgctagccctactctactggaacgggaggaaagggaagggtagagagcagcgtgctgcagatgggtggcttgtttcctggagccgcgccccatctgagtgggtggctctgcttttcccttccagtctgtcccctctccccaccttcctcttgtcctgccccatctgccttgctggtttctgatcctgcgttgtcatggacagccttattgcgagcaaggcctccccactgtgcactgggtcctttccctggtctcctggtgcccctgggtgtctgaagggttcttgggcatgcatttcccaccagctctgtcttccttgggtgccctcatcacacctttgtgaagaccagtctgtcttccccttggaagctggagcctgggggtcactcatcctttgaggtggtgtttctttggcaagccacatcttgtgctttcccattccggcagtcctgtgtccgtctttcgtagaccttggtccctgtcgtaggaggctctgcccccagcctcctgctgcccctctggctcaccatctcccacgtgcctcatttccctccactttcccagctgtgccctttgctgctgcttgtctgctgcccgtctccagtcccagggagccccaggtctctgcagtcaagcacaggcccactctctgcagggacagcccctgactgcgccttgtctgtcggtgtgggcagactgtgcacacgcttttgatgtcttgactcgtatgttttaaaacaagtaattttaattttaagagaacccaagtgagccttttggtgcctcggtgaccattgatggtgtgacttacggatctggaactgcaagcagcaaaaaacttgcgaagaataaagctggtaacgtgcttgcttgggtgtcaaagatacgtgctgcctgctgtgtctgcctcgctgcttggttagggaggggctgagcagtggtgacaagtgggggatgtgggtggggcatgtttattttatttatgtaatcatctactttgatttttaaaattacatgctcattggaaaagactcaaatagagcaaaatgtgagacttaaaagtagaaggcctcggccgggcgtggtgtctcatgcctgtaatcccagcactttgggaggctgaagtgggcagatcacgaggtcaggagatcgagaccatcctggctaacacggtgaaaccctctctctactaaaaatacaaaaaattagccgggtgtggtggcgggcacctgtagtctcagctactcgggaggctgaggcaggagaatggcgtgaacaagcgaggcagagcttgcagtgagctgagatcgtgccactgcactccagcctgggcgacagtgcaagactctgt

SEQ ID NO: 102782 - DNA, 1025 bp, Homo sapiens
ttggcctttggggagctgggccttttaaggccagcttttgggtctggctgactttccctctcctgtagtctcagttgtggcaatagtaaagcctctctgcaaaggtgctttatctttatagagttctgagaagggtgccttatggatcagaatcagatccaaataaggtgggcctggccagccagccatgtacctggggccctcttaggataccagactccatcccacagtgctcagggtggaagggtgctgtgggctctggagatgggcaactggacggtgaggtacggagcatgtcttgtacccggtgggttccttgcagagttgaggtatgaagtgctaggcgagctcacaagaacagacattaagcatctggggaaagccaaccgcaggcccagccatgaagaggccggtgggcctggtggggactcacaagcctctgctttgtgttgtagtattttaaccacatcagcatcgaggactcgcgggtctacgagctgaccagcaaggctgggctgttgtctccatatcagatcctccacgagtgccttaaaaggtagggtaggggggtgcctccccccatgagtcaggtcgggggagctcctctctggcgtctcatattcttgtggctgtttgtcccaaggcagaggcatggccaggtttccctgggtacacagcagccccttggccctggccaccagtcagtcccacaggcctgaatcgggcgtgtggagaattccctcctctggctgagatgcagtctggggagaggcttggtcatttcctaagggcttcccagagcaggcctcctcagaggcagctggctgctctgctcaggggacgccatctgttgtctgttttctcttaaagaaaccatgggatgggtgacacgtctatcaagtttgaagtggttcctgggaaaaaccagaagagtgaatacgtcatggcgtgtggcaagcacacagtgcgcgggtggtgtaaggactccttctctgctgcctggtggccgctgggcgggcggcccc

SEQ ID NO: 102783 - DNA, 1256 bp, Homo sapiens
agggccagctctccctgcttgaaggagagcgagtgtgtcagggtagctctccctggtaccagtgccggtccatctctaacagaagagcatatgtgtaccatctgtcttgtttctgctgttgtggccaacatcctgcagtgtaagccagtgcccactcctgaggggtggagggtaacatggggaggtgagtgtaatcattttcctcaaatgattacagaaactctctgggttcttgccctcctggtcattggaaggggaagtagttgtggaggggttaggcctgcaggtggggcagccctaggactgtgtggtgggtgggccctctgcccaagccagctgccaagagcagggcctgcctttaggtccctgagaccgaggcctcggcactgtccccgaagaggcctttactctggacatgataagggagggtgagggggctcacacgggccaccagggcatgttaaggaacttgagagagatttttgggaagcaagttgaaatgtaggtagcacttgcttctgcccttgctgtgcatggtccttggctgtgacggagggagagaaggcaagccccactctggcccgggggtgggaaacttccctgagcaggagggggaaaggtcccagccaggcacagccacagcttgggggagctctggcatcccgaggaaccacagcacccttggggctggcctaagacgggaaggggctgaggccagcctgatgctgctctgcattcatggagtgtgcagagagctcagtgcctgaggctgatgggctgggctgcagcgtgctgttcttactggctatggccacactctggtttcactccttgatgaggactctgggcaccacgagcacctcacctccctactctgcccatggcaggaggccatataagtggcgtggtgtgggcagaaaggcctggcagctatggactgcccctcgctctctgctgctgtcagtgggcctggcatcactgaggcgggccagtcagcatgcagttatgttgccacagctcctggctgtttcgtgtctgccagaccctgggcgcgcctgccttcagggtcccaggcacacagctgctgggcagcgggcaggccgtagagctacagcctgcagtcctgagcgtgaggtgctatacttcccaggagacatcggacaagagtgtgattgagctgcagcagtatgccaagaagaacaagcccaacctgcacatcctcagcaagctccaagaggagatgaagaggctagctg

SEQ ID NO: 102784 - DNA, 3524 bp, Homo sapiens
gctggcagtggtgtcttctgtcttcaggcatcgtctgcctggccacggcgtgacctgcccacctgggccttctgggtgggagctttcttaagtgtggcagtcccctggcctgggtgagagccccaggaggtatctgctgccgcccaggccagcaggtcccttgctgctccctggggtggggcttggcctcctggagccagtgggactgcctggtttgcccctggtcggaagaggggctgtggggctcaagggcagcaggtgcaggacatagtgctcctggctgggcctggggcaagcaaaagctgggcaagggaggaacacccaatggggaggcctggcctgtccctgtaactgcacccaaaattcttcacttcttggtacatgtcctgattgccagggaggctgcacatgttgtactctgatggcaatgcagggggcctctgcaatctcaggctggcctgccccaggccttccctgctcctcctagcctggcatcacaagcactggtgccgttggggctccagggcctcctggcatgatctgctgggctctccctccaccttgtgtcttcccgagcctctgccaagcccacctcactggtacccctgacctttgttgttctttcaggaggagactcgaaagaagcccaagatgtccattgtggcgtccgcccagcctggcggtgagcccctgtgcaccgtggacgtgtgagggaggtggcacgggccagggcgcgggggccgccagccgcacttctgaggagaccagcagtcatgcatcgtgcaccacagtgtcaggcctccaacccacgctccttccctgtggccaacctgtgggcccggccttagggtggaggctttagtgtacagggacagccatggccacacagcacacatgtggagcagcggctctccctggaaagctccaggcctgaatggatggactcagcgactgcaccagtggcagctggtgactgtggacagtggtggaccctgcttctgtgcacctgctgcaggctctttttatgaaggctttcatgaattttagtatgtaatacgcactgacgacacatgatgcttggatgacagatgagaggggatggctgagtcctgtggctggcccgtgatgccaggtggcccatgtgcccagggcgcctgcagggctgctacagggacctggtcaggaggtgcacatggtgccctgccctcacccaccctctgtgtttccccttctttgaaaaggtagaagagaaaggaatattttaaacctttttggcttaaacagaattttagcatcagaactagctttctgggattggaggcaaaccatcaaggtggtccctctccagtctggacacgatgccagcaaggatgacgtcctgccacctcctggagttaccctggcctcctagggtccctttttctgatgaagtcttaattccctaaaagcgcctctttggacactgaggccctctctgcctttcctggcctccggcaacagttttttacaaagattttttgcagtcgagtccatatgtccacccattgatttttaaagcttttgtgatattttagcattttgaaagactttcacagtgagagtagaaggtagatttggaatcatgcattttagcaagtggacttgttgaaacaggaagcaagggccttcagtgtagcccattcttgatccagagctgttgcctgtgacagcggtttctctggatgtcaaaggcagctgcctggtgcccagcttgcttctcgactggtggcccctatgggtgggtgtgcgatggaaatgtgttcctgccggagtctgaggcaccagggtgtgctcaaaggctggccctggtggtggactggcacctgtgcagagtgccgtgtgcttgtggtgcgccatctgaagcaagagtccagcgttctgccgtgtctgtcccccaccatgccccctacaggcggtactgatggcgcttttttttttttttctgtcaggaaaacaatgttggcctgtgggccgcccacaacatatccttccctcactacctgtgtgaccaaggttggcttctgttgacctttaaaaaagaaaccctcaactcaaattgctataattagacacttgcttctgtcttgcctcctgtctgcagctgtgaatagtcatttgactgtgactgttgcccttagccagccagatgcgcctgtgaaccaaagcttcgtgcacatgtgttcccctaaaggttggggagcctcgctgtgtcttgctgttcccaggcaccaccacagcaggtgctgccatactcttgtggtctctgtgcgccccccccccccccccacccgtctgccaagcatgggtatgaatcgtgcacacagccatgcttcaaggccggggcaggggagcctgtgctgatgccatccagggcactgggctgtgcctggaaggcgagccttgattgtctgaacacataaagcaaactgtccagaagggaatggctgatgtctttattctgagggtgagaggctggcaccctgtggacccttgactggccagatcccctcctggggcctccctgcaggctggaccctgcctttgtaacagctgagcagcaccccagcatggccccttccttggttgatgccctctctgctgggctgagggccaggctggccacagaggggccaactctgcccagtgttctccaccccatgcccccagctggtgcagttcccagacctctctctgcctctcctcaagtttaagtatcaaatcgaacattcttttttaaagtaagctctgccctgactcccccagccatgcagagaggcttgcagagctgcctaggcctagtttggccctttccctggcacccaggccctgtgttcagacccctggctctcatcacagaaacaccctttgttgagcagttgtttattctggccctcacagccttggctagtccacaaaggccctggggatgggcaacaggctacaggaacccacctgtcttcctggtcagggcccctggcccctagcagcaggccaatcctggtggggcacagggttctgtgccctttggctgcctacctctgaatatcctggccagcaagccatgccttccccgcccctggggccctgggagcccttcagctcctgtccccataatgggtcctgggcctaggatgaggggaaggtcccagtttcttgtagggtgttatctgggggtcctggtgtgggttgagctggagggctgtggggccccaagacccctgtgccattggggtgctccaccctctcaaacaggatgagcatctcacagtgcggggtctgcgggaacaggtccactgccacagccttgaccggccggaagggaatgcccttcacccggttagatggggctctgcagaggctgtggggggaaaaggggggcgctaaggtcagccgataggctaatcaggggctcctgtgggagctgggggcttggtagcaggcctagcccccacccaggcccctgcagacactcactccacaaagtt

SEQ ID NO: 102785 - DNA, 1478 bp, Homo sapiens
tcagcaaggctggtccaaggtggggtcagggaagacgttgggcaccaaggtggggagtgggcgccggaggtcccggcaggatggagggaccaggaatgtgggcgtcggggcaccagtggcaccacaggagaggagccactgacatcctgggcaccgcctgcccccaggtgaacacacccgcagccgaggtgctctacacagtcatccaggactgggcccaattggatgcggggagcatggtgctggacgtgtgctgtggcaccggcaccattggcctggccctggcccgggtgagccctcctgccctgctgagggcaccctctccccaccccaagacccccattgaccccagctcaaagtcaccacagctgactccatcatgccccaggcccagctcctctttgctgcccacagggccccatgtactcccctccctgggtggggcgacaccacgctttcctgtttcagaaggtaaagagggtcattggggtcgagctatgcccagaggctgtggaggacgcccgggtgaacgcccaggacaatggtgagtggcaaggccgtgggtgggggtggggatgggggcagccgccacccctgctgcaagcctcagccacagccagggcttgggggctgcccgacaggtagagcaagtgagcaagctctttggctaggggttccccagggctggccctgctgggagggcatgtggccctctgacaggccacggtgccatctcttcagagttgagtaatgtggagttccactgcgggagggccgaggacctggtgcccaccctggtgagcagactggcctcccagcacctcgtggccatcctggacccaccccgtgctggcttgcgtgagtggcttttgcttaaggaggtggcacgggaacgaggacacatggggtggctcaccatgttatgcactctctggctgtggggacccagctggtgtttgcctcctcagattccaaggtgatcctggccatccggagagctaagaacctcaggcggctgctgtacgtctcatgcaacccccgggcagccatgggcaactttgtggagtgagtgtctgcaggggcctgggtgggggctaggcctgctaccaagcccccagctcccacaggagcccctgattagcctatcggctgaccttagcgccccccttttccccccacagcctctgcagagccccatctaaccgggtgaagggcattcccttccggccggtcaaggctgtggcagtggacctgttcccgcagaccccgcactgtgagatgctcatcctgtttgagagggtggagcaccccaatggcacaggggtcttggggccccacagccctccagctcaacccacaccaggacccccagataacaccctacaagaaactgggaccttcccctcatcctaggcccaggacccattatggggacaggagctgaagggctcccagggccccaggggcggggaaggcat

SEQ ID NO: 102786 - DNA, 1889 bp, Homo sapiens
caggaaacctgccagagaataggtggggacgaggcaggtgcgataggggaggaaaggagacgggaatggggtcgggagggtagactgggggaggggcagggctgagtgcagagtgcaccgacggaggtctgggtgtcccataaggaagcttggggggccaggcccccagggcctagtcctcaccctagcaccccatctgtccccacacagggcccgaagcccatggagagctgtggccaggagagcagcagtgccctgagctgccctaccgtctcggtgccccctgcagccccggcagccctggaggaggtggagaaagagggcgctggggcggctacagggccggggcctcagcccgggctctacagctacatcagggatgacttgtttacctctgagatctttaaactggagctgcagaacgtgcctcgccacgccagcttcagcgacgtccggcgcttcctgggccgctttggtctgcagccccacaaaaccaaactctttgggcaaccaccctgcgcctttgtgacattccgcagcgctgcagagagggacaaggccctgcgcgttttgcatggtgccctctggaaaggccgcccactcagtgtgcgcctggcccggcccaaggccgaccccatggccaggaggaggcgacaggagggtgagagtgagccaccagtaacacgagtggccgacgtggtgacccctctatggacagtgccctatgctgagcagcttgagcggaagcagctggagtgcgagcaggtgctgcagaaacttgccaagtgagtgtgggcgcaagacgcccctcttggccagggctctgcccggcctgtgcttcctcagcctgtccatgcaccagttgggaggcccagcacaggatctggcggcccctttgggagctagccagcaagacacccacgtcacagtgggcacaatgacatcccaaaggaggggtcaggagcctggacatttggggagtggcctggcatgggtcgggggcagtaggtggagtccaaccaccgatctgctcctcttacagggaaatcgggagcaccaaccgtgccttgctgccctggctgctcgagcagaggcacaagcacaacaaggcctgctgcccgctggagggggtcaggccatcaccccagcaggtcagactagacttcggtggccacaaacccctatcctgggttttgaaaaactttgcttttgctcacccttcctgttgatctccctgctttgtgttttcttctggtaacatcacatagttgtcagctgttcctcttgtttgactgccagcccctgtggggaaatcagggtttccaggcccaagcgctgggcagccagggtaaggtgcagctctctctccctgcagactgagtatcgtaataagtgtgagtttctggttggcgtcggggtggatggggaggataacaccgtgggctgtcggctcggcaagtacaagggcgggacgtgtgctgtggcagccccgtttgacaccgtgcacatccccgaagccaccaagcaggtggtgaaggccttccaggagttcatccggtgaggacctgtgacggggctcccgggaagtcctatgcggtgtgggagcagagggtggtgatcctgccccgggaattctggagtgcctgccatttcagccagatgaaggaaggtgtggccagaggagagagcagggggactgcttgcccagttgtgggcacttgggccagctcgtgattcccacaggtccactccatactcggcatacgacccagagacgtacacaggccactggaagcagctgactgtgcgcaccagccgccgccaccaggccatggccattgcctacttccacccccaggtctcaacgggggccctgctgggggagggtg

SEQ ID NO: 102787 - DNA, 1359 bp, Homo sapiens
ggtggttggactccacctactgcccccgacccatgccaggccactccccaaatgtccaggctcctgacccctcctttgggatgtcattgtgcccactgtgacgtgggtgtcttgctggctagctcccaaaggggccgccagatcctgtgctgggcctcccaactggtgcatggacaggctgaggaagcacaggccgggcagagccctggccaagaggggcgtcttgcgcccacactcacttggcaagtttctgcagcacctgctcgcactccagctgcttccgctcaagctgctcagcatagggcactgtccatagaggggtcaccacgtcggccactcgtgttactggtggctcactctcaccctcctgtcgcctcctcctggccatggggtcggccttgggccgggccaggcgcacactgagtgggcggcctttccagagggcaccatgcaaaacgcgcagggccttgtccctctctgcagcgctgcggaatgtcacaaaggcgcagggtggttgcccaaagagtttggttttgtggggctgcagaccaaagcggcccaggaagcgccggacgtcgctgaagctggcgtggcgaggcacgttctgcagctccagtttaaagatctcagaggtaaacaagtcatccctgatgtagctgtagagcccgggctgaggccccggccctgtagccgccccagcgccctctttctccacctcctccagggctgccggggctgcagggggcaccgagacggtagggcagctcagggcactgctgctctcctggccacagctctccatgggcttcgggccctgtgtggggacagatggggtgctagggtgaggactaggccctgggggcctggccccccaagcttccttatgggacacccagacctccgtcggtgcactctgcactcagccctgcccctcccccagtctaccctcccgaccccattcccgtctcctttcctcccctatcgcacctgcctcgtccccacctattctctggcaggtttcctgacccaccccgcctcctcccaccccatccccgtctctacccagcgtctccccgcactctacctcgttgtcgaggttctcactcatcgcccaggcggttctccgcctagaccagggacgccatgggggccgcctggccacctcgtcctgggcctgtcacaagggaagtggcctgtcacaagggaagtgctcagaggggaggtgctcacagagccggtgcaacgccgcgaggtcgccgccacccccggcttcgccccaggcggggcgggactcgaacctgcgatgctcaggtccgggtctcaggcttggggctgtaccgcccgcccgccaggggcccg

SEQ ID NO: 102788 - DNA, 1775 bp, Homo sapiens
aggcctgggggctgcagggcccccgcgtgaccttggggtgggttggggagcggccgtcgccacgcgggacggccccagcctccaggaactggtgcgggcggcgggtttcctccggctcggcccacttggggctccccactagtacggtgcatttattctttccgtcgcccacgcagcacttcattcattcggttcttacgtctggaaccgccactggcctctgtggcagaagctcgcgttccagcgtggggcacaggtcctagatgcgccgacccaggcggcggctttgttggctgcggtgtctggttgagtgcgggccgctgcagagccgcagtgctgtggggaacagtgaagagcagcgaaaagcttatgttttcttttccagtttgagtctagtggtgaagtcttgggtctcttacggacttctgggtgaccaaggcatgtgttctggaagactcgaacctaaaatatgattattggtgctctcttatcctctaaattgggccaggatttcatgactttcaccggtacaatttatctagttattaacttagttttctgaactgtgaaaaaattgctggcagagctgtgaatccagtgtaaatactagcagtcctgtagcgacttttttcgttttactaagcaagagcacaactatttcctaattagtcaaaactgaaagagttacattttgctttaaagtaatatttcaaaatctatttcgacccatcattgtgtcctttgatcttcacacagcaggtatcatctgcattttatggatgaggaagaaactgatgctcaaagagatgaggcagtttctgccaggccactctctgcaagtgttggcggcttgtagggtcccccatcagtctgtgcacagatctgattgatgtctgtgaatctgggggaggggccccaagttctggtgtctcactctgtgctcacatggagctgggcataaacgcagagctttcctagtgtggaagagtgggcctaatttcttgctttggggttgggcccatccttgtatctgaagtcccttcattgtcggagggctgaccactgcaggcactggttgggctctggttgtgagccagatccataggccagcagtgtaacctctttgtatctccacaggacactcatgaggaccatgatacttccactgagaatacagacgagtccaaccatgaccctcagtttgagccaatagtttctcttcctgagcaagaaattaaaacactggaagaagatgaagaggaactttttaaaatgtaagtaggctgatgtcccagaaataggactctttaaggttgaggttacaacttttatgggtgtccaggttttggcctgacttttaatcagactgaggctgcttaaagaaagggcctaaagttggtgactaatcccatgtggaaatttaacccgttcctttcatgaatcttcaccagatgcccttgctgccctgcagccagttgcatgaagggcatcccatcttgctgctctgtccactggcatggcggccccactgcccttttttgccactggcttctgaggatccagggagtcccttggttgagcagggggttttaagtttttgcagcatagacttctttggcatcgtgaagcttataaatcccccacccggtgtctgttgttgttgttgttttgagatggagtctcgctctgtcgcccaggctggagtgcagtggtgcgatcttggctcattgcaagctccgcctcccaggttcacgccattctcctgcctcagctgg

SEQ ID NO: 102789 - DNA, 1047 bp, Homo sapiens
gtgcctcagcctcctgagtagctgggattacaggcgtgcatcaccacactcagatgatttttgtatttgtagtagagatggggtttcaccatgttggccaggctggttttgaactcctaacctcagatgacctgcccgcctcggcctccccgaatgctgggattacaaatgagccaccgcgcccggtcgtctaattctcttggttgtggaaccggaattcaagatgacctggagtttgttgggctgctgcgctttctggtggtgttgtgacgggcagttcttggagcctgaagaagggctggggcgttcgtggaggcatggggtcctgcagtgcagagttgtcctgtgtcctcctgcgcaggccctgcatgtgggctgcaggtctgcactcttaacctcacggcttttcttgcaggcgggcaaaactgttccgatttgcctctgagaacgatctcccagaatggaaggagcgaggcactggtgacgtcaagctcctgaagcacaaggagaaaggggccatccgcctcctcatgcggagggacaagaccctgaagatctgtgccaaccactacagtaggtggcatgaacgaccacctcgacagtccccagcagcttggcctgggacctttgggaagattcagggctgattgggaactggggagcgtgttatttcatggagtgcaagtttgtggtgtgtttgttgaatttaaaaccagaaatacgtttttcagacgtgcctctgaactcagagcaggcccgcagcgaagcttagagcacacgggggtgtggagtcagccagacgggccctgatgggaggacgcagcgcccaggctgggctcgggacgaggagtgagtgctgcagggcgagggggtgctgtgtgtgtgtgtgtgtgtgtgtgtgtgtgtgtgtgtgtggtgtctggggggtgggggttggtgtctggggggggttaatggggggtatgtgtagtatctagggggctgtggtgtctactggtggtggtgtataggggtgtgtggttcggtgtgtgtggtgtctggggcagg

SEQ ID NO: 102790 - DNA, 2577 bp, Homo sapiens
gtggccgagggctgggtgggctggcctttgcagtcatctcaccatcttcacgagcttctctctcttcagtcacgccgatgatggagctgaagcccaacgcaggtagcgaccgtgcctgggtctggaacacccacgctgacttcgccgacgagtgccccaagccagagctgctggccatccgcttcctgaatgctgagagtgagccaagggccctggggacctgcctgacttggggctcacctgcgtggcagcgtggcgggttatgtgcaacaaatgctgttgccttttggggagagggggcagtaactgggaagtgtgtcgtgtgggctgccctgccctgctgtttgggggccatgcccagactgaagccatgagcagcgccttcccccttaaactcaaagctgtgccaagtagctggtgaacagcagtgcccgctcagccgccttgtggctggcactttggtttgctctccaagctccggttcccattagttgttgcggagcctgaggcccaacccagggcttcctcccagtgctgatcctcgtgccaggcttctggttcactggggccaggggcccctcatggttgcctgggtgccagcaggggctgggcagagagatccacaggcccaggctgatctcttccctgctcagaggtctttccagtccagatcgtccaagctgcgtccagtggctcctggaggagtcagtgggtactgtggcctggcgcctggtagctggccgtttggtgccaagtgaccttgtccttgctgtgggcgtggctgccccagcagcctttccaacacggttgggagccgagcctgtggcaaagaggcccatgccccttggttgcctgagggtccgtgctctaccgctctgcccaaatgggtgcagtcagatgaaggagacagaaggccagggccgatgtcaggtggaccagtcctttcttaggtcagcaattaccatgaaatgggtcttctgtgaatcctgactcttcagacccggcagggcatgtctcttccactgctcacagctcttaggaagtcttcgctctcccttccacagatgcacagaaattcaaaacaaagtttgaagaatgcaggaaagagatcgaagagagagaaaagaaaggtgacgtggtgccatgggttggggggcttctttgcagactcactctgcatctgactatacttccaggcgggtgctttttctgtctgccagataaacattccagggtgctgtggccgcctcacgtatccagagtgatgcagctccctggggacacaggtgcttcctggggagccctgagcacttgtcagtgttgctggcctcagtccaattgggcaggcattggagtccgggcactgcctggagctcaccagaaggtgctttatgatggtcctcggtttgtctctcagagggcttggtcacctctgccatgaggctggactgcagctgtggtggcaagtgaccagatgtcactgagcagcctgaccatggtctaggcagtgcttgagtgcatccacctggcttcctttcgtcactgaatttcaagaagacagactccaggaggcggcttggccaggcaggagtctgtcccgagggcgggcaagccgctgtgggtgggtgacggcacttgggaccagcctggcgagggccatgtgcttgaatgcaccgtgcttctgttttctcactgtgctgcttgtgtttttagcaggatcaggcaaaaatgatcatgccgaaaaagtggcggaaaagctagaagctctctcggtgaaggaggagaccaaggaggatgctgaggagaagcaataaatcgtcttattttattttcttttcctctctttcctttcctttttttaaaaaattttaccctgcccctctttttcggtttgtttttattctttcatttttacaagggacgttatataaagaactgaactcaacattcaggttgttttttttttttgtttctaagtttttgccctattgaagatgacttcagaaaatccattccccagtcatgaaaatgtactgtgctaactttcttttccatagtggaaacacttatttatagtcatcaaaaatagtgaataaaaaacacatttggaacctgggccagatggcaggactgtgtgtgtacaggcccctgcgctgtgagcgccgctcgcctaagcctcccgggtgtatgtccaggcctgtccgcagcacaggtgggtgctgcacctcacggtagcctgggttcctgggagagacgccctggtgtctgaggtcgtgcatgtatcttgctgtgggccttgaagctgaggtgtctgagctggcgctggtgagggagcctggccaggggtgtctggtgccgggtgtggtactgatgcacgactgtgggctgggcagcgtgggctctgccgaggcaggctccactgtgccttatggcctgaacagctactgctttttttctatggtgaggaggggtgggctttctgtgttttgaggagagaaaggaagaccactggagtaccttggctttggagcagggaggcagtagccaactgagcagagtctctagcatcggccaagg

SEQ ID NO: 102791 - DNA, 1038 bp, Homo sapiens
tgacccctgtgccctggtgcaggtacgtggtggagccaccccggctgccgctcgcggtgagtttgaagccgcctttccttaggcctgaactcctggaccgagctgcaccgctcaaggtcaagcttagtgacaacgggctgaaggctggcctgggccgtagcaaggtgggcgcctgggcttagggatgggctggcagtcaggcccttggatggggaaacaggcaggttggtgggggcctagaagaggtggatggggcagacagagccgtagacagattcttgggagggggctaggtcccaggctgaatccctagtgaagccctgcccctcatccaagccccacacaccactgaccccgctccctcccagtccaagggcagcctggaccggctggatgagaagccactggacttggggccaccactgccccccaagatagaggctggcacgttcagcagtgacctgcagaccccgcgcccaggcagtgctggtgaggttggggcagccacgactagggagggatatgggttgaccctcctctgacctcagtctgacagtggtctgcatccccagagagtgccctgtcggtgcagaggaccagccccccgacacctgccatgtacaagtttaggccggctttccccacgggtcccaaggtgcccttctgtggaccaggcgagcaggtaaggaggcctagcctgccccctggcaggcctcgtcccccaggcccgcctctaggagctcgccccacagccttcaccccgtgaaggccccacctccagagccccatctctccagcagaggccacatcccctgaggccatgcccctcagggctctgcctgggtcaccaagggccttgtgtgactggtaggaccctgtctgtgtgcacccagagctgggacccacagaggggagcagggtgtcctgggaggggctggcgtgggccatccaggcttggcgtctgtcccttggccagcattgccctaggccaggtgggcggctgcccccaggagcactgtgtaccaggatgcctggaat

SEQ ID NO: 102792 - DNA, 1035 bp, Homo sapiens
gctctgctgagcccccgctcactgcagtgcggcccgagggctccgagccaccagggttccccacctcgggccctcgccggaggccaggctgttcacgcaagaaccgcacccgcagccactgccgtctgggccaggcaggcagcgggggtggcgggactggtgactcagaaggctcaggtgccctacccagcctcacctgcagcctcacccccctgggcctggcgctggtgctgtggacagtgcttgggccctgctgacccccagcggacacaagagcgtgctcagcagccaggtgtgtgtacatacggggtctctctccacgccgccaagccagccgggcggccgacccgtggggcaggccaggccaggtcctccctgatggacgcctgccgcccgccacccccatctccaccccatcatgtttacagggttcggcggcagcgtttgttccagaacgccgcctcccacccagatcgcggtatatagagatatgcattttattttacttgtgtaaaaatatcggacgacgtggaataaagagctcttttcttaagctgtggcctctcaggctagggtgctgtgggcggtgagaagcaggggtgggtgctggacgggcagcctctcccccatcacaaggcccccagaggaagggagttgcctggcaccacaggtgggacagccttggccaagggcagctccaatgtcaggtgcccctggccccccagccgcacagatggagcatgcttggtggctgacgtcgttgagcctggctgatggagcacatgccaggtccatgggtctggacatagcagcccctgtggggacagttgctctcgggccccccaccccaatcaggctgcccgggcagcccccaggaggaggctgaggatgagggaccctgttcctacccctggtgggtggcaggagaggaaggccctgaaggagagttgggcgggtcaggcctggcctcaaggcccagtgggggctgtatgcaccctcacaccgctgctggtggtcacactagaccccacatgc

SEQ ID NO: 102793 - DNA, 1021 bp, Homo sapiens
ccactgctgtcccacacctgcatggaaacacaaaccccaccacggagccccctctcatctctacagggcctccagagcgccatgtgcaagaacttcatgggcggggtggggtggggtcaggagcctgctgtgggctggccaggcatgaacaccaagctggaggtggcggtgctgcaggtggggcagccttccccttccccactcctgtggcttgtgagggggtgggcaccgtgggggcgcacagggggcatggtgggcagtggtcggaggtggttttgggaactcacccagggcacgtggctcactctgcagctgctggggttggcctggtggggaggaggaggtcggagggactctgaacagagaggggagatgctggcaggagggctggagacccagccctgcagggcgtgggcgtgcatcagcagcggggtgggaatagacctgtctatgcagtagaaacaaaccagacatggatcctgttcttactaacgatgtaataaagccagaaacagcaccagaggccaatgggtggggggaagaataaaatgtgagcgaatggggctgatccaggccttctcacttctcaaggaaagtgtcgcaaagatgggcatcgcatccagggctgagattgaggactggttcacggcagagaccctgggagtgtctgggtgagagcagcccccaggctgagaggacacgagcatcagccatggttccagccaagccccagtgacgtctcccagtcctggctgccctgcctgagagggtgggccttgggatgacagtgctgaaggaactgcttttcacacagcaggacttgatggcctcaggagtccctgaggctggggctgggctgggcaggggagacacagggccagcacagaccccatagagggctctttatagaattatctgggtccagagcaaaggtggcactctcagccctccctggagtccacgccggcaggtgaaggatcagagccccatgccccatccttggggccaggggctgggaccc

SEQ ID NO: 102794 - DNA, 1032 bp, Homo sapiens
tcctctatcccagtgacctgcatcaggctcctcctagtggttcccacaggacactgaccaggctgcggcaggcgcatacttgcactccgggccttctcccatgctctccagcccccagccccacaaagcaggctggatgtggtcctcatgccctggggcttggatgggggcccctgtacagatggcagtgacagcatcctgggaccagggctggggcaggaaaggctggagggtcccagtctccaggcagggggaggggtggtgggctgggcacacagcccaggaaggggcccccaggtagaggcctctgctgcaacagaggtgggggccctaccagggccccggttatggcagaacctgcagctatcacacaagccacatttgggccacactgaggcatctttatttctctgggtcacacagagcttgggcctgggagcctcttctgcatgggggctgcagctgccaagggagcggctgagaccagaacaagcgctcgggtgggccccagtgcaggttgggatgtgcccggtggagtaaggtgtgagaacccccagcctcactctctgcctggtcctgaagcagacagcagcaggctggcccagcctcccctttatgagactatcctagggtttgacagcaagtcccagatgaagggtgacaggcagctggggtccacctggtctctcctcagcagggggaaccccctgcgggcagctgggaaggcagtggccaaaggtcaagaagatgaactctgcccagacttctgctgcctgtggctatggtgggacagggctgcctttctggtcacactgggcagcaggcgactgccagggacctcccagtcccagggctgcattccctgcccggcagcccctctgctgcagctttcggatgagttccagcaggttcatctgcagcatcagctcctgggatacagaggggccccatgaaggccagagtgacccccaggcccctttcatcccggcccaagggtgccaggcagtgagcccacgggggcgaccatcctgt

SEQ ID NO: 102795 - DNA, 1033 bp, Homo sapiens
tgcatctctggaggccaggcctagggtgcagcttgctgagatgggctgagccaaagggcagccctgccactgcgcatttgggctcagaagtgctccaaggcttccttattcgcacaaggcagggcctaaaacagagcttggaggccttggtggcctgtcccagccaggtgtcttcttcagccccgtctcccacctttctggccttttctcaacacgtcagcccaaccttttccagctccctggatgcacacacttgccttgcaccttaacacatgttgtgcccatgtttcttttctgggttcacctctacccattctccagtcctggcccagtgtcactgtacctgttgagttgcctgtgccccctgcagtccaagaatagggctggtcttggtcaccccatcaacatttgtcacagcaggggctaatgagggcaccggctggggcagagtggacccctggcagctctgcctcatccttccccagtggcccaccacgacctggataacacactcaactgcagcttcctggagccaccctcagggctggagcagccctcaccatcctggtcctctcgggcctccttctcctcgtttgacaccactgatgaaggccctgtgtactgtgtaccccatgagggtaagtaaggccctacctgggcatcactccagcccagtgaaatgttcccatggaaaagctgtgttctgggtgggacacaggagaagggcaggcagcatggagaggaaggccttggccatgctggtacctgagggttgcccacagagctgaggccatagagctggactctgctgctcagtaccggagacaggtgtggggagatgggtaggccacagcccagggttgctcctgggggaaagtaggcagagagaagtttctgggcttaggtagggggtggcagaggagacaggaggaagggatccacagagtatgggagttggatccacacacagcctttgatccacagatagcagaaaggagcctgatggtctgggattctgccctgtctcctccct

SEQ ID NO: 102796 - DNA, 1821 bp, Homo sapiens
agtccatgtctctcaggcagcttcgtttcctggaggggagagaagcagtgccctcagacatggggaatgaccacatgctgatgggggcacagccacacactcgggggcagagactggcttagggccgggtggcctagaggaagggctgggctggagcaaagccagagagaataggatcattctaggggagggcccaaaagacagcctcctgcagactcggccatccctgggtgagaaagcagcagcctggcccatggacaggatgtttcaacactggccctgtgccatccttccagggggcctgacctgtcagaatggtgggtaactgttgccaccttggtcagtgggcttgtgggggagctggcagcctcgtcccagtgggtgctgggctttattctagccttggctttgcaggtggcctgctacagctgcacgtctggacagtggtcatctgtctgcccactccctgctgggcacggtgagcctggcattgctgtgctggacaacaggatctatgtgttaggtggccgctcacacaaccgcggcagccgcacaggctacgtgcacatttacgatgtggagaaggactgctgggaggaagggccccagctggacaactccatctcaggcctggcggcctgtgtgctcaccctgccccgctccctgctccttgagccgccccgcgggacccctgaccgcagccaggccgacccggactttgcctctgaggtgatgagtgtgtctgactgggaggagtttgacaactccagtgaggactaggctccctgtgcctggcatcagagggaagggaggctggggctgcagggcagtgaaacccacgcagcctaggccagagcactttactccaggcagggcccctgcccctgttggccacagcttatgggccctgccctctttcttcacaccagccccttggccagcctgccgcaggcatctcagggccatgcagatcccaggctgtggattacgtcactgcaggaactgcttctgaaaggctttggccttcctcagtgagccctggaggggttggccttctctcctccctgcctagatcagtccttctccaaaaggacctgggagctggcagcctgggcaggggggctgaggcacgtggtagccctctttctgtgaatggggtggggctgtgggggcagctggggttggaggatgagagctcctgaggggcagaggagcagagatgcatcagctcgcctgggactggctctgtgataaaaagacccctcccgctgggttttcagaccccatgttgttggtcaatgaaataaagcatcttacagaaggtgttaactgtttttctgtagccacagcctcagttcctttccacagtgcacccaagctgcgtccccaggaagcgtggcttctggggtcagagctgccatctgggagaggctgtggaagcccaggccagaagccaagtggcactgggaagaccctgcctgagagggaagcacagtaaactccacaagctaacagggcactcagtgggaaagctggaactcgccctggtctggtgacaggtggttgtgcagccacttgagtgtcttctctggtgtggaacttgtctcccaaccagggcagcacgcagagtttcagcccagctcgttaggagtctctcagcctgagggtcagggaaccagagcttcagcacctgggagcggggcagcatcagggggtcggtggggggggcccctctggcctgtgcccggctcctcccaacctcctgaagctgagtgtgctggggaggggagctgcatgtgctacaggtttgccaggtaaccc

SEQ ID NO: 102797 - DNA, 1066 bp, Homo sapiens
ttaaaagcagggtcagcaggcccggaggattgcatgtccagtgggagtgggggaggggtggaggccactgagggtgggtcagcggtccccagggttctgtggcttcttccagactggcttggaaaaaatgcttttattttcttggagttcccccatgcagatgttaactttaggagcaaaggaaagacaaaggctacatttcatttctgagtctatagatgtatccgctattgggaagaggttagaggtcaatgactaggacagtatgtcccatgagaatcgagggaggattcttgtctgtatgtgagtgggaagtggtgaagcctcacagcgttgtcaggcaggtgtggggtggtgattggccttgacagagtacccagccacccttcctcactgccctctcacgccatttctcctggtggctccacacaggtgtatgcccacgcaggcgcgacgctggaggggaagatgtatatcacctgcggccgcagaggggaggattacctgaaagagacacactgctacgatccaggcagcaacacttggcacacactggctgatgggcctgtgcggcgcgcctggcacggcatggcaaccctcctcaacaagctgtatgtgatcgggggcagcaacaacgatgccggatacaggagggacgtgcaccaggtgagtggggcccggggcagtccacacccgtcatcattcccaagcctctcagttgttattgatggaaaatgtaattgaatcatgtgccttttaaaaatagactattttttagagcagttttaggttcacagcaaaattaagtggaaggtacagtttccatacacccccttttccccccatacacatatagcctccccactgcagacctctcgctccagaggggtggatgtgtcacagttgttgaaactgcattgatgcatcaccatcaaccagagtccacagtgttcactcttggcacattctataggtttggacaaatgtcaccatgacagtatcacacacatacacatctacctttgcttattactcttaaaaacttttaggccggatgtggtggcac

SEQ ID NO: 102798 - DNA, 1029 bp, Homo sapiens
cctggcctccttctgctctttgaatgatacttggcatttggtaggaactccataaatatacattgaatgaaatgacttttattagtttcccattaattaattcattgctttgaaatgtgctctggagttgctactgctccgatccaggaactgcactgatgaacacagcagaagcaagctgcttgtggcctcacctcccgaagctcacatgggactccttgggcccatgaaaagggaaacaggacaatttccaggatggctgcccagacttcgtcaggatccttttgtgggatggctcatgcatgcacacagttcactcagagcacagagtgggtcagcccactaccagggccctgccaccagcgccaggttcttctctgaatgctgtcactcttggcaacatgggcttaagtccctgttggtataactccattttcttgtgtcttcactttgcagaggaatgtttgctgggggattgaaggagatggaacaggaagaggtcctgatccacggtgtgtcctacaatgctatgtgccaaatcctacatttcatatacacctccgagctggagctcagcctgagcaatgtacaagagacactggtggctgcctgccagcttcaggtgaggcatgtctcatctagcaaggcagacccacacccaggtggggttccctgagatgcccatgatgcctgccgggcactagcattggcttgaagatgggtcaggaatgtgaggagaccaagcagtgacgaaggccatgaagtggggaagactctggagttgttcctggagctcaagcagagccgctctagacaccccaggcctctgcctttgccctcttctctattgctggttgtttccccactgtctgagtctccctgtcattgaaagcatcctgcacataagcaggtaggctgacccgaggctgcatgtggacgtcctgtgtgctctggggtctggcaatggggagcatccaccagcattgctgccagggcccttcctgcctgtcccctcactgggccacttca

SEQ ID NO: 102799 - DNA, 1016 bp, Homo sapiens
ttgacacaaaactcagaggcaagtaaatggtaaatttgacaacattgaaaacgaagataggttggtccgaaggtagtgtgagttacctcagttgattgttcacagtcacagatccaactccaggttctactttttcaccttctcactactgcagttgactagacttgtttaaaaaaaaaaaaaaaaaagacaaatttctgcatggcaaaaaagcaatacaaaatcaaaagatcggggaaactcctcatcaaagaaagggcagatttcttcaaattgataagacagtctaacagaaaactgactaagaatctgaactgttcagaaaagaaaatggaaatggctctttaacatataaggagattttctgtaccttatgtgataaggtttttcccttttgtggtggtgagttagagctggtgtcttcctgggttgggggtagagggtgcaggcaccaggccctgctatcaggaatgatataaaaacagcaacttgacaatactatcaaagtataaatgtatgtaaacccttcgacccagcaactgtatttgtgggacttaatcctggcatatgcatactcagcatgttgtaagggtgaggatgttcatcatgtgaaataactggaaattacaagtaacctaaatatacccctgtagaaatgggttaaagaagtgagacagctggctgggcgcggtggctcatgcctgtaatcccagcactgtgggaggctgaggcgggtggatcacctgaggtcaggagtttgagaccagcctggccaacgtggtgaaaccccatctctactaaaaatacaaaaattagccgggcatggtggcgcaggactgtaatcccagctacccgggaggctgagtttggagaattgcttgaacccgggaggcggaggttgcagtgagccgagattgcaccattgctctccagcctgggcgacaagagcgaaactccatcttaaaaaaataaaataaaataaaaaaagtgagacagcctttgcaaagagtgaggca

SEQ ID NO: 102800 - DNA, 1018 bp, Homo sapiens
agttgggctccaacccaggtcagtctgtttcccaaaacccttctgtttgactttgccgctgaagaagatacaatgagatgaagagtcttgggcatgatggcacacaggtcatcaggaagaaggccatcaggaagttggactagaggtgggaggggagaaggaattaggggatttggaaatagagggaaaacaggtgagcctgagggaggcacaggagcaaggggagcaacagagctggccagtctgtgtgtggtggggctgatgcctgcctgctcacccctgtcccctgttttgccaactgtcaggccacagttgtaagggatcttgtggctgtcaggatggcagaggagcaggagttcacccagctctgcaagttgcctgcacagccctcacacccacactgcgtgaacaacacctaccgcagcgcacagcactcccaggctctgctccgagggctgctggctctccgggacagcggaatcctcttcgatgttgtgctggtggtggagggcagacacatcgaggcccatcgcatcctgctggctgcgtcctgcgattacttcaggtgagttcactagagctgtttgtaagaagaataacaaaggtaatcctggctctgctagtaaaggtactggcggtgacagtggctggtctcctgctcacctcagagcctcccctactccttgtggctatgacttagtcaacaagtgtgagagacagaagggggtcttagagttcatttttcattcagtgatcctgtttcttgggctttgcctcctcttctcttccctctcttctcttccttttcttttccttttctctctcttttcttttctcttttctttcctcctttctctcctcccctcccttaccattcctcccctccgtcagtaattattgctgtgtatgcatcaccttctggctcacacctctcatccctcaggtgttagcctctggccctcccagtgagctctgtggcccctctggggtttcttatggcctccttcgtgaccccatc

SEQ ID NO: 102801 - DNA, 1007 bp, Homo sapiens
cggccttcctggccgcgaccctccgcgctggagcgggcggccttgcaacaggcgggcgatttggggccggcctgacgagcctcagttccctcgatcgggcccggggactgcagccgtaggagcccagccttgccagctctcccggtttcctgagaggagccggagatcgcgctgtcagtgcaaaatcaccagagcgcgaagcgtcggctgccagttctgaccattttagatccggtgcgggccgagccgagtggatctggggcgggcagcggggcaccgccaccttccgcctgggctcctcactgggcgccctcgctccggccctccgcggggccgagtgcctccaagacggctccctgggagattcttccagagcgcaccctttggaaggctgccccgctgggaatcagcacccactccctctcctctaccgcagccgccccctttgcctttgtggccgaccttgcttcatgctgccaaggattgagtttctttgaggggatactgctcgttcgggggccctacagaaggctgagggtatctactcagtaaaatcgtaccgaactgaaagttcctctgaaatgattttgactctgccatccatcacttcataaaaattcatcttgtatccttcagtttgtagctatgtggcacattaagcttcctttcttctccccactgaaacttcgaacagtacaaaacggggaacttggcttgtgatgactaaaattggggatatgagactgggggcgggcgcggtggctcatgcctgtaatcccagcactttgggaggccaaggctggcagatcacctgaggtcaggagagactagcctggccaacatggtgaaaccccgtctctactaaaaatacaaaaattagctgggtgtggtgacacgtgcttgtaatcccagctactcgggaggctgaggtaggagaatcgcttgaacccaggagatgaaggctgcagtgagccaagaccctaccactgcactctagcctacaccat

SEQ ID NO: 102802 - DNA, 1034 bp, Homo sapiens
aggtaggaactccaagagtgcaggagtctcattctgtcgcccaggctggagtgcagtagtgccatcttggctcactgcaacctctgcctccagggttcaagcgattctcctgcctcagcctcccgagtagctgggaccacaggtgcctgccaccacacccgactaatttttgtatttttagtggagacagggtttcaccacgttagccaggctggtctcaaactcctgacctcaggtgatccacctgcctcggcctcccaaagtgctgggattacagacctgagccatcgtgcccagcccaagagtgctttttgaatctagcagggtggtaggtcaatgtcattttgtttttctttttacattaagacagatgtatgcacctctcagcattaaacctcctttctgtgatgtctttaagaatcacagtcatattgctgtagccccgtctgtacattccttcagtttcctgaggttggctggttgctgtttggagtggtcagaatgctttctagcacgagctggactgggcctattcaattcactcagaggcaaggccccagagccctgacatgtttgcttgtttcttttttcttttgctttctttcttttttttttttttgagacggagtctcgcactgttgcccaggctgaagtgcagtggcgcaatctccgctcactgccagctccgcctcccgggttcatgccattctcctgcctcagcctcccgagtagctgggactacaggcgcctgccaccatgcccagctaattttttgtatttttagtagagacagggtttcactgtgttagccaggatggtcgtgctcgcctgacctcgtgatctgcccgccttggcctcccaaagtgctgggactacaggcgtgagccaccgtgctcagcctgcttctttctttctttttttttttttttttttttttgagatggagtttcgctctgtcacccaggctggagtgcagtggcgcaatctcggctcactgcaacctccacctcccggttcaagcgattctcctgcct

SEQ ID NO: 102803 - DNA, 2025 bp, Homo sapiens
cagatgatccacccgcctcggcctcccaaagtgttgggattacaggcgtgtggcactgcacctggccacttgtttctttatcagcaagcccagggtgggaggccaggcaaggaagagacccatcccactggcaagaaggcaggcagtgagcacaccagagcagtccacccctgggagccacaggccaggcctttctaacagattcacacttgtttttgtctttctgtgtgtgagtgtgggaggtgggggtgggggtgggtggggcagcatgtgctgcattcgaggggtctccaccttaactgatgtacatggctctttatccccgtggagcagcagtgtgatgaaaaactcttcataggattctatctcttagtacaaaattgttggtaaatgggtttttaaagatatttttcacatttatgtggtctttctcttcttgtctctagctagaagtgaagttggagcttgtctctttgatcccacatataggacctgcattgtcccacatagggacagacccttgccttgggagggactgagagatgacttcatgtggccccttcattttataggagtaatcgagtctagaaccagggtgctaccatctggcagagttcatggggaacgcaggccactcagagagcaggaaatagaggccagctggccacccagtagtctaatgcgtacttccttgatcctgaactggttgtgagccatccctaggggcaacccctcccccgccccgtcccttcatgccagggctctctctttgcttcatggcgaccacctttcctgtcccttttttctgatcaccctgctcagtggcctgtcattgctctctgttgagtgccccttcccatatgcctctcctggacctcagccaggctggtgtgctggcgatagcaccttgtcaccaggggcagctgctatgcagggcctgttggccagggccctgcagcggtggagtcactggtgtgtgcaaacgtctcttctccttttgtgtttcagcgaggatgccatgaggaaagctggtgtggcacacagtaaatccagcaaggatatggagagccatgttttcctgaaggccaagacccgggtaaggccctagtaagtggagccactctggcagagagacttggagaggagagcatcacagactctggaacccctctgttgggtgtcctagggtgtaggggtggggtggttgctcatcgattgatcacaggcacagttggttttgcctgcagcagtctgggtcctcctgtgtgtccatggtacagggagggcacttgggttgcaggcccagcctctggccccagacctcactgccgtcaccttccatctgtggtcagcccctgtgaatcctacaggaagcttgctcaggcccctagctggtcctgtggaagggatcaatgccgtgagcaagaacctggtttgtcctcagcccctcctaggggtccttacctaagccctacagggccctgaggcatgggcccagaagcattcctgtccccttttgctaagtgaagaaggtgatgcttatctagaactcgccacaggtggagtggagaagaaggatttccactatatgtgggctttctccctgggtggggcaccacactgagggctttatgtgaccacctcctttaatctgtgtgtgctccctgggacagaaccgttttactagaaatgaacaaaacacatattcacttgtgtgcacgtgtgtgtgcaaggcagagctgcaagagcacagggactgaggtggggtagagtgggctctgtactatggacacgtgtgactgaagtgggatagagtgggctctgtattatggatacgtgtcactgaggtggggtagagtgggctctgtactacggatacgtttgataagctttttctttttctttaagagctttatacggttcaccctttaaagtttacatttcagtggtctttaggatattcacagagttgtgtggccatcaccaaaatctaattttggaacattcattaataaataaaaagag

SEQ ID NO: 102804 - DNA, 1058 bp, Homo sapiens
tcctaccctatcctgtgtcaggtttcctcttctttggggccataggcatcctcatttctacccactcctgctctggaatcttcctccatcccaagccaccttcccttctcataccttaattctcctcttacttcctgttgtctaactctcagcacgtgctggtttcctcatcctagaacaatctgcctggttcttcgtcccaagctctcattacctcactatttttagcacatcagataagtacaccagctgggtttagggaggacccacagaagtgccggctcaagttccttgtcacgttctactcttgtgtacttggtgcattttttttttaatcatgagcttatacttgataataaattgtttttaaatgtatgagtttagaatgctcacatgagttgccttgtcatcccacttcagagactttgtcttaaaccagttctttgtcagaagttcagtggtgaagcttgatatcctgcccacgccctccccagtctggccttggcccccacatcctgtttttagcttccaaggggactggtcttctgtgtggcactagttgaaagttacagtgggggctgggcacggtggctcacgcctgtaatcccagcactttgggaggctgaggcgggcggatcacgaggtcaggagatcgagaccatcctggctaacacggtgagaccccgtctctactaaaaatacaaaaaattagccgggcgtagtggtgggtgcctgtagtcccagctactcgggagactaaggcaggagaatggcatgaacctgggaggcggagcttgcagggggcgagatcgtgccactgcactccagcctgggcaacagagcgagactctgtctcaaaagaaaaaagaaaaagttacagtggattctctacttcaggatcttgttaccacctttgtcagaggccaactctccctgcccttcaccacttgcctccctggtctccctgaaactagtagtgttgtctgatgggcatttgataccccttcctgacacctttcccaaagactactgcatgattaaggccctttcagatcttc

SEQ ID NO: 102805 - DNA, 1038 bp, Homo sapiens
tcgacctccagctggtgttgcatgaggtgatggtgatgtcatgttagcagcactgcttctcagaagttgttcagcttcccatggtttccatagagagtctagacgtgttaaacatctgccctcacagcaggtcttggttgggagaggaaagccccaaagggccccaccaccctcccaccccttcaggcctcagctagctgggcttctctggatcttggcacccctctcccagagctgacagtgcatctgcagccacacttttccttctcctgctgacaagcagaccttgaccgtcaccgtgaggctcatgccactgacctataggggcaaagcaagcatcgttgcagaggcttcagaaatctgcagttgccccagcttttatcctagcttccatggagctgtacctattccttgtcatcttttgctgaagtttctaggtatgccctttgaaccatcctagtggaatggtagaccagagcccaggcacacacttggtgcctccccggtgtcaggaaggcagctggtgttggcctcggggggcccagagcctttctgtgggagatgtgcccctccccgtgtgagtgagaggtcagcctgtcagcccaggaaggccttttttttttttttttttttgagacttttttttgcctcttactctgttgcccaggctggagtgcagtggtgtgatctcggctcactgcaacctctgccccaccagtttaagtgattctcctgcctcagcctcccaagtagctgggattacaggtgtgagccaccatgcctggctaatttttgtattattagtagagacggggtttcgccaggttgtccaggctggtctcgaactcctgacctcaggtgatctgcccgcctcggcctcccaaagtgctgggattacaggcgtgagccactgcacccagccaggaaggctttcttgatggctctgcagatggccacctgggcttcctgaggcccagactgtcacagggaggagctggtgccacagaggcagatgagtgataaccgagtgctgcttgt

SEQ ID NO: 102806 - DNA, 1244 bp, Homo sapiens
gaggctgtgagttccacgacctgctcacatgctgctggtgtctccttgactagacccctttgggttctgcactcttgtctgctaaaactgcttctcctcctttcccatagcctctggcacagtatccactgggttcacagaatcaggttgggttgctgtatgtggaggaatgactttagtagcagcatgtaggactgatttttataaacacaaaaagtccccaatgttttcagtgtgcgatatgtgccaggccttgagctaagctctttgtgtacagagcctcactgtttcttgttgtagcaggtcatagtttgagcatttagccccttttacagactaagagtgcccccagggagccaccaagtcaggatcgagggctcaagtgaaacccttatgccttggcctctcagcaggattcttctggaaactcctcactccccttcctgctgggctgatgacctggcttctccttcttgtttactgggcactcctgggtgggctccctccatgcccccacaagaccaggctctgtcctgggctttggcttgcccatactctgttgtgggctggccactccccacacccagctgctggtgtttccacctagacttctcacaggcagcccctccctccctccctccctccttcccaccagttcccaaacccactcagtctttccctccccagccttccctggcccttagattaagtctgccctgagttatgccagctaataggtctctctctctctagaagcttccaacccccaaaggcaaggaggtaaggtggagcagaggaaggatagagaaatatatgatgaagctgaaaaagttattgccttggaataaatgccatggagaattctggtttgtcctcattgcactgtgtggggtgagagcgctctcatgggaagatgctggctaactgcacacagatttaatcaccaggccccgcccattcgcactggcagtgagaggcacacccctgaacctttggggttgttcactgaggacaaacgcggcagcatttagaaagtattcctcgtcccggcagtagacaaaagccacaggatttatggaaagaggaaggaaggcacagaactggggcaaggttctggttttgttctgttattttgttgtcattgttactgtttgtttttctttttttgagacagagtctcgcacttgtcccccaggcaggagtgcaatggcgcactcctggctcactgcaacctccacctccca

SEQ ID NO: 102807 - DNA, 1782 bp, Homo sapiens
ccctatagcctgggtttctagatcatcaacaggctgcaaaggtttgaaattgagtaccagggggacccggagctgcagcccctctggagttatgagattaccagcttggtctgagcatccttccggctgtcatctgccatcaaacacagagtgagtgggcaggagggctggcctggcctcttcagagagggttctgggtgctcctgcctggggtgcagtctcagggtggcctgtgggggtggggtgcagctgtcctgaggcctgtggtgccaccaccccatgcccccgtgccactgcctgcgcttcagtttgcagaccagatggcggctctgtgttcctgagatgacttccttgccagcttctgttgctaccacctcacagagcccacgctggccagcggccacaggctcaacctgcacttcctaggcagctacctgacactgccctggctactgctggctttcttcatggcctctctgttctgcatcaggcccctcacctgtgcactgctgttcaccctgggctacgccctctactccttggccatgatgttgctgaccaggtggggaagctgcaccagccctgatggcattggaggtgggaggccactccaggtgggaacatggttatctttgggctcctggtgggggcaggggggttcctgcagtcgtggatgcatctaggggaaatgggactaaaaagggaagaaggtagcttcaataaaatctagtgcttaaagacacagcaactgttcgatgatattgaagtattcaaaatatatgacaactacagattcactgacagaaaccaccacggggtatctcacaccttcattcaccccacagatgacacaccagggagaacagcgtctcggtggtgatttttttttttttttttttgagacagagtcttgctctgtagcccaggctgcagtgcggcggtgcgatcatggctcactgcaacctccgcctcccaggttcaagtgattctcctgcctcagcctcccgaatagctgggattacaggcatgcgccaccatgcccagctaatttttgtatttttagtagagatggggtttcaccatgttagtcaggctggtttcaaattcctgacctcatgttagccacccacctcagcctcccaaagtgctgggcttacaggtgtgagccagcgcgcccggccagtgctttgtatttttatgtaaactcagaatacaggtattttagggcctgtgaccaaaaaccaaaccaagcttgtaactccaccagggatctgaataaacctgcccttgcttttgagttttccgccgcctaggctcagtatccaggcggttcacccatacagggtccctgaccacgtgggggctgtggaaacaactgctgggcaccctgttggcccctcaccccagtgtccacgggcctggccctctggtttcctttgctttccttgcccaggggcacagtagactcggcagcagcaaaaccaaggcgcatattaacactgaagtgcctgagacagaaaggggctgggccggagccatgtgaattttgccttctactcaatatcaacgttgagtagattggcctgtaatcccagaagtttgagaaaccaaggcagggaggatcacttgagtccaggagtttaagcccagcctgggcaacacagcaagaccccatccctacaaaagattcaaaaagttggctgggcgcgtggcccacgcctgtaatcccagcactttgggaggtcaagacaggcagatcacctgaggtcaggagttcaagat

SEQ ID NO: 102808 - DNA, 1046 bp, Homo sapiens
attttcatggtgacccccaaactgttccttaacccttccttaccagcacagagcagaccagtggccaccttcccctcatctcctgcttgatcctcacagcagacccccccaggcttccatggcacctggcgtggccactgacctctcctttccttgcccgaggccttcccctttggaccctctgggggatcctccctcagccccctcaggctctgggctggcctctgccatggtggcttcagtcctcttggaaaggggcctcaggcctgctaaggatgcagcaacctcagagggcctgggtctcacctgcctgtgtcctgccctccctgcctgccaacagtctcctgagctgtcatccataacactgcacagttaaggctgagaccggctggaccctgcctgccctgcagccaccaggcaccaggcactgggtggaagaccgcaggtatacccacagagggggtctgcacagaccaagctgcgggcccatggcaccacagtttctccctggcaactcgtggcagcatccttgggaggcggtcttggtctctggcatgcgtttgtcttggctgggttggacattggcttctgtcactcctcctggtgtttgccctcctgcagacactgtcgggggctctgtgagccaccagctccctcatttgccctccccatgtcggccacctgctacatgggagacactgctgggcaggacctcaggaggacacccctgggtcatggctccccagatacctcggaggcatcctgaaaacctgtgggcagcaaccaggttctctgtgcccccggaagtgggcgctaggttcgtctcctgccttccagttcgagcagctgttcccggagccggagctcgtcatccccctaccgccagcaccgactcttcacagcctgcacattcgccagcagcatcctgtcatagtggccaccagtggtcactgatgcctccttcaatgtgaagagtcacatctatggcctggagggccaggactgcaagtacacccgatgttcgggcccgaggcttacaccctggt

SEQ ID NO: 102809 - DNA, 2725 bp, Homo sapiens
cgaggtgcatgcttgctccctggtggccccgtgggccataaagatggccaatggccccacaagccaccgtgttccttaggcaagggcagagacgcactggagaactgtgtgtctgtttcctgcctgagccctaggtctggcacagaggaaggctgtgaagggcaacatctctctgccctgctccttcccgccctgctctgcgtgttgtgacatctagcaggtgtgttctgatgtctcctgtgtggagcccagtggtcgtgctacttgggcaggaggcatggcgctcacggggcaggatatgcaccaggccagctctggctatgctgggccgaaggggtgcttcggaggctgcagcgctgcagggtggtagattggagggtcctggctgggggccagcttagcctcagtttcctgttgcctctgggtgtgtgtggctgtggccaggtcctcgggggctcctgcccttgggagccctccatatctggagggtgggagttcctgatgcggtaggagaggttgcctcctggagtcagagctgatgcacacaccacctcggctgacctccaggctgggggagtgcggagggcagggcctgggggcctgagcctgtgctacccttggggacctgtcctcatcctcagctctcagagagatccactcatggaggggacattgattgggttttagacataggaattgatcatgtcatatacaaatttgataaatttctcaaaacaacccagggaaatccagtcaattacatatgtgtcttctctaggcagagtcctcctcctagaacatgctttgccagtttattttctgggcctcaggatcttgaggccttggtggctgacagcatgtcccagagagaaggccctgggtacttgaagggctgtggtgtgcacatggcacacacggtgtggcctcagagtcactggggagagcgggtcccatctggaagggcagtgagttgggcccttccaatgagctggagaggcctttaggccccagcgacattgagaggccacccaggtgacctggagggtctatccgcccccagcctccaaggctgaggagagtgctgtcacagctctggcctggctgccgaggagggtgctgcgctggtcacagctgctgggactgcagttgtttggatggtcactgaccatgcttttgttgtttttttctcctcacttctgggctcgttctcattgctttctttctccacttccccctcccatgtccggtaccatgtctctccttcaccaccctgtcctctcatgcttttctcttctgcctcttccggcttctctctgttcactctctcagctggaggtgctgcactaccgactctgtgtctccagtgcccaccacagcccccggcagcccaacctccaggccctccacacctaccaagtactggctgtgctcgttcattcccttcccctgcccggagtgcgtgtctgcgcctggcaaagcaaggggctggctgggcccagctgcaggtgactcagaggctagtttcaggcagagtgaagcccctgtgttgagggaggcagagatcagcctccagcctggcctggcccctggctttgcagactagcctggcttgtgggagtggggtgtggctgtgtgtcagaatgaggcatgtggcctgggctggccagactccccaccagtggtggaggtgtcacaagttctctggtgttggaggctctgtgctcggccctggtttgaagagctggagtcgtgaggcctctgcagtggcccggttcacccccactctgcagggcccagtgctaaggaaggagctgaagacacagaggcctgggacttacggtaatgtgggtgctgccctgttcagaactgtcatccagcttggaggttccatgacccagactgtgtgtgaggcaagggggttggggaggacctggggcttggccctatagctcacagaggctgtcagtccttcacctagggagccctggccactcgtagacacctgtggaggtggatgagaataggtagtgacctcatagaggttgtggtctgcctaggcacaaatgacaagcgtatggatggatttgaggtcagtgaagcagagttcaggcccatgggggatttcggggacgacagagttagtgagtctgtgagagcccggggagacgagctgtgcccacagccaggggtctgtcccgttcaccctgcgaaggagcacacgtgattgaatgggaatttgagcgcaagatgaaaaaaacatgtgggccccaagtgccggtgggttgggatggcaaccactgcatgtgatggcgtccctgttccgcaggagccactggagaagagggacatgagggcttgggccagggcagtgtccaggaagcatctagcaacccccatggcaggacaggtgaccagggagaccctggaggagtgagctgaggtgctgtgaggctgggcccagtgggaaatgcggggctttgggtacacatctttgagaagcaagcaggtgtgactgtggccagggactacacatgggaatgtggcccaggaggggtacagagctgagggaaaagtttggctcagcaaatctgtgggaaaatagcctgagaggctttcatgtgactgctgggggcaggggcagacactggcccctccagaccctctggaaggaccaggtgatgttgggtaagtgaacctgcaggggaaggcaggttcccagttccta

SEQ ID NO: 102810 - DNA, 1007 bp, Homo sapiens
ggacaggtacctgtcatggttcctgcccaccaaaggcagcctgccaccaccctcactgtcctccagcccaggatgggccagtccctcacctgctcccaggtaaggctaccctgattgtgaagacctggcccttccataagggagtggcctggtcagttgaatcacccaccaggacaatggtgccaccctttgtccagggttcccaaatttgtcttatgcctcattccccacctccagctttcttagcacagactggagggtgggggtgaggagggtgatctgtcctttagttttcgatgtctgtggccatcactgaagctatcaggtctctggaggcctccacggcctgcatgggaatgggctgtgttctgcatgaagcagccctccccacatgcagtgtctgaggtggtgagcatggcagaaggcttgttctatgggggaaaaaaaaatggaaatctctctgggccccaggaccaggtcttgaaggggaggccctgggccaaagagcctgtgtgtcagtccaaacaagctgagcctgttggtgactgcacaggtgggaagtgtgaaccaggggctcttgtgcctagctgtgctggggtctcagtgggccctaacccagggcctcttggctgacttcccaggagaccctctggggacctcccaggagaccctctgcacaggcagcagctgcctgtgctcctctgaccctccttaatcttgctgccccatcgccttccctgggaggctgcgtgcaggccccttcctgcagatgctggcccaccccagatctgctggcatgtgcaagccaggacaggcctctacctacaattcacatgtgtggacagatgccccagagggtggaggggagaaagggagcagcaaggaggagaggctgcctgggtggcggcagtggtcagtgaccctgaaatgttgctgatgctgtggaggacttggaggtgaggtggattcacaccctctcagatgtacaattcagttgccaagtggtt

SEQ ID NO: 102811 - DNA, 1158 bp, Homo sapiens
tctgggaagggtgttgctttcctttctaatagagcatccttcgcatccatcagaagtttctgacattaaaaaaaaaatcttttggtgtggtggctcatgcctgtaatctcaacactttgggaggctgaggtgggaggatcacttaaggccaggagtttgagaccagtctgggcaacatactgggaccctatctctacaagaaatctaaaaattagctgagcgtggtggtgtgtgcccacagtcccagctactcaggaggctaaggcaggaggattgcttgaggccaggaggccaaggctgcagtgagctgtgcattgcgccagtgtactccagacagggcaacagaatgagaccctgtctcaaaagaataggtattttgtttattttattttatttttcattttttcatttttttgttttttttttcccttaatttaggcttttatcacacacaaaaaatgtattttgatcagaggctgacttacttaactggcccacgtctaaagcagcactgcttggtaagccacgtaccccagtgaaagaacccaaagctgctcttctcattggcatcaccgcaccagggttcctttgagcgcagggctgatcccatgggtctcagccagggagtggcctcctcagagggagctgggcagcaggtggtgcaggcctggagctggggcaggagtgggtgctggtcctgcctgcagcctcaccgcacactgtttcaggagctgcacgccatctccccatggctggtagcattttcggcagcctggatggtgtccttgtgggctggaacctgcgctgcttacagaggcgcgtgaatcctgtgaagtacagcatggtgatggaatttctcgaccctgggaaggtaggtttgacacccgagagaggcagggtgcttcctcatggtgattccacttttaagtcactctcaatttcttaaggttaagatacaatcaaagcaagataatttgcagttcatataccctgtttttgtttgttcaatttcatgttcagcggcccaatgatgaagttggtttataagcttcaagctgaagacttaagtttgactttcccatctcctacctgcccataagtaaaccacagtggtgagagtggtgctcgggcagtggaccttgcacagcccagtggtga

SEQ ID NO: 102812 - DNA, 1046 bp, Homo sapiens
catgaggtcaagagatcgagaccatcctgaccaacatggtgaaaccccatctctactaaaagtaaaaaaattaactgggcatggtggtgggcacctgtagtcccagctactcgggaggctgaggcaggagaatctcttgaacccaggaggcagaggttgcagtgagccaagatcatgccactgcactccagcctggcgacagagcgagactccatttaaaaaaaaaacaccagggcatctgtaagccactttgggagtcaaaagaatgtagggctgggttggactccttagaagaaagttaagttctgagtgtgggaggaagtgcctgcacgcccacttccacagagagcccctgtcactcctgctaccgaagactggcttgctgattcgggctctgcttccacagtgggggtacagagccagggagagtgcccacaggcccagggatcctgggtgtgggaccagggagaatgcccacaggccccagggcctttttgagcccagggcgctctctgcacaggcccgctacaacttcatccgaagcatggccgcctacagcctcctgctgttcctgctgcagatcaaggacagacacaacggcaacattatgctggacaagaagggtcatatcatccacatcggtcagccagccacagcgccaccctcctctcccttcacccctggcacccaggggtggatagggatccccaccccacagagaggagaatgcccaggaccaccctgccaggagtgtcagggtccagctctgaggtccgaactgtcggccaccaagctgttctgctgtagagggtgcctggccccggccccagggagctagggcgagagccgccattgctctgagtcagaagctggagctgggcggagtggggctggtccaggttcagtgccccagcttggctccttcctccacttcctcccttctctttctctgcctgctgccccaccacccaccccatcactgtctccaagaaaacacaacctgcctgttgggggtggagggggtgctcctgttgcagtccttttcc

SEQ ID NO: 102813 - DNA, 1061 bp, Homo sapiens
ttagtagagatggggtttcaccatgttggtcaggatggtctcgatctcttgacctcatgatctgcccatcttggcctcccaaagtgctggcattacaggcgtgagcactgcgcccggccaggtgccctggtttttttgtgtttttttttttttgagatggagtctcactctgttgcccaggctggagtgcagtggcgcaatcttggctcacagcaacctctgcctcctgggttcaagcgattctcctgcctcagcctcctgagtagctgggactgcaggcgcgtgccactatgcccagctaatttttgtatttttagtagagacagggttcaccattttggccaggatggttttgatctcttgacctcgtgatctgcccgcctcggcctcccaaagtgctaggattacaggtgtgagccaccgtgcccggcccaggtgccctggttttaacccttaacaaaggatgactgaggagagcagggtgtgggtggaggctgggtatgggtggctggggtggggtggagcacacacgacctcccccggcctgtggccaccctggctacctgctggaaggccagagtggactcatccccgtactggcgtgtgaagtagtcgtacatgccgaagtctgtctggcggcccagctggtcccgggaggtgcagtcggggatgcactcgatcaccccgcactaggaggaaaggccagttctgaggcccgctgggtgcgaggtgcccagggctgccctactggctccactcagggaacttaccccaggggcagtggccaccacgcggtagggaaaaacaaagaggtccaggccgaccagctggaagatgttcttgaagaggtcgatgatctgcagggccagcatgtcctgggaagccgggaggcgcaggatgcggtcagttggcgtccttgcaccccagcagctcttctggctcatgcagggcaaaagccaagcacccagagatggagtgaggtggggagaccacagccgagcaagagtctggaaggccttcctttctgaccaccgggggctggactcaggctgctgggacca

SEQ ID NO: 102814 - DNA, 1034 bp, Homo sapiens
tttcattgcttcacctgtgacattcataaatgacacgggcttttttctccctgcgtgtgcagcagtgaggattctatgccctgtgacattcataaatgacacgggcttttttcttcctgcgtgtgtagcgtgtgcagcagtgaggattccacgtccacttgtgcgcttggcccctgccttgagctccgcttaggcaccagcttagcttcccagcagcgtcagctgtgtcaacacagcaaaaggggcacacggcagctgttatggtctcaccaagcctgcagagcatactctgggcactgccagtctggggcctgggaaacagggctggtattcctgaggggcctctgccacagccacagagacttaagcctctttgcttccttggcagctgacatcggcgacctcctggatcagttggtagaggagatcacaggctccttgtccggcccagcgaaggacttttaccagcgggagtttgatttctttaacaagatcaccaacgtgtcggctatcatcaagtaagtgcagtgcttcagaaaccaccttctgggatctccttccagtccctgcagcttaacagaattgcctgggaagctttaaaaatacccgtgcctggccccaaccagatgaatgagagtctctagcagcggggccgctggtggttctgatggacagccagggtgggtggggaagcactgcttggggtgagccagggctcttgaaggtatggcagaatgcacggccacgccagtttcaggaaacacagcttagtttcattcctgaggtttgtggaatttagcacatggctccacaatttgaggccaccctgccctctccacactttgaaggatcgatcctcatggtgtcaggaaaaccagactgcctttgcaggtcctgtcatcgttttcctagaccttccattcatgtggacctgacaccatccttggatgttgatggctttgtgcattcataagggatgaaaccctggagtcatcaatgctgggcacgctggctgggctgtctccagtgcttac

SEQ ID NO: 102815 - DNA, 1033 bp, Homo sapiens
aaaaatgtttagccaggtgacggctaaatgttctattatgccactaactagtaggtctgaacattagtgttttttaaaaagaggattataatctgctgtgatgaaatgctggaactttcttaaagaaacaggaatttttctacacttaactgtttaaagggcttcctttcaccatccttgtcttaaaacccctgcctcttactccttttcctaccatatcctctcctgactctccacagctgctcatccagtgagtcagtgtctcagtcaacagtccaggggccacaaggcacctggtccatgaaggggcagctactggtttccaggtgttcccacctcaggctaatgcaaggcggatgtcccatgagcactgtgctttgagacaatgcagagctgcgctgcgatcctattccagaggatcaaagtagggctggagagaggatgcagtacattggcaagtctgggctcacaatggagaatcacccaccctggacacattcacaggaggctgtggaccatctggtgggattctaaacagggactctgcagtccctctcagccaccatcggtctgaagttctgtccccataagagctgccacagagagatcacaggaatgtcactgctgtctgcagcatgtgcctcctccaaatactctgccactgaaaggtgacatccaggaacaaacccaaaccctccccaaggcggttccggcagccacctgccaggagtgacagcctccacatgcttcctatccggcaggaatcagatcttggctctgaattcaccctgctgctacctccctaggctccagctgctgcagcaccccaggcaggcatctgaaaagatcacgagggttgctgggttatctctgcacagaagggctcggggagtgtcctggggctcgaggactagactacttcctgactatccttgaaaggggctgcagggcactcctgagaactcatgacccagctggcaagcaccctgcgctggacctctggtgaggcctgtgtcaggctgtggtgcccggg

SEQ ID NO: 102816 - DNA, 1038 bp, Homo sapiens
tccgctcactgcaagctccgcctcccgggttcacaccattctcctgcttcagcctcccaagtagctgggactacaggcgctcgctaccacacctggctaattttttgtatttttagtagagatggggtttcaccgtgttagccaggatggtctcgatttcctgacctcgtgatctgcccacctcggcctcccaaagtgctaggattacaggcgtgagccaccgtgcccggccaatttttttattttttagtagagacagggcttcaccatattggccaggctggtctcaaactcctgaccttctgatccgcccgcctcagcctcctgaagtgctgggattacaggtgtgggccacattgcctggctgagaccttctgatccgcccgcctcagcctcctaaagtgctgggattacaggtgtgggccacattgcctggctgagatggttttctttagcagacccacggctgacaacctaactagcaggaaaaggaaagaaaaaagcagatgcagtgactttctaaggcagctttctggctccacttagaagagggcaaacagtccttacagtctgcccccacaggccctcaagttgtcaccgtactaaaggactatacgttgccggtgatcagataactgccatcttttatcaagaaaattatgatatttgttttattctattttattttctacttttttttagaaatgcagtctcattctgtcgcgcaggctagagtgcaatagtgtaatcatagctcactgcagcctcaaactcctgggtgcaagcaattctcccaccccagcctcacaagcagctaagactacagacacatgccaggtcccctggctaatttttattgttgttgtagagatagggcgtcttgccttgttgtccaggctggcctcgatctcctggcgtctagcaatccacctgcctcagcctcccaaagtgctgggattacaggcatgagccactgtgctcagcctattctattttaaaggctagaagaagtccaggtgtagtgactcacgcctgtaa

SEQ ID NO: 102817 - DNA, 1037 bp, Homo sapiens
gcgcagcatagggatttggggagacatagttcagcccatgacagtcactacggcagctcagatgaactgacctcgggttgttgagaagcagcttcaccctcttccagagcattgtgaaggacttcgctgcacgctgtgggatgatcctccaggaggccatgaagtgggcacctaccgtcaccaagtcccacctgcaggtacttgaaaccatcaaaaggcaattgccataagctccttcaaactcccaaaaaagctttacagagacatgaagaactcaaaatccaaatagcactagtgtgaatggagactggaagcatcagtctagggcctgagaataatagatgcctcagaggctgctctgtgtgttaggagcgcctgtggggccagtgctggccagggcacaaggagggcatctgacggctcacaccaggtgaggtgccaggtctgtggcaagacttgggggctgctcacgagaggaagggcttgtgtggtggatgtgggaggctgccagatggcagcatctctaagtgccaagtgcattgctggcacctgtgcccaaaggcaggggcctgaccaaggctggtggagcagaggcagagttggggacttgtgtcccattaaagctccacataagctgcacatgtaggtgcatgggagtctttcagacaaaaacactggtttggaaactcagatggccacgaagtaaaccatgtaatgccacagggtgtgagaggaaagaattgccttaaaaggaatcaaagatgagaaaaatacctctggaaggaatctgtgttagcagagagtgggtgtgctgagaggaactcttgtgaggtttaccctggcagcactttaaagatgaaacaggctcaaaagtgtttctggttgtggagtccaggaaggatagagcagccagctccaagagccctgagagctgtgtggaaacgcagtggcaagaaactatttccctttgttcatttacagcaaaagggcctcaggtcccaaggctgtctgtcgtctgaagaggggaggccccctct

SEQ ID NO: 102818 - DNA, 1029 bp, Homo sapiens
cagcctgggcaacagaacgagattcaatctcaaaaaaaagagaaagaaaaaagaaagggcacatccactctatggagttctccctcaaatcctgtaaccctagtcttatcatggacaagcatcagacaaacctaaattaggggacattcaacaaaataactgttcttcaaaagtgtcaaagtcacaaaagacattgacagactgaggagtcaccacatattggacaggagtaggagacacagattaaatgccacctggtgtcctgggttggatgctggaacagaagcggggcatgtgtgggagacctgggaaatccagacgaagtctgaagtttaggtaataggattatatcaatatctgactcagttttgacacatcagcctggttactgcagatgttaaaatccagggaagctaggtgaagggtatatgggagctctgtgctgtctttgccactctctgtaagtctaaaatcatttcaaaagaaaatgattgaaagttgctaggattctctctctgttgctgcaccttatccatggaaaccttctcgtttcagggatgatgcagtgtgtgattgcagtcgcggacaaagtattcgatgccttcctgaacatgatggcggataaagtaagcctctccagcatgaatgcgtgtctgtctgctggaggcatctggggcactgcggtacctgtttcttttgcatctctaggccaagaccaaggagaacgaggaggagctggagcggcacgctcagttcctgttggtgaacttcaaccacatccacaagaggataaggagggtggcagacaagtatctatctggtctggtggataagtaagctcattttcctgctaatgttttgtgtgtatgtatataaacttctgtgatttcaaatgctgggaaaaatcatccttatattattaatctaggaaaaaatggagtcagaatgaaaactcctaagggtgatgcagcctccctccaatgtctgtgagtttcctgcagagtctgaattttggtgcagaaacttctg

SEQ ID NO: 102819 - DNA, 1100 bp, Homo sapiens
ctccttgggagaggtaaggaattagtcacaccactcatttctgtgcttggtattcagatgaggggcctggtggagaaaggcttgagtgacagagtcaggtgtgcaaggatggggtcaccggagcgggaggtgcttaggacgcgctgctcaggtttgctgtgaagagtggggaggtgagaccctctaggtaacagcagacacactacagttacagtgacttctatgagcttacagcatgggctattgtgcagaattgattccaacaagcctctcttcttggtcgtttctaagctcctctcatatgggcctcgaattcagattggtagcgtaaactacgtaaatgatgccagaacatctctgttctcgttgttggaatggaaacaaaatgagggtgcccccaaggcacttcagacacctagacctccacctctaggacctgctggggttggccactcttcccatgaagagcaggcagctggtgcgatgctcgtagatgaggaaaagaaaggggcggtcgacagtgaagcggacttgggtggacagcggcatgaaccccaccgtggtcacagtggtggcttgggtgccttcctcgttcactgtgatcgtgccttggtgcttgaactgtttggaaaggaaagttgtcagattctggaggtcagcacacagagggctagagttcccagcacaatctcatatcattcagggaaaggatccaaagacaacatgtaaggtggaaatcacagctggtcagagtcactcttgaaaatatctgtcaccacctgtcaggggcagccgttgcacttagaggccggctaggttcatgttccctcttggcagtgcctgtggtctgagggtcgtgggggctggtgcaggacagccaccccagctccagctccccacactgctgcgcacttctccgggatggggaactgggtctgctgcactgtttggactggtgttctctctcttttgctgagcgcccgattggtttaagttaagtatgtgtatagtgcggtgtttaatggctctttcatgatttggctgggggtagctatttcccagaccgcagcacatgtctcccctgtctctggtgtcagcgg

SEQ ID NO: 102820 - DNA, 1047 bp, Homo sapiens
tagacattaatttgattaatcctcacagcaatccctcaaggtaagtgctgctggtctccccattttacagatgaggatactgaggcacagaacctgctactagagtttcatagctactagatggcagagccaggattcaaaccaggcagcctggctcagagcctgtgttctgaatgagtactctcctgctttgagtaacagatgggctagtttctgtaagaggggatctgagagattctgagtgggtgtacatgaacaaaaggcattgaaacgggggtgtctggatgctcaagagtgtggaggactccacaccggctgtagcagagagggcgctgggtgagcagaagtgaccactgcctttctgggtatgggacagacatggcaaaggactaaaagggttttttgagattattacatttagaaatgagaagagccaaaaggaagctgcagcaagatgagaaatataggacaggcaccagaaaagaagagtggtgaagcaggttggagaatgacagaaaagaagagtggtgaagcagtttggagaatgacagaaaagaagaggggtgaagcagattggagaatgaattgaaggagtgggccatccgcagcatcagggttcaccaggaagccgagaggatggcttggggcaattcatccagcccctgcaccatctgctctcagcagagtaaggaggcagagcccagtgtgggaagtcaggaagggagcaggggaaagcagggctgcagggtccccctgcctgggtgtggattcaggcctcaggcagaggccttcccttctgtgagctgaaattgcttctgcagctgtaaaaaggaggggtaacagtgccagccccctagggattgagggtaaggagactctgtgagataacccacaggcatgcctacaaagggcagtgacgttccccttccgtccctactcccttttaccactcttcttactggtattggtctcatggggtcagaagcctgtgacaggactccttgtgtggtccctggagtccagccaacctgcacttgaacccagccc

SEQ ID NO: 102821 - DNA, 1041 bp, Homo sapiens
gagtatcagcccactgcagcctggacctctggagctcaagcaatcttcccacctcagccttccaagtagctgggactacaggtgcacatcaccattctcagctactttttctatttttttgtagagatagggttttgccatgttgcccaggcttgtctcgaacttctgagctcaagtgatctgccccacttcagcctcccttagtgctgggattacaggcgtgaaccaccatgcctggccccattggttgatttttcaaaacagaaattttcccactgtgtagctaatgttgagtagtgtatgcttgtgtgtttaaagtgctgttgtatgtgggccttttatgtggcctggagggaaaagtaaggggcatgaagcccaagccactctgttggcagcaggctctgcaggagagcaagttttaggcagatagggaggatgcttagggcaacactaaaatcagtgagttccaggatctttgaccatcagaacttgatgacctgtattcttgtgaactttcaaatatgttgagcagttgtcatttagagcttaatatatgcatagtggaaatctgtcgggcactttgcactttagggaagcagtgagtggtgaggttggttgaaattacacaaatttgagggtcacagggttccaggttggactcctggtcctacatgtgggatcgtgtgtgagcctgcgcctctccgggctgctggggtgggtggtacaggcagaactgttatctgtgatagcttagcacatgctcatttaaatactcccctgatgtgacctcttacatgagaagaataagtgtatttttagtgaaagttaatggttatattatggaggaggaaacaaatatttgattttattgctcaacaaagagcacagagatcatgggtccttgcatttactttatggttaccccttggaccttctggaagaaactaatttccagaggtggttttttttgttgtgtgtgtgtgtgtgtgtgtgtgtgtgtgtgtgtgtgtgtgtttgttttttttaaatttttttattttt

SEQ ID NO: 102822 - DNA, 1049 bp, Homo sapiens
aaggaggtgccatgagctccaaggactggctgtgagggtgtccttgatgtctgggaggggattgcaagaggatgtcacacaactgtgcctgttaaccatgagtgggtgaaatggcagcaaggcctgaggtctgcacatcctggaaacagaaatctcaggtcaacaaatctgagggagtttggcctttttcctttgtttttatgtcattgctatctaaggtagaaaagcagtcccaagtgacttcagaattaaaggcattttgtgcatatagtttgatacatagccataatttgtatttattggcctttatctgcatcacatttttcaccatgtgagtttgtcatgggttttcggtagaaggagctagcattcctgtctctgtgtatgtcagttgcttcatgaggttctgtttccttggtaggtgaagaagatcgttgaggaggctgttctcaaatctttggatgccattgtagccagtgtgatggaggtatgtcgcttctgagggcattaccatgagatcagcctgacttaaacgtgtgtagagaaagcaggaagagtttgagcgggggctggagtggaaggggttttgcagtgttttcactttccttgttcatgtggtaacaatccacctgccgcggagggcttggtctgtggtaggtaccgttgcatgctcttttaaatacgtcacctcagggtgcctctgactggtggcattacagacagaagatagagttttagtgagaactcactaacgtgcccacatcacatagttactgtgggagctgggagtctggcctgggtctctcctactcttttatcttcctcactcctttggtgcttccaaagctgctcctctgggctcagagctacacttttctaggcgtatgcaagtcctggtttttaagtgtaaggggtgcgtaactagggaactttttttttttttttgagatggagtctcgctctgtcgcccaggctggagtgcagtggcgcaatctcggctcactgcaagctctgcctcccaggttcacgccattctcctacctccgctt

SEQ ID NO: 102823 - DNA, 1039 bp, Homo sapiens
agagagtgagggttttgtccctggaaagtcagctggttggccacttggcacagtcgttgtggagggatgtatcatatatggggttggttaagataatgtctgaagtgccttctaattctgacttagtttcgtgatatttacctaattttgtttatgttttttttttcttgtttccttgactgttacagattttagaggtgcttttgcaggttttgcatgtcctcttggggatgtgccaggccttggagattcaagacaaaggtacgagtatccttaaggtttttcttaaaatggttttgtggttactctttcccttgcttttctccagtcttttctgttgttgggtacctaatatatatgatgggagaaaaccttcctattttagtttgatttgttgtgtgttagtatcctcagaggccacatggggtcatgtgcattgctctgctacatagacgctgggtcaccttggacaagtaacttcacccttctgggccccagtttcttcacctgtaacatctgtgggtagattagttgacttccaaaggtcattttttctgtgttgtgaggctaccaatatgctcctaagaggaataaatgtataaggtacttgataatatggcctagctattttattgatttgggtgtgccatgaatagatgaagaccttccaagcagggcagctgggtgtattgaagtcatagtctgaagttgttaatgacaggttgaagatatcacttgtcagcccttggggtggaccccattattgtggcttattgtgaaccttcacagttattagtgggtgggttgtgaaatcttagtcaatgttacaagttagtacttactatatgactctatcaggatactttcttatattgtaacgttttcacttgatcttctagaatacctttgcaagtatgctatcccatgcctgataggaatctcgcgagcatttgggcgttacagcaacatggaagagtctctcctctcaaagctctttcccaaaatccctcctcattccctccgtgtcctggaagagctt

SEQ ID NO: 102824 - DNA, 1050 bp, Homo sapiens
ctgcttacaaagttggcctttggctggcatctgggaaataagcacttgaatgctttcctcaatcctgtaactattagtaataaagatggttcactatgcctagatcctttttacaaactatgatttatgttgaatacctgctttccttctgggaatctgatggctaggctggtggtgcataaattaaaaacttagggtgctgattctctaatggactttcctgggcacaaactgcacacatgtattgaatattttgctgctgtagcaaggagcaagcttgatgtatatcctcacaggagggagagaacataaggaagcctgtgcatgggtttctacaggcagccctgacatgcttttagtgacacttgaggtcctttcctattgctgatatccattcactgtaaaaaatttagccatgagtacaactatatacatgtgggcagtctggggacccctgaagcaccttatttcatagaggaggcttctgtaagtggctgaccccattaaatatatgtgaattcctctcatccttatctaagatcttgcgacttgattatgctagggatcattgttaatatgtagtccctggcacatgtatacatatgtaacaaacctgcatgttgtgcacatgtacccttgaacttaaagtataataaaaatatatatatataaaatatgtagtcctataatatgtgttttactacattcctccttttgaagcaattgacaaaaagcccttagcattcccaaggaaaagtttcttgttcttttttttttttttttgagacagtttcactcttgttgcccaggctggagtgcagtggcatgatctcggttcactgcaacctccacctcccgggttcaagcgattctcctgcctcagtctcctgagtagctgggactacaggcacctgccaccacacccagctaatttttgtatttttagtagagatggggtttcgccgtgttggccaggctggtctcaaactcctgacctcaggtgatccgcccacctcggcctcccaaagtgccaggattgcaggcgtgagc

SEQ ID NO: 102825 - DNA, 1046 bp, Homo sapiens
gggatctagcgggggaaggaggccctagtgggaggggctggtgaagagagagggaccgtgggggaagggtcggcggggcctgcagggccgctgcaggtgggtggttgtgggatgggggtgggggatgtgagctgctggcccagggagcatcttgtgacatcgcggaggtggaggctggatcgtgggcggctgtgcggagcagtgggatgagccgaggaccaggggtcaagacctggggttctgcttccgatttcacctgctttttattccgcgaccttgggaagatggctttcttgtaaaatggggatgcttttatctgctttgccggcttcaccggactgtggtgaccaggagacgaaacactgtcttgaaagtgctttgtgactgtaaaccaactgcgcagtgttattctacgaggctgggggcgttaggttgggtaaaagattgtgcgtttgcagaagggacagtggcagggaaaggagagtgaactgtcagtgggcagagaagtgaacttggaattgcttcagaagagaaaggtgaagtcatgccagagcaatcctcatcttgggagaaaggtgaaaggcaactcagtggtgtgccttgagatctggaaagagacagattttagagtgggacctgaatttgttccctgcactggcacttacttaccatgtcctcttgggtaaatttaactcttagagcctctgtatccttatctgtaaaatgaggttgttcttgagaattaaatgagttctagcataaagcatcttgcacaggtcaaggcacagagtgggtgagcagtaaatgtcaactttctttgcccacccgtgtgcgatgagactcagcacagtgtttagctctgaaaggatggaattattttcccactcaactttttggcacatggagagaggatgttttccgacaagataagacagtggtgaccggagaccagcctgctgcagttgggagtggttttgtggctgtctgctgatggatgaagctgaaaggctgttttaggcacttttggcagagtgacctggtccttg

SEQ ID NO: 102826 - DNA, 1011 bp, Homo sapiens
gtcccacattttcctagggttaacacctcaccaagttcttccagcaaaatgcttattagagtttttgtctgagcacagtagcctggccctgcatatcttgggcgtttgattaccatgctggaataagaagagttgcatttctcattttaatgagcatatggaaagatgggaacagaatttcagtcttgcagccatgagcctctatttctcattcctaagccttaccatgagtcagagtgttaagggggcctgtgaaccagtcgtttggtggaggagggtccttcccacacctttgtttaggagtcatcattcacacacacacacacacacacacacacacacacacacacacacactctctgagcacattatctgtgattctttcatcctcccagaaaggatcagtgttagaatgggaaatagagtgtgccatcttgctcttttgttggcagatgtccccgcttccctccagccccccatccttggcatgtatattagtaggagggcttcacaccagcactgctcactgcgactcctggaaatgtgtggggaattgggtgagcccctcttccccacgtgctcccatctgtaactctccatctgtgatttgcaacaggtcttccactggctcgaggctgcgaggctgaccgacaggggcgcccaatagagtttgtgggaatggagtattgcacagatgcagctgcacaatggtcttcctccacccctctgggaatcaccattaggcaggcctcagtagggcaaaatgtttatttggtaccgggggtctcctgacctgtctagcattcccacccactcttctgcacttcttgcaaggtaacttgaatcatcacttatttctctgccacctggttttaggactggcactctataaatgacgctgactttgtatagaaggattttgctaagggggcaaaaagcccagataccattttaactggcccagttcattttctcctttcattttacaaaagaaatcatgcagaagcatca

SEQ ID NO: 102827 - DNA, 2234 bp, Homo sapiens
ggtcactggataagaggatgcgttttttttttttccctctcacgaggctgtttctcaatgtgaagaggatgcgttttgaatgtttaacggtggttgcatagttaaaatgcacgctttttgcctttcgtgactttctctgggtgtaatactgatgcagggatttgttggtttttctaaaaacctcttttttttttttttttttgagacggagtctcgctgtgtcgccaggctggagtgcagtggtgcgatctcggctcactgcaacctccgcctcccgggttcaagcgattctcctgccttagcctcccgagtagctgggactactggctcacgccaccacacccagctaatttttgtatttttagtagagacggtgtttcaccatgttggcctggatggtctcgatctcttgccctcgtgatccgcctgcctcggtctcccaaaatgctgggattacaggcgtgagccaccacacccggccaaaaaccgtttttaagccatagacttctttgagaatctgaagatagccgagcactcaccaccccacccccacccccacccccacccctccccgccaaaggcacgtacacacaagtttgcacaccatcccgggtgcttgtactccctccagatctctgaactccaggttaagaactccaggactgcagcctttggaacagtcaaaaaaatgaaaatgctttagcgtttagaaacaaaaaaacctttaaccaaaatatcagaactgtatattgatactgtggtgccaagtttgaagcaggccagacaccaccacttttatagtacgttaattacaaagataagagaaggtgcattggcttcagcgaggatattttttggaaaatttattgcatattttctccccgaggaccattagtaggccagagatcagtctggttaatttccaaggtggaattaggctagaatgttattaaggaaaatttttgaatgacacttagttgtatcctagttcaatttcagacatgctttttgtgttaagtctaatgattttgtatttcttattttaaaattaacgcaaagtgaccaagcattctcttttccaagtgaaatacgttattttaattgattagttgctttaatttgccttaagcgttttagcagagatttgcttttattgttgtgtttgccctgtaacactgattttatcagaggtttcttttatttaaattatcccaaatttgagttgaaaagttgcctagaatttttaaagtaacaaactggccagttcgtttcttaaacatctattttaaaaggactgggtgttgatacagtttttccagggttagatgtttatgactttatggatttgtcgaccgggtattactctaaactttaaacattaaaagctattataattgaggacaccaactgtttgcatagtgggatagagatagaaaaaaaaaagccatgacagtataatgactacaagattaactactgaactaaatggactttaaaagtggggagaaagtgattataaatcaaatactgtataacaaagaccaggacaccaagaatctgattggtgaaacctgcggttcctggcagatgctggtagttgcagtcaactttgagcacaatataattccaatttaaggagttgagaatcttagaacccactgtagtgagatttgtaatatgactgaataaattcttcctctcgtttgtgagcgtgaattatataattaataccaggcattcattaagccatgcatatgcttatgttgaggtcatgagtactaataatacagctgtttcaaaaagcaagttaatgggcgggtgtggtagctcacgccagtaatcccagcactttgggaagccaagccgggcgaatcacgaggtcaggagttcaagaccatcttggccaacatggtgaaaccccgtctctgctaaaaatacaaaaaattagctgggcgtagtggtgggtgcctgtaatcccagctactcgggaggctgaggcaggagaatcgctcgaacccgggaggcggaggttgcagtgagccgagatcgcgccactgcacagcccgggtgacagagtgagactctgtctcaaaaaaaaaaaaggaaaaagttaatgacttgagtctccttctagaggaaggaaaagaagtatgccgcttctctctatccacagaatcgcctccagattttccgtacatgcatgcatcttcttagagaacaagcatgtaattctg

SEQ ID NO: 102828 - DNA, 1048 bp, Homo sapiens
cagcctgggcgacaagagcaaaacttgtctcataaaaaaggaaaataatttattatagaggagagtggtatattaagaagtttgacaggcactggcttagagtaagatttttctcttagagtaattttctttctctcttaaggtatccaagcccaccaatgggatctgtctcagcacccaacctgcctacagcagaagataacctggaatatgtacggactctgtatgattttcctgggaatgatgccgaagacctgccctttaaaaagggtgagatcctagtgataatagagaagcctgaagaacagtggtggagtgcccggaacaaggatggccgggttgggatgattcctgtcccttatgtcgaaaagcttgtgagatcctcaccacacggaaagcatggaaataggaattccaacagttatgggatcccagaacctgctcatgcatacgctcaacctcagaccacaactcctctacctgcagtttccggttctcctggggcagcaatcacccctttgccatccacacagaatggacctgtctttgcgaaagcaatccagaaaagagtaccctgtgcttatgacaagactgccttggcattagaggtaaaatctgttcagattagctttttgggtcctttgacatttggttttaatttttagttttagtttagtttctgctcatttaagcttatattcatggaattagagcactggatgattttggaagatacgcactgttagcgtttcattttaaaatttttttatagagacgaggtctctaattttaaaagagttgtttgcccaggctgatttcgaggtcctggcctcaagcaatcctcctacctcgacctcccaaagtactgggattacagatgtgagccaccatgcctggcccattattagtgtttcacagcttgttttgttctgtcctattccttgtttgccccaaattctcagccttcttgctctttcttgttcccaaagcctaacagatttagttttgcagttgttggtttttcttccagtaaggaaagataatgatt

SEQ ID NO: 102829 - DNA, 1352 bp, Homo sapiens
ttgttgttctgcctgtcctagtctcctttgaagtgggaaagcattttctctcataggcaagtcacactgcattgccgaagtccagctttctgcagactggcagtcgcacacacatttggaatgcacacagcggctgcctcctgatgtttgtatcatagtcgtattgtcaaagagtagccgattttagagttcttttggatcataaactggaaatactgatggaagcacacaagtggagagaagttgacatggaaagggtcttccttctcattgctgcccgtttgtacatgggactgattctgttgtgttcaccagagaaagcttgaggccatggcgagatactgcatgtttgctgttccacaaagcagtggcttagctgccatcttgcttttctttggacaacaggaagtgaaccttaaggaagagagaattctgttctaaaactccaaaatctggcttttttttttcttttgttttggtttggttttggaaaactaattaattagacttgtgtgggggtttttttttgttttgttttgtttgttttgttttgtttttttgagacggtgtctcgctgcatcacccaggctggagtgcagtggcgcaatctcgccttcctgcagtctccgcctcctgagttcaagcgattctcctgcctcagcctcccaagtagctgggactgcaggcgcgcacaccacgcccagctaatttttgtatttttagtagagacggggtttcatcatgttgaccaggctggtctcaaactcctgacttcaggtgatccacccgccttcagcctcccaacgtgctgggattacagccgtgagccgccgcgcctggcctagacttgtgtgttctaaacaggttaagtagcaggttgggtttttatgatagtgcaaggaatgactcatgcctctgagcttctaaactgaagctgctgtaactaaaggaatctgaaaagaacaaccctgaagcagaggcctttattgtcttggttgccagtagtaccttgttttgccatgtagcagacaacacacaaaataatgcagttgtggtgtgccatgctatgtgcacagccccttggattactttgttttaaaaagcatcagagttgggggtactttagggaaacctttgcttaccttgttttgccagtgataagagcagtgggttggagggcacttggccagttttctgttcagcttttcagtgaatgtacccctttaaggttcagacttaaacttccttaaaaagtggcgttgttcatagaatcgttggactcattaatgaatcgttcaactccactcactgaagcccagacctccgtgcccaggcccaatctcgtcaggctg

SEQ ID NO: 102830 - DNA, 2009 bp, Homo sapiens
ttggcttattttgggttcaggcctggcgtagcacccacaagtggcagacatatcacaagagtccccagactctgcctagaaacagtgtttgccctttggccagtgacgtggttcatcccggcccatgttgagccatgagtggagtttccaacagagggaggaatgtgtgccttgttcaaggagggcacgacccttaggcctttttcaaccagatttagctgaagggcttgacacctttgaattacagcagttgactcagagtgcaagaagtctggccattttggaaagcaaggtttcctttcagccctgtctactgaccaataccccgactcaccttgtgtggcgcacttcagaatcagatatacctagagtatacctgtggtttggttttataattaatcagctcgttacttcagcccatgaaaatggcatccagggctgccaggagattcagagctcaaaacaaggcgagcttgagttctgcactccagatatgtgccaaaactagtaaaacttaacggacttacaaccttgtcagtttttttaatgaggcagggatactctgtttttcacactaaacatatgaatgcagcactgctgcctcagctcagcttcgtgcctgggttccccactggtctgggaagactgttgtgctccatagagcagtgcacatctgacccagagggtgggtgttcataactgctacttgctctgctctaccatgtttaaagaaatatttggatgttaaattaactcactatggtttttcacctgggaaggaaacaaattacgtactagagggcattgactggttaaaaacttgtgtatcccgggaaggacctgcggtacaggagtcagccatgtctgtgctgtgtggaaccacctgatgacatggttaacgaggaagacgatgtgttgaccggctgccgtttgaggactttggtcacccagactagacaccttctgtgctcatgtttggaaagctgaaagggaaggacagctgtgccctcctgggagctcatgtgtccctggcgctgtgctagctttcctttacagctgtttacagacaaggcaggcctgaggcagatggccactgctcttgtgatgtttgctcagaggaatatgaacattttatttttgaaaagggatgatgtggttttttgccaggtgtttataattaatcctttaatattatggttattaacctcttaaacatgaatgaattcttgattgttttaacacagtacctaagactaatgctttctgtggacaccactgagctctgcctcaactccaccctctgcgaccggaggactatgcccctagtaactgctgtcggtgtggacgctgtgctggttctgttttctaaaggagcagaaggacaggtctctgagacaggatcgttgtccctacaggaggaacagtggccttgcttcttagacggtcttcactgtgtgttttaaaacaacaacaacaacaacaacaacaacataaaactcttttgacctgtaacttaaagatcataaacttcaggcaataatattttctgtgtaagcttttaaaattatttttggggatcatagcttgttttattttgtgctataaaattaacagtattaaatgacttatattcttagaatacatcgagtgtcttttcttaacagattagtgcctttttatttttgtattccgttttacgttactggtcccagcatcaaaacccttgtttccatggcctgtttgtatattgtctcaataaaacttgcatcagccggtggtggcggcagcttcggtgtttcagtgtctcctcagtccgcccccactagcctcctggcagttcatcagtggtgaaatctctgatgcttctcagagacccttagtgctgctgctgaccaagagctagaatgaagtcttggcatccgcccattccaacactcgggcacccagaggagagcacctggggtctccctccaaaagagaaatctgcctcccagagtgtctgtcttgta

SEQ ID NO: 102831 - DNA, 1045 bp, Homo sapiens
ctctccactgatagtggagattgtgcggcggaagcagcagccgccccctcgcactcccttggaccagccagtggacattggtagggagccccgttccccttccctgggggctgggagggatggtgttcatctgcggtaggagattgggagccatggagagcacctgccaggccctcggggtgggggtgggtgccatgggaccccagagtgctctcctgggtacagggaggaaacagatgaaggcagaagcccccgacccatggggcttgccacagtgggctgtgtcctggtgacctgggatttcctgagccaatttctgggggtggacatggggcacctctttcgggctaggatgtcaggtctgatggcccagggtcacggtgatcagtctctggacttctctttgcttgtaatgtcacaggccccttcattcccccagctctccctggggcttgtgctgaccccggttgctggctcttggtgatgtctgcaggcaccagaggccatgcagtgggcctggagggggcttgatcatgaggtcagcgagggggtacagcaagctgggtggaagatgagacgctgggtggtgggctgtgcgtggggcatagtgcttgagtcggccagggcgccgagggaggacagaatgtggctgatggtacctcagggcgagtgaggccttctgcctgggtgaagttttgttcagggcagcaacatgggcagatatgcaggaaggtagtgccgtggggccccaaggccagaatcccaggctgtacctgctcagggaccctcctacccccaggcacatctctgatccaggacatgaaggcatacctggagggagcgggcgcggaattctgtgacatcactctgttgcttgacgggcacccacggccagcccacaaggctatcctggccgcccgctccaggtgggtgggggctggacaggaggggagggtgggcctggatggtgtcttcgttctgctgacggccaggtgcctaccgctcgttgtctgcagctactttgaagccatgttccggtccttca

SEQ ID NO: 102832 - DNA, 1026 bp, Homo sapiens
tgcccattgtgaagaatcgccgtgcctgcctgccctgcctactgagaagactaccggctatgcgcatgcctatggcagtgggtgcacctgccaggccaagggtcagggtgcccagagcctccaaagagagctgaggggatgtggggccccaaactcattaattcactgaagacacaggtcccacagggagcggatgatgaagcagaccccctcctgtcatcaccctctcctggtgtagtgtggatgcgaggccacggctcagtgatgggctcaccacccagaagtggggagagactttgggcctcccacccagtggggcttggcctggcttctgtggcctgggcgtgttgtggactcaggcactggggcctgtcaccaaggctcctccaacatgcgggaggaggcttagcagacttgcgctgcaccagcgaatctgcctgggctgctcctgtcccacccaccctcactgagatccatgtaaggggctcctcttcccacctggaacttgtgagtggggacccatgatgtatgggtctcacctgacttgaggtgaattttggagtgaagggccctgaggtcagctcccaggtcggtcgtgctgggccaggcctggttttcacaggggctgaaggatcccagtccacctgtgtgcatgtcagggctcggccgggaagaagccagcaaagtcccccgtgtcccttgctgagtattctgtcacagacaagcctccattaaagccacagcagtgctacccaccacacacaccttgctggcccggccaccactgctggcttcagccccttgagcagcccatggcttagcagacccccagatgtaggtcagtggccttacctgtctctatccatgctgtcaactcctgcctccacctggggtcacccagtcacattgggaagggctgtgaaggcctccaggctggccccttccaggggaatcctggaggcctggggtgggctcctgccccttctgccctgccttgcccctgcactatgctcttggctcctgtgg

SEQ ID NO: 102833 - DNA, 1057 bp, Homo sapiens
ccacaacaagaaaggggtcctggaatcctgttcccagtaagggagcgctggctcccagcactagagtggatccacatggggccctcactagggcaagagggcagccctccttccacaggagccaagagcatagtgcaggggcaaggcagggcagaaggggcaggagcccaccccaggcctccaggattcccctggaaggggccagcctggaggccttcacagcccttcccaatgtgactgggtgaccccaggtggaggcaggagttgacagcatggatagagacaggtaaggccactgacctacatctgggggtctgctaagccatgggctgctcaaggggctgaagccagcagtggtggccgggccagcaaggtgtgtgtggtgggtagcactgctgtggctttaatggaggcttgtctgtgacagaatactcagcaagggacacgggggactttgctggcttcttcccggccgagccctgacatgcacacaggtggactgggatccttcagcccctgtgaaaaccaggcctggcccagcacgaccgacctgggagctgacctcagggcccttcactccaaaattcacctcaagtcaggtgagacccatacatcatgggtccccactcacaagttccaggtgggaagaggagccccttacatggatctcagtgagggtgggtgggacaggagcagcccaggcagattcgctggtgcagcgcaagtctgctaagcctcctcccgcatgttggaggagccttggtgacaggccccagtgcctgagtccacaacacgcccaggccacagaagccaggccaagccccactgggtgggaggcccaaagtctctccccacttctgggtggtgagcccatcactgagccgtggcctcgcatccacactacaccaggagagggtgatgacaggagggggtctgcttcatcatccgctccctgtgggacctgtgtcttcagtgaattaatgagtttggggccccacatcccctcagctctctttggaggctctgggcaccctgacccttggcctggcaggtgcac

SEQ ID NO: 102834 - DNA, 1043 bp, Homo sapiens
tgtggaccagttccaacactgtgttttaagaattgcttctatattttttggcattatctgttatctatcgacaattaatatcctttgacgacttttttttttcttttcttctccttcttcctccttctcctccttctttgttgttgttgttgagacagggtctagctctgttgcccaggctggagtgcagtggtgcaatctcggctcactgcaacctttgtctcccaggttcaagcaattctcctacctcagcgtcctgagtagctgggattatgggcatgtaagatggagcccggaagacggagatttcagtgagctgagatttcgccactgcactccagcctgggctacagagcgagactctgtctcagaaaaaaaaaaaaattattacccatattacccatacagtaaaacacatgaaaaagaatgagaaccctgtcttgggatataaatacatccaaggtatattgtatactttgtaaaaagaaaagtgagttgaagtctatgtatttatgtgtaaaaaaatccatgtaataacatacacaggctagaaccttgggcagctagggtagcatcatgccggaggaggacaaacgcctgctgaggtggtgaccctgccttgccctgccaagcacgtagcagttagcaccaactagatacagacatactccacaggagttggaaggggcagagagaagggttcgtaccctgatcagggagtgtcctcccacaactctaaggccaagcctatcagcccttccaagtgggagtgctgccagctttctgtttactgtgaccacctgtgtgcagcaattgggtctgtcacctacaggaaagggacatacatatctgctggccactgtcaacatcacctgtataacaagagattaatatgccttgaatatgtacagaatgtttttcaaaggacagaagcagctctggggaagaagaggacttcagcttttcagtcttctgcattctttcagtattttgccacatatcaggttttgttttgtttttgagacagggtctcactctgtcac

SEQ ID NO: 102835 - DNA, 1046 bp, Homo sapiens
caggaaggccacgcgctcaggagccccccccgccgctggctgctgctcacatggtgtctgggcccttggcactccggtgaggcgcaggggaggggggaccgccactggcccctttccccggagtttctgggtggcacacagccccacagctcggcctctatctgtctgacccgtggtcctttgtgtgcacacagcactgggcagtgtggagggagcctggaggccactgccctcttccagtccccttgccagtctcggggtaccaggtgtctgggtgctggcagagccggcactgatgttttctgggggctaggttactggggccaagtgtggaagccacaccttgggggctctttgtccctgcctggtgggttgaggcgggcagggagtggaggaggattggttcacgaagtctccagcccatgagcaccctcctgaactgctgtgggctgggctgctaggcagagagccgctggcgggtgcttgctgcctcttgctgttaggctctgagtgccagcggtgttccaggctgtgttgcacccttgcgtgttcacattgagctctggcaccttcaggggcctgtgaatgttagggtttttctttgtctttgcaaacaagggtaggcatgaggctggggagagtttctgtcatgagaaggttgggtagggtgggaccctttccaggcctctgctctgggaggcagggctggacactctgggaggggcagtagatcccagagggcggtgggctcagagtagttcagctgctgagagactggaccctgaactgcgaggctcagagctgcctgtgggccccgctgctcggttgtccgtcagccatgaggaaagttcatgttttcactggccccctgccctgtggaagcctgtgagcctatccggggcacaggtggccacctggacactggcatgccttccccagcaccctcctgctgagccattctctgagggactctggtaggggtgagaggatggagctgggagtactgcgttttgtactggggagttgggcttagggctgaggatggc

SEQ ID NO: 102836 - DNA, 4108 bp, Homo sapiens
ctacctttcctccttggcagctggaagcccaggctggggcagcacttggcgcccgcccagagtgcgaggcagcccagggccttggggagaggcagggctggctgcaggctgactgcagcatctgggaggcagcaacatgactgctggcagtttgatttgggccctgccgtatttcaaaaggaaccaccatttagttttgggggatttttgccagctttcaagacaagctcctctcacggagtcctctgcttcccgaagtttaaagccatctggtcatttttgggtccccttctggtccctgagggttgacttcatttagtgtagagacagtagcccgggctgtgaaaccaaatgcaaatcccagtttctctatttgtcccctcatcaccctccacctccattttctcattagtgcaaatggggcaggggcctctgtcccttctcagtttgagtcctcagtgaggtgacacgtgtactgcgcctgcatgtggtgggcattgtgggcttatgtgccgtgtactgtgccgcaggggctcctgccctatgtggggtcagttctgaggccctttgcctcgtcgagccccaccctgccccagagccctggtccgagtgtgccagtcatctgacgcatgcgtgcctgttcttgcccacaggtggtgcgcgtgggcagggcgcggggacatggggcccgacatggagctgcccagccactcgaagcagctcctgctgcagctgaaccagcagaggaccaagggcttcctgtgtgacgtcatcatcatggtggagaactccatcttccgggcccacaagaacgtcctagccgccagcagcatctatttcaagtccctggtcctgcacgacaacctcatcaacctggacacagacatggtcagctccacagtgttccagcagatcttggacttcatctacacaggcaagctgctgcccagcgaccagccagccgagcccaacttcagcaccctcctcactgccgccagctacctccagctgcccgagttggcagccctctgccgccgcaaactcaagcgagccggcaagccctttggctctgggagggcggggtccactggcatggggcggcccccccgcagccagcggctgtccacggcctctgtcatccaagctcggtatcaggggctcgtggatgggcgcaagggggcccacgccccccaggagctcccccaagccaaaggctcagacgatgaactctttcttggtggctctaaccaggatagcgtgcaaggtctgggccgggctgtctgcccagctggcggggaggcgggtctggggggctgcagcagcagcaccaacgggagcagcgggggctgcgagcaggagctgggcttggacctgtccaagaaaagcccacccttgccccctgccaccccaggtccccacctcactcccgatgacgcagcccagctgagcgacagccaacatggctcgccccctgcggcctctgctcctcccgttgccaacagtgcctcttattctgagctggggggcacccctgatgagcccatggatctggagggggccgaggacaaccacctgagcctgctggaggcgcctggtgggcagcctcggaagagcctccggcactccactcggaagaaggagtggggcaagaaggagcctgtggctggctccccctttgagcggagagaagcagggcccaagggtccctgcccgggagaggagggtgagggggtcggggacagggttcccaatggcatcctggctagtggggctggccctagcgggccctatggggagcccccctacccctgcaaggaggaggaggagaacggcaaggatgcaagtgaagacagtgcgcagagcgggagcgaggggggcagcggccatgccagcgcccactacatgtaccggcaggagggctacgagacggtgtcctacggggacaacttgtatgtgtgcattccctgcgccaagggcttccccagctctgagcagctcaatgcgcacgtggagactcacacggaggaagagctgttcatcaaggaagagggggcctacgagacaggcagtgggggtgccgaggaggaggccgaggacctgtcagcacccagtgcggcctacacggctgagccccggcccttcaagtgttcggtctgcgagaagacctacaaggacccagccacgctgcggcagcacgagaagacgcactggctgacacggcccttcccctgcaacatctgtggcaaaatgttcacgcagcgcggcaccatgacgcgtcacatgcggagccacctgggcctgaagcccttcgcctgcgatgagtgtggcatgcgcttcacccgtcagtaccgcctcacggagcacatgcgtgtgcactcgggcgagaaaccttacgagtgccagctgtgcgggggcaagttcacccagcagcgcaacctcatcagccacctgcgcatgcacacctccccctcctagaagccaaagacccgcgggcgccctctgccaccttgctccccgggaacccatggaaggagaagcgaggtgatgcagcagcaggggcaagaccctgggtccagtggaggctccgggtggcccctctggcccccactgcccacacccagagctttaatggacagtccgtaccaagcagagccgagaggagggaagccaggggtcccagcccgtctacctccccatcccacccaggcccccagctccccgcgggggccaccgcagggcctgtgggctgggtcacgtgggtctcgctgggacctggtccctttgttgcaggcggcttggagaaagggcagtgggacgctggccacggccagggtggtgtcgggagcaggcctcaccccgctggccgtgtctgtgtgtgtgcacgtgtgcttgtgtctgtgcgggcgcgtgcagccctggttctgcagggaacaggtgctgggggtgcagatccctccctccttgagccagggtggcactgttcactggcgctgggacagtcagggtgaccccaccgcctacctctctacatctaaagagccctctgggcctgtgttgctgttattcctactgatctgttcctctgtttttctttttgatttttgttttttaaaccaaaacagacaatagcttattttctttccgccccctccggggctgagcctgggtctgaagactgaatgtaacaggggccgctggcactcctgcgcgtcccccggctctggcgctgcaggggtgtcggcgcgccacctctccaggccccagaagcccttcttgcccaaaggcttccctggtccctgagccctgcctcggctgcctcaggggagagtgcttttcctgtagtttccaaggaatattctttgtttagaggtacttgttttttattaagagaaaaaccagtgtaacgtttatgtgactgtttgaactggaaggtctggggttccggggggtggggggaggctagactcaatgccggggccgtcggtactcttgttttcatttgtgtgtgcgtgcgtgtgtgtgtgtgtatgtgcgtatgtgtgtgtctatgtgtggtgtgtgccgtatgcatgggcagatgtttcgctttccctccttcctcgctgaacaaggtggagacttctgaccttttgctacctcttgaattcatgacaacgatatgttggtgactggcagtggaagcccttgacactcttgttttccttcgcttagcacctaggaagtcgtgtgcaggagccagcagggcgccaagtggcccagtgcctgcagctcacctgtgggttttccctttgagcctttggccacatccacctcgaggggaccctggcaccccgggcacacaaacctctgtggtataggtgaggggtgtgaggccccagcctggagccaggcactgggtgctgacaggggaaccatgaggagggtggcaggtctttgcagctcccggccagggtgaggcggaagtgagccctcatcctgccactcctatcctccattcctgcaagagttttaagcttgagagagctgaccacagggccccccggggaacagggatggcacttccctgagcagtcctggcccccggccactgtctcggggcccacctctc

SEQ ID NO: 102837 - DNA, 1064 bp, Homo sapiens
agacctcactggggcagggaggatccccagggctcccaccctccacttggcgggccccgtggggccaggtgctgaggggagcctctctaccccacccatcactagcttccctctgccctctcccaccccgggggggacccaggttgggcactggctcatttctcgcaaatacctcgaaggggaggggggagggatggggttatagctgttttgtttaattggaactggaagagggatcatgttttgttttatgcccttcccagaaggggggagggacaccgggatcgcactcctgtactggccaccgccgctgtcacttgtcacattgagttcatgtcccttgagagtttgtataaattcaggtcagagctgcagctacacagctgcccagtgtcatagaaaagcaattcaccaacgactgatctctccattcagaagtgtgcagtcttaaatgtacagcgataagaaactgttattttatgatcttttcattaaaagcttgattgaaaactctggtgtgggacctccatattctgctttggctgttctctctagcaaagtgacacggcttctaagtcttagaagggtggggtctgggatgggcatctgcctgccactgttcagtggtgcttggtgggtcctgggggtgtgcaccgtgccagggaactagcactttggggtcagcatcctcttgggcagtgttggcctgagttagctgaggctgtctgggaagcagcgatgtgtgtgcagttacagcagcatggacctggtgactggggagaggaggatggctgcccagtgcctgggacccctcattggagtggctcagttgggactgaggaagggctggggcaaggcgagggctgctcccttctgcccactgctgcttcctggtgcttggcctgaggggaggggagggaggaaggaaaaggggtaatgttaatccccagggaccacccggaatggggatcctcgtgtgaagacctaggaggaggagcaggggtggagggtgattgccactttagacctctggcatggactgcagacatctggtggctcctggc

SEQ ID NO: 102838 - DNA, 1041 bp, Homo sapiens
tctacccagtttttcgactgctcccgccagtgtttcagtggcccctgccctactggcctcatcccagcattagcccactgggcccaacccttgctaactgtggacgcccttgggcttcctaccaacagagctgattctgctgccctctgggcctttggtggggtcctggaccagccatgcaccccctcccctcacaccccccacccagaggggagctgcactaggggctggagagacagctggccagctgcagcctaggcctcccagctctgggccggcaccccgggtctggtcacattcctgagggacctgctgagcctccctggccctgggggtggagtgggggaaggggaaacggggacgggccgctgcacgccccttccccgaccccggctctattccgtgggggcccaggctggcaggtgtggggtgcaaggacccaccacctcaggatcccccctcctgcaggacccagagctctgggggtgggagggaacccctcgtttcctggcggcagctgcccaaggctttggtgggccggtattgaaagcccaggcctgcagcttgggtgagcccttaggcagtgaaacctctggagagggaaggccatgtggtcaggccaagcgggctagggggctgggccctctgggcagggaggcggtgagagcagatcaggaagggaaggaacgggggagccaaaagcggttgagactggttcttataaatagcccttgcacaagtggctccaattttgaccttttgttatgtaaatgtggccagcttgggaagggccctgcccaggcctcctgctaccacacccgcaggccaagaattgtgtgtctgccaccagcgccccctggcctaggtggcccctgggtgtccttaatctcctgtgtgtgttagaggggcaggcattgcacccaccgaactccctagacctgttcgctggtccttactcttcctggctgtcagatccaactaccaggctctgtggccacagtctcctgctgggctgcccctggtgccccagccagagacccc

SEQ ID NO: 102839 - DNA, 1460 bp, Homo sapiens
tcacttgaggccaggagttggagaccagcctggccaacatggtgaaaccccatctctacgaaaaatacaaaaattatctgcgggtggtggcgcactgcacttctgtaatcccagctactcgggaggctgaggcaggagaattgcttgaacctgggaggcgaaggttgcagtgagccatctcgccactgcactccagcttgggtgacagagcaagactctctctcaaaaaaataaaaaattataaagtatgtgagacttctggttgccttactgcctggccaacatttggtgttacctttttcctgatgggctttgacgttcttattgtttctggaacagtcctggtcttgtttaaaaacatccccattttcctttcatccctgggagatactcttttagtctttgtttggctagtcaaaatcccgtctttagtatctgttgttgaatttttgtgtttttgttttttctgattccctttcagcatgtcatctcagtcttgtcccagcccgggggtcaggcggtgttgcgtacagacggtgcagtggctccttcatgctggttgcctcagagcctttgccaggcctggagaactgcataggtgcaggactgccagtagttcttcctgctctttgatcattgaaatgttttcttttgtgaagtaatgatggtagaagatgatagggtttctgtttgtttctaattctagtctttacttggcattaagaaattgttagctgctagggttgattttgaaattgtgaagttggagagtccctcctggagctgtgggttggatggctgcagctctgtgactcagctgtgctgggtgcctccctttggggctcagttacctccttttaaggtgtccctagggtgagagagatgatcacgatagtcccttccacctgggcggcccaggctttcctcgcccatttagtgcctttcatgtagaatttccacctgttgtctgctgtgctgccactgcttgtcctccctccctgccacacagagctgtgttctctgcctgccactcacgcctacttctctgatcagggtttgtggaaccctccagcgtggtcaccattctggtacctgtggtaacacgctcagccttggtgtggcacattctaggtctaccgtttgtattcaccagcctgtgagcttgtgtacatgggacatgtatcttcgttttgggggctttctccttccacttgatgcccatcccttgagcgtttactacttgtggagcgcttggctttcaggccgtagagagctttccaatcagtggtgtccaggtaaaaacaaaagaaggaaaaaaagcttctaacctaacccttctcagacttgactgtgtgtttgagcccccagggttctggtggttagggctggatggagtctgagcctctgcgtgtctaacaagatccctggtggtgctgctgctgtttcttgggtcatggcca

SEQ ID NO: 102840 - DNA, 1303 bp, Homo sapiens
ccctccttctaactattcaatttattttttatggtaatgttagtgggtggagagtgggagtgcagcctcggtgttagaacagggggacttgggggtccttctaatggtgagagggcacagggatgggtcagctaggtgtctcttacctagaggcaccggttttttgtgaggtgggcagcgcatcgtaggatcttaggtgcatgttttctgtttaagggtgatcacacatgggttgtggtgaggagggagtatgtggagtccccagccttcttgtggcagttcccagtgtgactaaaagaaggcagggattgggtttggttaggtgggtgcttccaggtgagagttggcctgctgtggaaatggaagagctcctggctctggcaggggtgtggctgctgtacagacttgtcccctgccgtcccgggctgttgccctgcggcttgggcttcggcttcattccaccgggtgggtgggttctctgacaagtgtgggaaggggccgctcccattaccacactgaggcctgagcccctttgagggggaggatctgttgcatggcctttgcaagccctcacccctgctgcgggtcgggcggtgaggccgcagcactcggaagacggtaaactgttggtgagctctcattcacaaagtaaatgagaagggagagtggggactgggacttcggtggcctgtccttgtgtggacacagtggggctcttctgggtgatgagtgcaggccgcacattcacccagcacacgttgcccatgctgcctggcagaggcctgcctgctggtgctctggttctcaccttgagctatacctgtctctggggtgggcccaaggcactagcttttcctgaagcttttgaagtgaacctgatgtgcagccaagtttgagaaccgctcttctagcaggtgatgcatctttgttgataatagaatccacaggcggagggatgagtagcccgcgcttttacctgcggttctcactaactgctttactccgagggcctggtggggtcagcggttacccagtgaatgagttggcagaatcagtcatgcctgttcctgggtagttactgggcacagagggtgaacagcaggaggaacctagcccatgtgcactgttggcttctcctgggaggtcctctggagagctgcctatagccctcagctgtaggcgggtcctactgaccccgtagcacgggcttttggagtctgcctggcctggtttcctggctgcattcttgggctctcgttggcctgtatgtagtctggcgggacctcacatagtgcagtttggg

SEQ ID NO: 102841 - DNA, 1001 bp, Homo sapiens
ctgcctggtttctacaatgggaacagaactggagtttacattcatgtatcgctgttttctggagctcagcctagggaaggcagacactcaacaaatgattataagatggggtgataagggctggcatctagcggagcgcagagggcatagcggtggcgtgggaggagccggccgtgggctggctgagaaccctggatgccatgtgggttggggttggcctggaggggaggggttttaaccaggaagtgactgctactgggttttaaaaggcagtggtagggtagagggtggcagtggagacagctggagagcactgaggacgcggacccacgggtactgtgtgagctgtgaagcccgcttgggagaccccactgccagccaggcatgtatgcggctctttttcaagctttttattcattccgccacattttctgagcgcaaagtcagtgcctggcccccttggtttagaccaagtcatgttggcccctgctttctggtgctcacagacttgcctgggcggggtgatagaggcgcttgcagttcagcacgcggcccgttctcctctggaggagggaaggagctgcttttggaagttaagtagcttgctgggggctggagggtaaatgcctttgactccaccgcctgtggaggcccatatagtgtggtgtctggagagatctgagatcgcactagggaggagtggggctgaaagccccctccctaagagaggtcctggctcccatttaggggcttctgaaccagcccttccagtttgactctgcctggcaccgccagggttcgcttcctgctgggaggggccttgccctaagggttagggacctgggctgggggagggctctgaggaggggctgggccccgagggactgagggactgcaggcttgcttgccttgagcccagttttagctgggagtggcaaagcgagaaaagctggtggggatgggagctctgtgtgggcccccagtgagcttgataagggagg

SEQ ID NO: 102842 - DNA, 1032 bp, Homo sapiens
catctgccagtgtctggactccctgggccttcaggcaggcattttcaggagcacaggccatgtggttggtctggagccctgtgtcaaggagagtgtgcgtgcttggtggagcagggttgctggagtagtgtgaaaaaaagcagatgagctggcctctggagacaaagctgtgtggcaagactgctggtttagtgggctctgaacaccaagaacagggccgggagtctgatacttgggggctgaactgagtcctgtggcccaggattgttgcctggaagtgaacgttccgtcttgtgccattgagactgtgaagatctctgggtcccacaggacgagcagtagacttggaaggctgggaagaggctccccagctgcctgccttgggaggtcagagctctcaggtgggtcggcaggccagtgtcgggctgggggagggaggttgtagtagagtgcctgtggcccagcttctctggtcagttggctctgagtgctgctgtgtgcccagcaacctctccctgcggtgtttttctgccagttgttggaacttgtagattagtcactgagtttttacgaccgattcctgaaaagaaaaatctccctctggttgctgcctctgtgtagaggaagaagcagcccgagggagtcaggcctttaattaaagcaaaaccgaaatgattgtcgaagttgctggaaggagaagagaaggcgcaggtggggcaggggtgatgagtcctgttgtgctgcatgatacctgctctggggacaggtaggcacgatcccatcctcgatccttggtcttggccagcagcccagccttctccacaagctgcagtcgcggattaatcctcacgtagtgttttctttccgtagatcagatttctcattttgttaataagcgcagcctcccatccacttgaagtcagctgttgtggacgaggagcaacagggttttgcattattgagctgatagcctgccgcctcccctcaagtccttattgtttgcggggtcagatctgaggggtggggaagtgc

SEQ ID NO: 102843 - DNA, 1344 bp, Homo sapiens
ccttttggtgaggaacacatgctaaattggcttagtacttttgccagtggatttgccaaggtcctctgtagcccaccccgccagcatctgtgagtcggcggctgggtagtgctgccggcctgcaacgggccggaaattaaaaaaaggcccaggagccagtttcctgaggggagataaagagctggggttcgttctaggcggagcagtgcttggtagagctagacattgaacttggagccacagtctctgagcattccctccgtccctgggaacgtttcctttcttttgttccctaagggctagagaggacattaactttataaaactggagtggaagtgggcacaaaagaacagtcagaggacttcagacctctcctcatctcttaagctagtgacaccaccattcaccagataaggggtcggttaatggctttctttcctaccctactcccaggtgcagtcgtccattaacccttgtggatttaaatttagaaagatttctggagtgcaggccgggcgcgatggctcacgcctgtaatcccagcactcctgggaggccgaggcgggcggatcacttgaggtcaggagttcaagaccagcctggccaacatggtgaaaccctgtctctactaaaaatataaaaattagctgggcgtggttgcatttgcctgtaatctcagctacccgggaggctgaggtggaagagtcgcttgaacccggcaggtggaggttgcagtgagccaagtttgcaccactgcactccagccagggcgacagagtgagactccatgtcaaaaaaaaaaaaaaaaaaaagatttctggagtgcatgccttgctttctaatgttactgaaattactctgaatctatatcctcatctctcaggtgccctcccaagtgctctcctccccagactacccctgacggacaccagagttcttttaaagcagataactcaattctttcactcctgttaaaaacctctatggtgttattgtcctcagcagttaatcctaacctcttacttggcatgcaggacctttctgagactggctgaaagcaatcccttgagcctcacctcctgccctttggtttcccacagttcttgcacctaatcacagtagctactatttttccagcttttacttcgtgctttatatgcatgatcatgtttaatccttcctgtgaagtagacattgtgatttccattttgtcgatgagaaaagattctttggcttgcccagggttacctagctagggagagtgagttgtgatcgaattcggttctttctccaaagcaaagtctcctgctcttacttgctgtctgatgtccctttgcacgtgt

SEQ ID NO: 102844 - DNA, 1006 bp, Homo sapiens
tgcccttagtgctcctcactgactgcttcctctcctttttcttgagcaagatacagtttttcactctcatgttacagttgagttccatcttgccatatttttataattcttgtgaaatttaccttgtgtttatcatccctactttatttttttatttttttattttttcgagacagagtttcgctcttttcgcccaagctggagtgcagtggtgcgatcttagttcactgcaacctctgcctcccgggttcgagcgattctcctgcctcagcctcccgagtagctgggattacaagcgcccaccaccacacccggctgatttttgtgtttttagtagagatggggtttcgccatgttggccaggcttgtctcgaactcctgacctcaggtgatccacccaccttggcttcccaaagtgttgggattacaggcgtgagccaacgcactcagccatcacccatactttatactgttggagtgtggatttctgaaaccataaagtatatttacagatgattttaaaatttgttttgtcccataaatgttagatatcttcactgttgtttcttctttttttagttgtctagtttcaaagttctgtgtggcatatttttttcctatctgtatttggtttaaaacattttgtttgctaggactccagccttaagggacgtgcatggtataccctgtccttagccaagaatcttactctagtatcttgagccaaggtcaaaaaagccaaacacagcattggaactgtatttatagaaaatccttcccaccccagattcctttttcctcccaaagccccagcttcccatccacccaccaacctggtcattaagcacatgtttgagcaccactgtgagccaggcgctggcaggaccagggcttcctgatccctgcccttgttgagcttacattctatttggagagtggaaggaggtggcagtgtgggtgtgagatctcttcccctttctgagtctgcccaggcttcataatcccc

SEQ ID NO: 102845 - DNA, 1150 bp, Homo sapiens
ggtgctttcccctatttgacacccctttatgctttgtcaatcaacaggagcttgaagaaatccgcaaatgtgggatgaaaaacttccgtaacatccaggttgatgaagctaatttattgacttggcaagggcttattgttcctgtgagtattgaacacttccacttcctaccagattattctttaaggtgatgtgtgtgctgttgggcttgtttttctgctccttagtaggctcttagtctaggcagccagcagatgcacagaagtggctgtcgctctagggtgataaggtagggagtgtagccttgggtcctgagtagagtcacatcttggcactcgttttgtcaaattcagggagtcctgagctttgcagatctgtagacacagagaaaaggagtgtgtctgtgctcctgctctttcctgacttccctgcgcctggcctgatggatcagcaggaccttcttctctgagctcctcaggaggggacaagcattcccctctagatattttgctttctctcttggttttgcattcatgtctctaaccctttggatacctgtatttcgggctttattcctggtcccctccaacctgtgccttccatttgtctcaagtcccttttcctaattgcccacatgttcccctcaccccatgtcttttctggggcttatgcctccagtgtctgcccccacagcccagctcccccatctcacagtcttctgccttctgatgggctcaaggccctcctaacgatggctttccttagcaccctcttagtgcctactcttttctgcatcctttgatcccctccccttcaagaggcttgtcttataattaactccagtttgcaatcccccttcctctcactctcctgaaaccacgtcacacccagcccacaggctgcccccactgttgtcacacctctagctcggcagtgctggcatcatggcccttgcttgcctcctgagcttttggagcacgggcagcattccagcccccagtcctgtgaccagcctgccactcgctcctgttctgccactccttcctcctcactcttaaacatgactcttgttggtctcctgctgttctcctgttctgttttgtctcgggaccctactactttcggcatcatagatgattatgccagacat

SEQ ID NO: 102846 - DNA, 1002 bp, Homo sapiens
agctccacgggtagattgctgctgggcatgctctgccccaactcatgcaaaggcctccctctggtttcacgctggcaggggctatggagcagtgggctaagatcttactagggcaaaggtggaggctggctggtagaatccaagtgtgcttgggctgaggctctggggagctatccaggccaaagtttcaccttggagacggtaagcaacagccagggctgctcttgtccctgtgtataccacttcttctcggtcctctcccttgctttcttccagggcccctgggtttgtatgaggaatgtttcaatgaagtcttcttccttctccagagcagttaaggcattgttgacatctgacatccccagggtccacacttgtaccccaacctgggctttaggtcttcctgcattggacgggctgggccagcatgggaatctactatacaaactcacctgaggtctgcccagttggggtaaaagtagagccaggccgatgaaggcatggcagcccagccctggtccttagtggagagtggtgctgtccttgggtagccacctagcgattgccctggtcgtagtgcacagaggagggcaggtgggagggaaggctggggaggtacttcctagagacttcattgttgccaacgcaactctggtctattccctttaaacatttgtttttctgtaattttttttcatctaagatgctaaggtaacgtctaaggaagaaaatattacccataatcacatcatcaagaaattcagttacattttgtgtactgccctttaggaactagaggtgtggtagtcacccttcttgaagcttctagcccagtgaatgtgtttactcttaaccttcagcatacttcctctcagccttttttcatgcagtttcttttttttctttttaattgagttggagtctcgctctgtcgctatgcagtggcacgatctcggctcactgcaacctccgcctcccgggttcaagcgattctcctgcctc

SEQ ID NO: 102847 - DNA, 1410 bp, Homo sapiens
cccttctcagtttagcagatagcttgctctagaaatacttttgggtggctgggttgtcctgaaggtggcagggcttcagttgatacttgaatcccttgaaataaattgatttttcagataaacaattaaaacattcctgtcttggccataggtttatgaaccatggtgtgttcattttgatctctctttccttccaggacaaccctccatatgataagggagccttcagaatcgaaatcaactttccagcagagtacccattcaaaccaccgaagatcacatttaaaacaaagatctatcacccaaacatcgacgaaaaggggcaggtctgtctgccagtaattagtgccgaaaactggaagccagcaaccaaaaccgaccaaggtaagacatgtgcctgtgtcttcctcggagggggtctttgggggtgctgctctggggtgggggcttctggtaccagatcagacagaatccagagaatctttcaggtacacgaaaaatgtagctgaggtcctgtcagaccttgtgggaatggctcatctcagctgaacttttgacctgtatagggtttgaggaggcctttccagtgctcagccctgggctgccatccacagtgggaacacacatggacagacaagcccagtggcttgctgctggtgcagagaggtgcaggcactggtccctggaagggatgaaggactgtggggctgcctacaaggggaagggagagtgggatttaaggtggcctcatgcagtagttagtgcctgaactcagacttgaaggaggaaaggaggttggagagggccttccaggctataggaagggcatgggctagagcctagttgctcgggtgatgtgaggggagggacagaggcagatgtaagggcagtattcccagatgaaggcacgtagttggctttagtgggcctgggattccctggagttggatgtggctgtgcgtggtgcacatgtctgtgtgtggctgtgtgaacataaacatgctcattcttctgggaagaatatttgagtcagtattgtggttgtcctcccttttgtcccctagaagtgactagtttgttatggactgtgtctggttttcatttaattctagactttcttttgaagtcctaatctcatattttgatggcttccttttaagtacctaaaccagtataaagtctgtttagattagagtggatgaagctggcacttgagaggctgcaagtggagggtttcttttaggggtgctgctctagggtaggggctcatgggtccttcctgatgccagatcagacggagtccagagaactcctaccttaccaggtgcacgcaaagtatggctgaggtgccaccagtccctgtgggaataactcagctgaacttttgacctgcacagggattgaggaggt

SEQ ID NO: 102848 - DNA, 1045 bp, Homo sapiens
tacacccaggagtttgagggtaccgtgcagtaaagtatgattgagccactgcactccagtctgagtgacagcaagactgtctaaaaaaaataagaaggaatttgtggcatcagcagttcggagaagaggggcactgttttacagtgggaaggaacattctgagggtgctggtcctgacagggtcagggggcaactgtggcaaagtatgtgaggaggtgtgggtagcagctgcttctgattccccactatccttccaccctggggcacgtctgggctacggcacctagggggagtactgtggcacccatcagagccatcagcgtgacatctgcctgtggtcttgacaatgtgatgcgatggcggttgtcagcttcccattggctggccccagtgaccctttctagagggttcagaaactcctaagggtcttccagagttgggtcattgcgcattgacaagtgcagcgccatcacatacccttctctctagtgcccactcagtcaccttaaccgaaacttccctgagccgagcatggtgctgggtgctgggctgatgcagggaagttctacccggtcctgccctgaagaaagtgaccctgtgtgcatgcatgagagtgagcagtcagttcaatactaggcctcctatctccagagtacacaagaggactggattagccgggcatggtggtgcacgactgtagtcctggctacttgggggactgaggctggaggattgcttgaggtcaacccaggaggttgaggctgcagtgagccaagatggtgccactgcactgcagcctaggtgacagagtgagaccctgtccctcctccccaaccccccgccaagaaaaaagggctgggagtgactgagggctaagacctccccaggtgttaggtcaggaaggcttcctggaggcggaagcacatcactgtgaacaattatccactgtagtgttagctatttgttgtccatcagtgtcttctaatcacagaggaaagatgagttttctggcagtcagaattttggataaataggaggcagcttt

SEQ ID NO: 102849 - DNA, 1062 bp, Homo sapiens
cttaaaagcacattagctgtaaatcagttgtaaagccagagttttgttcccggattagctgcctcttgcctgtgccatttctgagactgtgttaaccccccatgccttgtccttctcttggcagtaatccagtccctcatagcactggtgaatgacccccagcctgagcacccgcttcgggctgacctagctgaagaatactctaaggaccgtaaaaaattctgtaagaatgctgaagagtttacaaagaaatatggggaaaagcgacctgtggactaaaatctgccacgattggttccagcaagtgtgagcagagaccccgtgcagtgcattcagacaccccgcaaagcaggactctgtggaaattgacacgtgccaccgcctggcgttcgcttgtggcagttactaactttctacagttttcttaatcaaaagtggtctaggtaacctgtaaagaaaggattaaaaatttaagatgttctagttctgctctctttgttttaaaaatcactgcttcaatctacttcaaaagaatggtgtttcttttcttgtccaattttatccaaaatcttcaagttacatttaacccataaggtttaaaaaaaaggaaaaaaaacggttgtggttccctttcttccctacccttgccactcccactttctggcaccgagtttatttttcacttacttacttccccagaccccgggctcgcctccacaaaggagaaaagactgccctggcggtcctggtggcttttcttagcatgtgtggcactgttgcccagtgtgggagttggtttaaattctcctgactccagtttataacatccttttaaaaaatttaaaaacaaacagccacacccctcctccagtccttctcctcagttcttgtgtgaaactccagctgatgttaccacagtaacatcagttaattgggcaagccctgatgtcagtgtgtgtaactgacctctggcctggcctgcacagagaagccctataatcacaggtctgtggtggccccgaaatggggggcctgctagtcaggaggatgctgtgcacactg

SEQ ID NO: 102850 - DNA, 1070 bp, Homo sapiens
ggagattgtcctcaccaggctgctttggaagaggcataatactataatctcagtattgatttaagaagtcacctgtaggctgagtgtggtggctcacacctgtaatcccagcactttgggaggccgaggcgggcagatcacctgaggtcaggagtgcgagaccagtctgaccaacatggagaaaccccatctctactaaaaatacaaaattagctgggcattggtggtgcatgtctgtaatcccagctactggagaggctgaggcaggagaatcgcttgaacccgggaggcggaggttgtggtgagccgaggtcgcgcccctgcactccagcctgggtaacgagcgaaattccatctcaaaaacaaaagtcatctgtttagatgtaagccattctacgggataggcgtgaggagaccctgcaaccctgtgggaatacatttaaatttttctaggaggagcagtcttcccgggaaatgggataccatggttcctaacttctggcaatgtagggatgccctgtggactggggccgcatgtggcttagctgaaagctcctgaggtgcaggagcagatggggaaggcagtgcgagtcctctagagcacagagtccttctgcaccactccgcaggatggaaaggcagatggaataccatgtggtccttgtctcatttcatgaaatagcatctatgaggcaggcaccgatgtccccattttacaggggtagaggcaggagtggcagagcagggctttgaaactactcattcatttatttaatgtgcactgggccctagcctgggccaaacatggaatcaggggccaagagagctctcatccagcctaggcagcttggagagacgtgtggctttctgaagggtgagtgtgggatgtcgctcctccttcctgcttctacccactcatggccccatccccttgactgtggcttcagtccctttttctggctccacactcgtcttccatcttgaccttcactagacttggactctcccatctgcagcacttttcctgctttcttgcacccatgcttgtgagctggaatcactgtacagtt

SEQ ID NO: 102851 - DNA, 1001 bp, Homo sapiens
gcaggcgaaggcacgcgcgggggcctccagccaagtgcagccacccacaccgcgctccagcggcagtcgcgtaaagcgcaccccataggcctgcagcgcctcggcgaacacctggcacacgcctgcgggcggagcgggtcagggaggagcacgtcctttcacctgggggcatcgaacttcccctactcccccagccccgcctgggagtaacgccctccaaactgggatcactaaccacgcacctgggagcacgtgcacgtgctggtgcccgtccgcgtgcgtgggggccctgcccagcagctcccggaagcagcttagttgggcctcgagctcctcccgcacctagagggcgagcgagagacaccttgagcgaccgggagtagctgccgaggataccctcctcgtgcttccgtgtgatggctccagtgtttgaatgcggaagtcatccaccgccagctcctaacggcctcacagtaccctccgggcggagctctgggggtcctcgcgagcatcctcctgtagctgcggctccgcacctgaggcaaatccacgtctccggccgccaccgcctcccggaatcccatcttgccaaggaagaagccttccgggccgagcagcgatgaggcgccacggcgggccggacccacggggcggccctcggacaggttggcgtggaggcccgtggggatgctgtgcctgagggcggagcgcgagctggagcactagcggccgcggagccgcgcgccccaagccgatcgccgccctgctagaggccctcccctcacctgcgggccagctccgccgcgctctccgtggccgcaccgttgaccagcagggacacgctggtcacagccccggccagaaaggcctccacgataccctcatcgcgtcgcgggcagtaaccaaagtcgtccgcggtgaccaccaggcgcatgcgagggcgggacatggccgcctgggtccaccgctcgcgctcccaggggagtgggccggacagccca

SEQ ID NO: 102852 - DNA, 1704 bp, Homo sapiens
cgaatccccgcgccagcgccggccaatgagcgcagcgctatgctaaggagtcgggggcccggcccctccgactgtcagcgggttaaagatggagccggcaggcgaggggccgccacgaggtgcagggtcgtctggacggggacccgggggcagacgatggccgggatcctcttccgtctaaccctccgcgtcctgaccgggccctgggcggaagggatgtctgcgtgagtcagctgtgtctgaggaggggatcctgggctgggctgggcggccctactcggcgggtcaggcggaggggcgcggccgggatcccgggggccctctttggagcagggaactctagaagggcggggagcccccatcctctgctccactctgggcctccaggcagaagaatatgttagaaaagaatccagagtgtatctagtgcagggcaaggggccagggatggagtcgtcagctagaaggggcgcgtcgtcccggggtggggccgccctttttctcctggagccgcgggccgagtcagggcgcagggtcgtcgggctgtacccaccccgctccgggcgctagccggctttggactgcggctgagtgcgggttcgtctttgtgtgtgcgccccctcccctgcgtggcccgtcagctcctgctccgggattggaacaaccccctagtctggggtttctcctccacctcaatccggagcgttctgggaaaggcctgggtgtcctgggttctgaagaccccagggacgcaccccgctgcggtctccttccctgcccggatggactggacgggggctctgccccacccacccatccatggttgagcttcccgccctgcgtgtattgggggtggtggggtcccccctgctggccgcaggtgctctgacgaggttgcactactgtgctctgagaagcagtgcaatgatattgtcaaagcatctgggaccagccttggggatctccctccctataaccctcacctcccactccccaggcagggccccttgggcttgcaggccctcccctcccccctacccaattcgctcccttctccatggaaacttgagattctagacaggcctgggcctctggggtcagagggcaccctttccccccgggcagaggccccgccccagccagcctgcattccaggtctcagatccctgcagaccaccctgggggaggcactggcaggcctgcccgacactctttccctgttgcactactataggccgctgggaagcagtgcaatgatgaaagggcatcggtcaggtccagcctgctaccctgggagggggaaagggagcttgctgcctcactccactttccagttgagaaggttgaggtgcccagagggtaagtgtttccactgattaggcacagatgtgaagctggactggaccctccatcagaggatcaggtgggtgcagagctggagaatcatccctaaactctccatcctgtcatggctggacaggtgcaggagcagacctccccagcttctgaaaagctcttgtttgaaggtctttccacattgggtccctggggtaagactggaactccaggcctggtcagggtcttaggggaaatacacgcccagtcttttgcatggaagatcattctaggcctggcttgggcccagtccttgctggaagcttgaacagggccaggctctggagagaatgttcttctgggtggcag

SEQ ID NO: 102853 - DNA, 1012 bp, Homo sapiens
tttcagggagaagaagctgtgcgtgaatgtggacatgttcagcatgagatgcccaagaatcgtccccagtggtcatttggatgtgggtctggagctgaagggtgagacacagtgggtgtgtttttcagtcagttatgggttctaatcaggaacaagaagtgtgtaagatcgtcccagatgagacggtgaagccaggaccttcagaaacgcattcgaggggcaagaggaaaaggacagcgaggtggagcaggaggaacaggacactgaggaggggccggagatgcagcgagtacagagcaaacaagtggctgtaaaggggaggagagcgcagaatctggggaggccaatggagagtgaaggagagggaggagggtgaaaagtccgaactagaggggttaggggcagagtgaagttctcggggcgttgcctggatgaggcccgggaggctacagacagcgaggaggggcgcccgtcggaggggactaggggcctgccgagaggtggggaccttaaagaagttgctgaccaaccacgtcctcggcgcagccaagagcccgacccgggtcaaaggcccgatggcccctgcggaactgggccaggacccgcgcagccgcgttcgccccctcgaggtcgtgagcgcgcgtgcccagagcaacgggcattgtcgcctgaggcaggcgactggggattggccccgcccccggcttccgcgcggattggctggggcggggcggcgcggctgcagtaggctagagagtccgcacctgcgccgcggccgtggggagagagggtgcgtcccggcagtcccgcacgacgggccccgcctcccctggtgaccccacgctccggcctcggggggagtggcggtcggcgcgccgagaccctcgggagccccgcccagacgcctgctccgcttccaggccacccgggctctccagccgcgctcgctcgtagagatcctagacaagttcgacagcgaggtcccgcagagcaagacctgccagcagatctc

SEQ ID NO: 102854 - DNA, 1070 bp, Homo sapiens
gcctgcacctcttgactccccacttagcctgtgtgactcattcaggtctggcctccacctccaggcagtcctccatcccccaggctgggttcagacctccttagttcccagcgtgcccgaccccatctcctgtacccctaaccaagctcaaggtgggcacaagagatggtcccaatgtatctgctgagtgaatgaaagccacgtcattcttatggctcttctataaggtacttttcttcaaatgaggccaacaaacttatcctgagatttcctttctatcctccaggtgaagaatttggacatttcaagatctgaagtgaaattaaactggaatggcctgtcacgaaacccaaggaggtcgaaggggtttactctgggcttgagggaaatgaaaaaggagcatcttggggagtgtcccatgtgccagcctaggtcaccatttcttctcagtctgttagtgaatcctcacaaccatcctgagtgcttattctcattttacagtggaggggtctgggctcagaggttggctctgtgtaggcagtgcctgtgcccgtgctgtagaactgcacatgaggtgtggaggggcctggggctgacgtcccctctctgccctgtcttgcagccacatggttgatctgactggttgatctgactcccttggttctcaaccctggaggcttccatttctcatatgtggctggaaacagcctgcccaagctccattgccctggctccccctggtaagcatgcctccgcacctccctggggccagacaccatcctggctctaacccagtgcactgcaggcagagggtagcatggggagccatgcccacagggagaggcaggagtggggctggagatgtgggaggggccccctggttttccacctgtcctttgggagccccaggatcctgtctggtctacactatgcctacggtctttggtcccttccctccactgccctgcaagtcggtcagtgggagcctcccccactccaggcagtcctgggtgccccctgctcagaacaatcccaggggctctcctgggcctgtagccgtggatctcagc

SEQ ID NO: 102855 - DNA, 1060 bp, Homo sapiens
cgtggtggctcacgcctgtaatcccggaactttggaaggccaaggcaggcgaatcaggaggtcaggagatcgagaccatcctggctaacatggtgaaaccccgtctctactaaacacacacacacacacacacacacacacacacacaaagtgctgggattacaggcgtgagccaccacgcccatccagacatgttacatttcagatcagtggttacccaagtggagatcaggaacctggagtgctggtgacttagtactgggagtcatgggatacaaatggcatttaaaattaggagcctaggcaagattaccctgggcctgagtgtagctaggggcccaaggtactgatctgacccaagggaagggtctggcagaagagacggaagggatcaggtagggctttggacctctaggcttgatggccacctgctgctgggcctccgaggggcctggaggcggtggggaccgaatatgcagagagaatgagaagtgagcgagtagaacgagagtggtacatggctttgaaggcatctgccacggaggcgggaagggatggggtggaggctcatgagacttgaagctctaggaggacgttgaaaaagacctgagcgctggccgggcgcgaagcctcaggcctgtaatcccagcactttgggaggccaaggcgggaggactgcttgagctcaagagctccagaccagcctgggcaacattgtaagagcctgtctctacaaaaaattaacaaattagccgggtgtggtggtgcgtgcccgtagctactcgggaggctgaggtgggagaatcgcttgagcctgggaggtcgaggcagtagtgagctgtgattgtgccactgcactccaacctgggcgacagagcgagaccctgtctcgaaaataaataaataagacctgagaacccagtatgggaatggccctgagccgtggctaggggggtagacaaggcggtccagacagacccctcaagaagatggggcttcgaggctgagggagctcggccccgaaaagacgcctgcgggagatggcacacctagctaggac

SEQ ID NO: 102856 - DNA, 1965 bp, Homo sapiens
gcctgggcaacatggtgagaacctgtgtctacaaaaaagtgcaaaaattagccagccatggtggtgtgcacctgtagtcccagctacttggaagctgaggtgggaggatcgcttgagcccaggggttggaggctgcagtgagccatgactgaaacactgcactccagcctgagtgacaaggcgaaaccttgtctcaaagaaaaaaaacccaaaccatttacttactcattttcacctgtagtttttgttgtttatacataactacagtaataactctgaacatattttgaaacctatgtatccacaaatatcccccaacttcctgagacaagatgaggagctcttcctctcctaaagtgaagcaagaccccttcacaggcctctaacctggaagcagccctgcaagaccacagtgttgttaccaggtggcgcctaagcaccctggtgatgctttctgttctgtcttcccttcaggaacattgttccatggcttaagaagtacgggaccaaccccagcaatggagaggtaggtggctgtgcaggagtttcagtgatgctagtgaatgctatcctctcacttctccttttgttctggtggttttcatgaacacaggaacatgggagagaaccgttcatggggcccagtgaggagggacagtcttcccctcctctccccacacccattcttttccagaaatgcttccggcctgtgcacgtgtatatatgtgcatgtcttttcttgggccatagctgtgacctcgtcttaacttgattctatctgcaaagaccctatataaacctttgattatatccaagtcaggccacattcacaggttcccagtgagcatcagttttgtggggacattatgcagcctggttccgagggagatctagtgtattttaccagtgaccttgcccttcctgttggaattacttgcatgtattcctccacctctttcctatggcctggggcaagagctcaaactgtgcgagacggagggtcgggactccggtgggctccctgtgctggagccgctgggagggagctccctggacaatatgaccctccctaccgggccagcaggagaagctggcagcccatctgtctcagctcttctggcccttgtggtgttctgggggctgcagggttctggggactctttgtagatggagttggtgctcctccaaggcttccctgctctccagtacaaggggaacttggccagggggctggtttttgagtgttcttggaccagcgactaaagcccgtggcttttctctttcaaatgcttgggtagggggcttgtggcctcacctccttagggagggcactcttcttccttggtctttgtcacttgaagactgtttctgtgatgtctgctgctgggagccacattggatcccaggggcttcccccaaggtccgtgccccagtctgggaagtcattctctgttgctcttctcagcagaggtccctgctgcctgcctgtgccctgtgtggctgggtgtcggcctcagggagcagcctggtggcaaggtgggggtaggtggggttttcctgtccacagctgccctcatggcccctgctgtcccagtggattctgtcatttggttgcagctgggatgcattttgctactttgggtgttttgcttcacaggtactctttggggttcccaaacttgtcgattgtgctggcccccacacccacaaagtctgatctggcagttagccacgctgttagggcttacatcagggaggtgtggccatttctttgttccaggcatcatgttggggtgagtctgcaggagcgccctacacgtctttatcctgtgcctgcgcctctcccttggcctgctctggaagggaccttgctgtgtgcttgcttggccagacctatgggtgtcagcagagccttgctagccaaacctctgaggagagttcctgggccaagggctggctggccca

SEQ ID NO: 102857 - DNA, 1176 bp, Homo sapiens
ctccagcctgggtgacagagcgagactccatctcaaaaaaaaaaaaaaaaaaaaaaaacagagcaaaacaaaaaaaagacagtaggcaggcaaggggatgggcggttctgaaggaagagctgaccagggggctggcggaggatgtgggtgagaggaggtagagctgtcagggctggaacatgggttgtttcctgccgagggccaacttcagtaggaggaggaggctagcatggtgatcacccaggggtgggctggaggatctgaggaagacgatgccgggattgggtcttgcaggatgaataggagtttcctaacggtgtggaagggcttgagggggtgagcagctgtccccatggttccctgctctggcagctgacatggggttccacctcctcccatcgctgactttggagttctgtcctgccctggccctctgcggtcctcactgggatgttcacagcccacagaggtgactggcctccctgtgtgtgccttctctctagggaagtaccactgcccagtgctgtttaccgtgttcaccaacaacacccacatcgtggctgtgaggacgaccggcaacgtctacgcctatgaggtgtgtcctcgctccggggcgtggagacagcggtggggagatctctgctgtgtgttcctagtatacactggctgggctgtgtgctacgtgtacggcctgtcctcgtggggtttacagtcacagccacaggcatggtcatctagcaaagctctggcagtgcagcctccccattttcaggcaggtcaaaaaaagggttgggggaggtgcatccttcggaatccaggcagtcctggctgcccagcagggacccttaaaccccaagaggtccttccgcgtcttcagcaaagcccaggtgctgggaaggcacccatgttttgaggacaggcctctagggctgtgaggggagtgctcgccccggatctggatggagtcacttgcccccaggagggagctgtcccctggaggagttctggcagggagtgggtgtagggagaggggagacagccgtgttcacacatgggtcctcctcttgggtgaggcggggcaggccccacatggcgggaaagccgacctttgcgccgttgtcaatcctgcacctggacgtttgtggggtgtaggtggccagcgctgctccaggggcc

SEQ ID NO: 102858 - DNA, 1763 bp, Homo sapiens
ggcgtgtggttggcttctaggcaagcgacacgtccccacccaactgcctcccatggcactgctgaggtgccaccctggtttccttggcaggcccactattccacagggaaggtcagcgcttccttcacctccaccgcgatggtcccggagaccacacatgaagcaggtagccaccttggcctctgtagccacctgccatgtgacccaaaagtggcagggggtgggtgtgctccccgactcccactttattggtctgtcaggggctcccactgtcacctgagcccctagtcctccccctcttagctgctgaacccctgccagccccatgaggctggggtgagcctgtgcgtggcctaagcagaccctcggcctccagctcccctgctctccccagagctggagcctagtccccgcctgtgtgtctgaggtcggtgctgcctggcatggtggggctgccccagggtgagggcaggggctgagctgggaccttggcttgtagctgccatcgacgaggatgtgctgcgctaccagtttgtgaagaagaagggctacgtgcggctgcacaccaacaagggcgacctcaacctggagctgcactgcgacctggtgggtgtggaggccagccactccccatgccccaaggtcatctctgggtcatctgacagccatgtcttaaatatagggctgccactggtatgtgcttgttgtaggaaattcagcctgtcactaggcgggacccgcagcagtgccctgtgtccttcctagggggccgcgttggcagcatggcctgcgcacaggtgccagtgtctcagagaaggggccaagccgcacctgctgctctgcccacacttctcccatgcgctgtactctgggccgtgcggctgcacgggtcctgttgcttaatgttgtgggtccatccgtgcccagtgtggctgggcagctgactctgctacatgttaaagaccagcctggccaacatggggaaacccgtctctactaaaactacaaaaattagccaggcatggtggcgcatgcctgtagtcctggctactcgggaggctgaggcaggagaatgtcttgaacctaggaggcggaggttgcagtgagccaagatcgcgccacagcactccagcctgggcaacagcaagactccacctcaaaaaaaaaaaaaaaaaaaaagcctcctgtggctgtggtgagctgcctttggcagctctctgcttcatacaagtattggggctatgttgcagacaccaaaaacctgcgaaaacttcatcaggctttgcaagaagcattattacgatggcaccatcttccacagatccatccggaactttgtggtgagtgacgagagtcactggctgcacagatgagcttggtgggacatcgggggctgggtgggcttgtccctgccccatcccagggccctggcccatcccacggtggccaggatgagtccagttggtgatcctctgttggggaacccatagactgacccttgaggccccagcccatccagaactgggttcacaaagggaggtggctgggagggcccctcattatcaccaagagcccagcccctgtgtggagccatctggcaggaggggtgtccttcagtcaggcaggcggtgggcctcgggtctcagagtgtgacttgctcactggcttttgttttcacagatccaagggggcgaccccacaggcacaggcacgggtaggtactggtgctgggcccctctctgggcactttggctgctccgtgg

SEQ ID NO: 102859 - DNA, 1037 bp, Homo sapiens
cccttgtggcactcacgtatttccacccgagcgtggtcttgcagttctcgcagtagatgtcggcaaccgcatgcagcccggtgagaaggaccctctcctctgcagggccgcagcccacgttcaccctgcggggacagaggggccactgcgctgcaggcccggcccgcccctgaccaggccctgccccctcagcgggccccaccccatcctcctaagagttcccccaaaacagggaaactcccagagagcagtgccgtgcctctcccccagccctgcccgccaccaccatcaatgggaaagatcagtgatgggacaggctagggggcaagatccttagcgcgtttcagaaactcccggcggggggatggtgggttctttcaggacccctaaagacccaggtgattctacacagggcactgtgtaggtgccatccaggccgtcccagggcccgtgccgctccccccgggctgaaccagggtactcacacggaattgaagaggtaggcgcgtccctggctcccctgaaaggactgaaagaagaaggtcccgtgagattggctgcgagtgctttctggaacgaagcggtgctgcccagaaccaggggagtccagccccgcggctgttagctgcgccgggacgcgtcaccgggagcagacaccggcgtcccccctccagaactccacttctaataacagccacttaacggagctgcaagctgtttttcattgtagacaggagtggctgattctgctgcgtcaacattctgcaagtgactattattgggaatcatggcaagatcagtttttaaatggtgagcttcatatgtctggacaactttaccttagaggagttctgagaggggatcacgaatgattttctctacccgaaaacccacagatcctcaaaatgctctcctcgccgcctcttctgcagcagttcagatgtgctcacgctgccagatattagggggtagggggaggtgtccatattttcccactgaaatgttttaaaagtcacagcatggctgagtatggcggc

SEQ ID NO: 102860 - DNA, 1022 bp, Homo sapiens
tgagcactgttccttccccgctctccctggcattctgtccacctggcacaccagccccttcatcgccacgcccagcagacgccccagttctcctccagctttgcagcctctgaccctgacgcactggcttccgtatctgcctgaggcctcctttccatctcgggacaccctggagggctccccggggaagtaatggggatgggacccacactcacctgccaggtggtggcagtgccagggggtaggtggagcagcctggggattgaggggaacaggctgtcctctacacaggtgccccagggatggggcgacgacccagtggggtggttgaaaaagtgaagggggcaccccagtctgcactccatcccatgaagtgtcagaagctgcttggttttgtttgcttcctcagtgtgtttgtctttagaagtgtgctaccggcaccatatggacatgggcctgattcacattctcttaaaataattttacaggcttattttaggagagaaatttctggattccagaaaattgtttttgctctaaaaacataccccacattaatgtctatttggggggatggatggcagctgccctccaaacgtggggacacacagtgtccgagagtggagatgattttcctggtgaattgcccagcattttcctttcagttacttacttcagggtggttccttatttgccaatagatcttgtaaaagcccatttacattggttgtttccaaacttggccatgggttccccagtgcaacagtggatctgtcatttaaagccaagttaaaacttaacatgacatgcctctcagtgaccacaaatacagccctggccactactgccaggacccctttgagggctagtgacaagggttgccatcaggactgagaccacatgaagcgcacgggaggcatctgtgcagtgaccagactcaaggcaggagacagggacagggacttgggggacatttgggacccagggcagcaggctcttcaggtaagattgccttgggggcg

SEQ ID NO: 102861 - DNA, 3657 bp, Homo sapiens
ctccaagtccacagtttggctatagttagcccattcttcttgccccacctcctgagtggcagatggaaaccacagctctgaaagtgctctgtgaaatagtaagtgatactctgctagattttcatgcactagtgttggatatcttacggtaaataaaggacatcttaggaacactgcagtcagcgtaggctgggggagtggcgtctttcctatgagtgttgtggaaaccacctcagaactgtctgagaggaggtgcctgtggagtgagggctgaccctggccccttcagaactgccatgtgttatccttgcccaaatgtgtccaaagaaatggccattttgcaggagtcttttttcccttttctgttttcataatgctattgctgctgctgctgttttaatgtggttcactgttgtcacttttgtgttttgtgatgctgatgatgatgctgttttcacatggctcactcttaactcagtggtctgtttgtgtttctataggacaagggctcagaggactggacgtgctcagacatcggtgttcttcttcccagttcttgacccctggtcctgtctccagcccgtcttggcttatccactttgactcctttgagccgtttggaggggcggtttctggtagttgtggcttttatgctttcaaagaatttcttcagtccagagaattcctcctggcagccctgtgtgtgtcacccattggtgacctgcggcagtatgtacttcagtgcacctactgcttactgttgctttagtcactaattgctttctggtttgaaagatgcagtggttcctccctctcctgaatccttttctacatgatgccctgctgaccatgcagccgcaccagagagagattcttccccaattggctctagtcactggcatctcactttatgatagggaaggctactacctagggcactttaagtcagtgacagccccttatttgcacttcaccttttgaccataactgtttccccagagcaggagcttgtggaaataccttggctgatgttgcagcctgcagcaagtgcttccgtctccggaatccttggggagcacttgtccacgtcttttctcatatcatggtagtcactaacatatataaggtatgtgctattggcccagcttttagaaaatgcagtcatttttctaaataaaaaggaagtactgcacccagcagtgtcactctgtagttactgtggtcacttgtaccatatagaggtgtaacacttgtcaagaagcgttatgtgcagtacttaatgtttgtaagacttacaaaaaaagatttaaagtggcagcttcactcgacatttggtgagagaagtacaaaggttgcagtgctgagctgtgggcggtttctggggatgtcccagggtggaactccacatgctggtgcatatacgcccttgagctacttcaaatgtgggtgtttcagtaaccacgttccatgcctgaggatttagcagagaggaacactgcgtctttaaatgagaaagtatacaattctttttccttctacagcatgtcagcatctcaagttcatttttcaacctacagtataacaatttgtaataaagcctccaggagctcatgacgtgaagcactgttctgtcctcaagtactcaaatatttctgatactgctgagtcagactgtcagaaaaagctagcactaactcgtgtttggagctctatccatattttactgatctctttaagtatttgttcctgccactgtgtactgtggagttgactcggtgttctgtcccagtgcggtgcctcctcttgacttccccactgctctctgtggtgagaaatttgccttgttcaataattactgtaccctcgcatgactgttacagctttctgtgcagagatgactgtccaagtgccacatgcctacgattgaaatgaaaactctattgttacctctgagttgtgttccacggaaaatgctatccagcagatcatttaggaaaaataattctatttttagcttttcatttctcagctgtccttttttcttgtttgatttttgacagcaatggagaatgggttatataaagactgcctgctaatatgaacagaaatgcatttgtaattcatgaaaataaatgtacatcttctatcttcacattcatgttaagattcagtgttgctttcctctggatcagcgtgtctgaatggacagtcaggttcaggttgtgctgaacacagaaatgctcacaggcctcactttgccgcccaggcactggcccagcacttggatttacataagatgagttagaaaggtacttctgtagggtcctttttacctctgctcggcagagaatcgatgctgtcatgttcctttattcacaatcttaggtctcaaatattctgtcaaaccctaacaaagaagccccgacatctcaggttggattccctggttctctctaaagagggcctgcccttgtgccccagaggtgctgctgggcacagccaagagttgggaagggccgccccacagtacgcagtcctcaccacccagcccagggtgctcacgctcaccactcctgtggctgaggaaggatagctggctcatcctcggaaaacagacccacatctctattcttgccctgaaatacgcgcttttcacttgcgtgctcagagctgccgtctgaaggtccacacagcattgacgggacacagaaatgtgactgttaccggataacactgattagtcagttttcatttataaaaaagcattgacagttttattactcttgtttctttttaaatggaaagttactattataaggttaatttggagtcctcttctaaatagaaaaccatatccttggctactaacatctggagactgtgagctccttcccattccccttcctggtactgtggagtcagattggcatgaaaccactaacttcattctagaatcattgtagccataagttgtgtgctttttattaatcatgccaaacataatgtaactgggcagagaatggtcctaaccaaggtacctatgaaaagcgctagctatcatgtgtagtagatgcatcattttggctcttcttacatttgtaaaaatgtacagattaggtcatcttaattcatattagtgacacggaacagcacctccactatttgtatgttcaaataagctttcagactaatagcttttttggtgtctaaaatgtaagcaaaaaattcctgctgaaacattccagtcctttcatttagtataaaagaaatactgaacaagccagtgggatggaattgaaagaactaatcatgaggactctgtcctgacacaggtcctcaaagctagcagagatacgcagacattgtggcatctgggtagaagaatactgtattgtgtgtgcagtgcacagtgtgtggtgtgtgcacactcattccttctgctcttgggcacaggcagtgggtgtagaggtaaccagtagctttgagaagctacatgtagctcaccagtggttttctctaaggaatcacaaaagtaaactacccaaccacatgccacgtaatatttcagccattcagaggaaactgttttctctttatttgcttatatgttaatatggtttttaaattggtaacttttatatagtatggtaacagtat

SEQ ID NO: 102862 - DNA, 1064 bp, Homo sapiens
ctcctgaagccagctttgcaaggcgggggaccagtatccctctcaggtccaccaccactctgagagtcccggcgtggcaaggacagtcacctctgtgcgttgttcatttgctccagacacagaagacacacagatgctccctatgtgcttatagcatgattttttttcccaacattcttttagtgacagttttcaactattctgaaaagttgaaggaatttaaagtagacacccatattcccaccacctagattatacagttaacattaacatcttacttgttttctcatagatctgtccatctgttcctctatccacccatcaacccatcgcattttatccattcattgcaaaggacgttgccaacgtctagactgacttacaatttagtcatctagaatatcacatgaatccaggggaagctggggctgggttggctgattaaactatgggataggttctttcataaacatttcattttggtgatcacaacagaattttgggaagtcagcatgcatccatgtttataattgaggaaactgaagacaggagcctttgagcacttcgctcaaaattgtacatcaagtggcaaaactaggcagagaatccaggtattttggacccagaatgtcattttcttgaaatgtttgccagcatgaaacagtggcaggctgcacactgcctgtgattagccttgctccttgggaaagttctcaggactcattcacaatactaaggagcattgtctctgagttcccagcccacacactggagatcaggagctctgaattggagagctcaggaggtaaaggtgtaataaaacatgggaacactgggagggcacggttgaccgtttggctgcagcaagaaaggcttagaaacatacaccccaggaccacagagcacagctgtggggcccctttggtagaggaagcaatgaagtgatatttgtagtggtggccgaaaggtcttaaaaaagggtcaaattatattcattgtattttgcttaagggggtcagttttagaaatgtttccatgggcaagtttaaaagctgatcatgcct

SEQ ID NO: 102863 - DNA, 1017 bp, Homo sapiens
gagtgtgggcacaactctcagtctctctctgtcacccagactggagtgcagtggcacgatctcagctcactgcaacctctgcctcctgggttcaagcgattctcctgcctcagcctcctgagtagctgagattataggcgtgcaccaccacactcggctaattttttgtatttttggtagagatggggtttcaccatgttgggccaggctggtctcgaactcctgacctcaagtgatccgcctgcctcagcctcccaaaatgctgggattacaggtgtgagccaccgcgcccggccatcaactcttaagtttttatgagacatcagtcctgttgtaaattcagaatctgagcagtggtcattttatgaatcagtaaattactgccttacccataacaactttgactgttaaatgttttgttttcttttaaagcccatcgccgaagcaccattcaagttcgacatggaattggatgacttgcctaaggaaaagctcaaagaactaatttttgaagagactgctagattccagccaggatacagatcttaaatttgtcaggtacctggagtttaatacagtgagctctagcaagggaggcgctgccttttgtttctagaatattatgttcctcaaggtccattattttgtattcttttccaagctccttattggaaggtatttttttaaatttagaattaaaaattatttagaaagttacatatattctcctaggaatctctctctcgtttattagaaactccaagtacctcctttactctcaagggtagtgaatgtgattatttggaaacaactttttcatattccagattgttcatctttgggttctcatcctttccttgctgcctgtccagagcagtttcacagttacatgagcatctctctggaaagggttcgcctcaggactccctcccatggaaagcagagccaccagttaaataaatttagtattagagtcctctgtgcctgccccttcagaaactcctagctgggacctgg

SEQ ID NO: 102864 - DNA, 1078 bp, Homo sapiens
gtgaaaccccatctctactaaaaatacaaaaaattagccgggtgtggtggcgggcgcctgtagtcccagctactcaggaggctgaggcaggagaatggcatgaacccgggaggcggagcttgcagtgagccgagattgcaccactgcactccagcctgggcgacagagcgagactccgtctcaaaaaaaaaaaaaaaaaaaaaaaaaagaaatgatcattgtcagaaaagacgcttcattaagtagtgccagtgtttttgtttgcggtctgcaattgtcagatggtcggtccctatgttcacagtctcgggaggcttggagatatagtcagcaccctttgtgctggctgctctctctgtagtcatgcttagctcagttgttttgtgggtaagttacttaaacaggaaattgaagtatttctgtgactacttctgctctcactactgcaaaacctttctctttatagctctggacttattggacaaaatgttgacattcaacccacacaagaggattgaagtagaacaggctctggcccacccatatctggagcagtattacgacccgagtgacgaggtaagagctcatgttcctggctgctgcttcagggacatagatcagccagcagtggaccaaccatatcttgcttagattttcctgagatatacctgctgccatacccggttcttccaacaagcccacctttgccttgaggacgagtgctgtggggcacagcttgaaatccctccccccgtaactctgtctatctcagaagacttcctccaggccacctgcaacaggtaggggcggggtaaacgcatgtataaaggggacagctgcaccagtatggagcacagagggcatgggtctgagactggaggccattgtcatggtgtgacaggaagagacacctgaagtgaagtgctggccctgaggatggccggggtggagaggaggtgggcagcctgctgacagggacagcacacagagtggggagggaagtcaacttggacagtttccactgtggcttggcgactccatgtcgggtgtgctattccctagagacaaggacacgaga

SEQ ID NO: 102865 - DNA, 1010 bp, Homo sapiens
gagcccaggagttcaaggctgcagtaagctatgatcatgccactgcactccagcctgggccatagaacaaaatccaaactctgttttaaaaaacacagaaagagaaaatgtagtattctggaaggcactagggaaagtcaggatttgtggtcaggagtaatactagcctcaaagggacttccagtcttttaggggaaataaaacctgtatccaagtaagcatccacacaggcagccatgattcacaccatctgagtgttaccaatgaatgcccatgtggcgtgggaggagggagtccggacattcttgactgtgggatccgcacctgccagctgcttcccggttctctccttttctccttctgtagctatgaataatgtagaaatagcacttgcagtaacagaaggctggagatctagctacttttcaagtagcaaatctttttttaaaaagctgtcttctttgaaatttatgcctggaggtttaagggcctagaatttatttaactttaaggaactaatggatctgttttagaaatgcttaagctgcaaaacatccagttggcttggagtgcctgtctacttaatacgaacaagtttgagtaggacccttctgcccccagtggtttagaagtaatactgttagaatcttattgtggtccaggccttctggacttttcttagcacagacagtatctaattgggtgaaaagccaaatgacttaatctagtttcaagaaagtccttgagaaaatgtctgtgagttctatgtggggagggctggttgggagcaggaagcaaagtgggatttattacctatattatagaccacaggaatctttttttttttttttttttttttttgagacggagtctcgctctgtcgcccaggctggagtgcagtggcgcaatctcggctcactgcaagctccgcctctcgggttcacgccattctcctgcctcagcctccgaagtagctgggactacaggcgcccaccaccatgcccggctaa

SEQ ID NO: 102866 - DNA, 1026 bp, Homo sapiens
caaagctttccagaagctgttgagggccttgatgaggctgaaaatcttgagtttttgtagaacggtagttactgatagtgtgctccttaaacacctgagatccccaggatcctttcagggtgtccacaaggttaaagctgttttaataatcttcttaaagagttactcacactgctctctatgttgccatcagcacttgtggcacaggagcaatgatgagcagagtccccagcaccacaggcaggtcaaggcagtggaactagagaggttactgagctctgcactgccacacccccactgctcaaaaccagtgccagtaaaaagtactcaccatattaaatccatccttaatacatgtcttcacgatgtctgtgtgacaaacacgtatagcatttctgctgcatactgaatgcagtggttttctcagggaaaagcacttatgtaactatttgagctatgagcagaattaactggtttttaaatcgtccctcagttttgatgagtataaagagttctgagatcagaaagtttgagaagcactgtcgcactggcacactttgcacagttcagtcttttctctggccccgcacagaaacatgagttgaggatggaagtgacaggttgcagcattgattcagggtcagagtttcacgaggcaggcaagatagacatgaagaggcactgtggagagccagtcaatggctttccccaggtccaggacagggcaagaaggaaaaaaggatgatggattagaagaaagggttggaatcaggttgttacatactatttgaagttaaagagaagggccaggctggccaggcgcggtgggtcacacctgtaatcccagcactttgggaggccaaggcgggtggatcacgaggccaggagtttgagaacacgctggccaacatggtgaaacccccgtctctactaaaaatacaaaaaattagcctggcgtggtggcaggcacctgtaatcccagctactcgggaggctgaggcaggagaatcgcttgaacccaggagg

SEQ ID NO: 102867 - DNA, 1013 bp, Homo sapiens
gacggggtttcaccatgttggccaggctggtctcgaactcttgacctcgtgatctgcccaccttggcctcccaaggtgctgggattacaggcgtgagcaccgcacccagcactgttatttttcttttcttttttttctttttttttttttgagagggagtctcactctgtcacccaggctggaatgcagtggtgcaatctcggctcactgcagcctctgcctcccaggttcaagcaattctcctgcctcagcctccctagtagctggggctacaggcgcgcaccgccacacctggctaattttttgtatttttagccaagatattggccatgttggccaggatggtcttgatcccgtgacctcgggatccacccgccttggcctccaaaagtgctgggattacaggcatgagccaccacatctagccagttgtttttatatttttaagaaaacatacataaattcattcattcagtggatagatttgagtgtctgtttggtgccatcaaggcttctaaggccctggacatacatagtaccagcaataagagggattaagaacctgtttggagatgggaagtctgaggactcattaaaaaaaaaagagagagagagctttcttacagaactgatagtctagatttgtcaggaaatgaatggaagacctcagggaactcaagagattaaaaaacttacaagctagaatttttaatgagagttcacagaaaaggaagatgaaacagctcttaaatatataaaaggtactcatgtttactcattatacaagatacaaacattgaaaagtcagtaattcttttttttttttaacgccctcctcaacagagtagcagacatcaaagtttgacaccctactgtgtggtcaaggctgtggggaaaagggtgttttcggagagagctggtggagtgtaaactggttgagtctctgtagaggacagtctggcaattctgtcacatgtcttttgttccagcaattctgggtattgaacttttag

SEQ ID NO: 102868 - DNA, 1612 bp, Homo sapiens
ttcaaaaaaggacggatgtatactttggaaattctaatttaataagttaatcaactttgtgggtttgttgttgttttgagacagagtctcgctctgtcacccaggctggagtgcagtggcacgatcttggctcactgcaacctctgcctcctgggttcaagcaattctcctgcctcagcctcccacgtagctgggattacgggcacccactaccatgcccggctaatttttttgtatttttagtagagatggggtttcaccatgttggccaggctagtctcaaactcctggcctcaagtgatccgcccgcctcggcctcccaaagtgctgggattacaggcattagccactgtgcccagcccaagttaatcaactatgaagagaaaaataaaatcacataatcttggttgttcagcctctcataagaaagccaaattgttttttgcttttccatgttgtttacttgtatttctgaattgtagagtcaaaggagaagttcagagtcccatcagcaatgcacctgtcatacaggaagatctcatcatgtcctgtaacaccagataccattttcagtcttttctctctttctcctgcagggctacaccaagtccattgatatttggtctgtaggctgcattctggcagaaatgctttctaacaggcccatctttccagggaagcattatcttgaccagctgaaccacattttgggtaaggttcccgagcccttcaggagctagatttactcaagtttgtacagcttacatcaaagtcacttcattaaattaagaagagttctaatatactctttaacctgtggtaggtgtgaatttttaaccttctctgatttaaaatgttaaggacttttgtgtaaaaacataagaaaggtaaacatcaggagtggtgataagcaacggctcatatcaattatcagggttcattccgactcagagttgatggtgtgtagtcatttaccttggtcctgataactaatagctaatttttttatctgataggtattcttggatccccatcacaagaagacctgaattgtataataaatttaaaagctaggaactatttgctttctcttccacacaaaaataaggtgccatggaacaggctgttcccaaatgctgactccaaaggtaaatgttatttcgttgattagttttttcttaggcttagcttcgcgtttatttgttaaattgttaggtcactagcctgaaaaatgagcctatggctattggataatgctttctttagtgctcactctgaattgttgtcttccccctttttttttttggaaacagtggcagtgcagtaagggaacctggtaatgacggtctagttctccaccttttggtttctttgctaattttaatttgcattaaggtcactttttttttgtttttgtttgagacagtgtctcactctgtcgcccaggctggagtgtagtggcccgatctcggctcactgcaacctcctcctcccgggttcaagcgattcttctgcctcagcctcccaagtaactgggactacagacgcgtaccaccacgcctggctcatttttgtatttttagtagagacagggtttcaccatgctggccag

SEQ ID NO: 102869 - DNA, 2919 bp, Homo sapiens
aagactctgatagatacaaatgaaacacgtctttggggcatcctttgtttttgaaaatctgaatttacacagcccaaaaggtatattttcttgtaccatatccttatttattttcctttgtatggaattatactgagtactactgcttttttattttgtagccttggcattgtattgattagtgtcatgtaaatttggttagtctttgattttatagtgttgacagaccttaaaaaaaaatcatggccaggcatggtggctcacacctgtaatcccaacactttgggaggctgaggtggttgaatcacctgaggtgaggagttcgagaccagcctggccaacgtggtgaaaccccatctctactaaaaatagaaaataagccacaccatgatattggagggccagatgatgaaaggccagtagatgcttgagaccggagaaaatgagaaactatgtattttttaaaaataaaatattcttaagtatatgaaactttaaaaaaaaaaagctttgggagtaggtttgactacctagaagaaggaagtgggaagaatctttggaaatacttatatttatagactaagtagaagactagcagaaagtagagtctgagaatagaaggccagtgcagatcttcacagcagtcctgagagctccagcaggacaggctgagaaaagggtactggttggttttggtgactactcagaacagtttttgtcaattcacctattgagattgctttgtgctaagcagataatgaaaggtagggatgcttcttaaagtgtgctctgtaaagacttcttcagcctgcatcctggtctctaacatgttgattgcttttcaggttgttgggaaaattaaataatgattttctagaatgcccagaaagtatctgccacttagtagcattattattcctattgccttttttatttttgtgatgttttgatatgaaaggttagaatttctaagaagttatcctgttttttttctctcttagatctgtgactttggcctggcccgtgttgcagatccagaccatgatcacacagggttcctgacagaatatgtggccacacgttggtacagggctccagaaattatgttgaattccaaggtaaggatgaagtttgcataaaaagaaatccagtaagtaagagaactttctgaatgcattgcagtaagccgtaagtctccctctgcgttgagagtttgcctgtctggccagagacaaggtgctgtcttttttgagacagggtgttactctgtcacccaggctggagtgcagtggcaccatcacggcttaccagtctcaacctcctgggctcaagtgaccctcctcacctcagtctccggagttgctgggactacagagtgcaccgctacacctggctaatttttttttttttttgagatggagtctcactctgttgcccaggcagagtgcagtagcacaatctcagctcactgcaagctccgcctcctgggttcacaccattctcctgcctcggcctcccaagtagatgggactacaggctcccgccaccatgcccggctaattttttgtattttttagtagagacggggtttcaccgtgttagccgggatggtctctatctcctgaccttatgatccgcccacctcagcctcccaaagtgctgggattacaggcgtgagccactgtgcctggccacatctggctaatttttaaattttttttgtaaaagtagggcgtcttcctatgtcgcatgttgcccaggctggtcttgaactcctgagcttaagggatccacccacctcagcaccccccacgccccccgcaaagtgctgggattacagggatgagccaccacacctggccccaaggtgctgtctaaattttgttcggcattgaacttctgggccctagggctcagcctctctacctcagctgatatagtgctgacggttgtagagtaggagggggtgtgcctctccagtcactgttaccataagtggtctgtgtttcactccttggacagctgtcctgaagtcctacctatcgctgtcactgttaggtgcaggctgggtttgttgtagaggttattcagtaatgtgtatttctgtgaacatgggccagggctattctataaaggtcaaatttatctgataatgaagaatgtctcttcggcagaattatattgtaatttgttgtacttgaagaaaacataaatgtggacagagtaggaactgccgtggattcttttgaaattacgtgatttcctgcttccaaatgaagtgctttcctctgcatctgtgagtggctatagagagtgcatccaggtctcatccacactctactagcaaggtctgtgtcttggtcataagaaatggttgaataagtttacaaaagcccagaaaagtgaagtctgacattttttgttgggtttatgagccaggaggcaaaaattgagggctgctatggagattgagattcagtatttttctgttatttgcaaataatatatgaataaggtgtgaaaattgagtagttaagtaggcctgacatactacctgtatctagtatctcaggattataagattcttaaacacagttccctctgctgtcatgtaaagatacttgaagaaaagcaataaaaatagacattggatcttgtatctagggcccaggaaccagaaatagtcctgagaggcttagtggaaatgaaagaacaggtctaattagcttatagtcttctttttcttcctccatcctttattactagtacagataagctattagattttttcataaggaaatggaatttgtttaaagcatttagtttttcttgatatcctacatttgttcagtttagttataaaagtaaaatctcattaacataaattccattataaagaaggatttggtgtaacagatg

SEQ ID NO: 102870 - DNA, 1164 bp, Homo sapiens
tgtttggcttttgaggagcttgggagaggaggggagcggcaacaagaagtaaaaagaatagtgacattacaggttactggaccaaacagaggagggagtatctgctacttacaggctaacagtgtttccagcaaaccttggagggggttcgttgatggtggacaatttagagagcaaagaggttgagacttcaagattgaccagaatttccctaacagcctgtttcagatctcagtctaggcccatagccgcatcagtcagatgtaatgctggaatgcctgccatctcacaggacctaaaaggagttaacgacttcagattctttccatgaaggaaaccaagttttcctcagtttcttctttcctttaagggcttcatggtgtaatgatggactgtttgggaagagagtcaagagaggatgcatttttgttttcaatgctttgctaaatgtgaccagctaattggtgttttaccttaacctgtgcaaacagatatatagtacaggacctcatggaaacagatctttacaagctcttgaagacacaacacctcagcaatgaccatatctgctattttctctaccagatcctcagagggttaaaatatatccattcagctaacgttctgcaccgtgacctcaagccttccaacctgctgctcaacaccacctgtgatctcaaggtcagccaggttatttactattaaggtgatatatattgaaaaaccctttcactgaagcatagttatatttgtcattattcatattttaaattacaccagaaatacccaaaaacatgtttatggcaaaaatgctaataaagtgtggtagtcctcttcttcttccttatcccattgctcctttctccccagagataccttttttttttttttcttaaagacagagtcttagtatgttgcccaggccggtctggaactcctgggctcaagcagtcctcctttcttggcctcccaaagtgctgggattatgtatgtgggccacagcaccaggccgtgataactaactactataacaaattggtggccagttgcggtggctcacgcctgtaatcctagcaccttgggaggccaaggtgggccttatcacctgaggtcaggagttcaagaccagcctggccaacatggcgaaaccccatctctactaaa

SEQ ID NO: 102871 - DNA, 1892 bp, Homo sapiens
actgcacccggccctagaagcataaattttagaataaagttattttactgctttctattctagcacttaccccaaggaaacaagaaatgttgtcttactgcctgtcaatgttatttgattgctttggtcagtgggccagatgttgacatttattaatatgaaaatttcttatacacaagattgtaatagaatgtttatcataaagatagtagtaatactcaagattcaaattcataaaattgaaggtataatttttattattgcttttgcttataattctggtttatcagacattaaggacaactaggaaagaactgggccccatgttattgccacaaatatgttttttgaagaatacttttctaggttttgttataaaactacccaaacatcttgattcagtttcttgggggaagaaatggtcatgttgttttgcaagtgagagaaacaaagttaatagaagtaatcaaggtgttctcttgggtccatttttgttagggataaagatgtacagttgtaggttatttgaatgtttcttctgtgtcagaggaatttgatacaacagtaagaaggtgtttcagagacagaagtgattactctcaccagaatgcagttgctgtttaagacaatgggagaatgcttgtttgtgtatttctgggtttataaaggcaagactttcacccagttaacagggctaggttctctgttagttttgagagtcactgtgtgctctctcatgtcagttgcatccatcctccctagcttgaggcctttttgtggataatatacatgctgccttcacgggtatgaaacaggtgtttacacagtgttaaaaatataatactttaccaacttgccttcttcaaatattctgagggctgtttttaatgccatctctctctctcttttttaagctctgcttatgataatgtcaacaaagttcgagtagctatcaagaaaatcagcccctttgagcaccagacctactgccagagaaccctgagggagataaaaatcttactgcgcttcagacatgagaacatcattggaatcaatgacattattcgagcaccaaccatcgagcaaatgaaagatgtgtatcctttttaggcaactggccaattccactgcttggtaaccttgttgagtaaatagaacttgaaatttcctgaacttaaaggaaaagtgcattaaacatgctaaagggaaaatcgtaatctgtttgctatttactccctaagtctagtcatggaaaatcttggttaactctgtttgcagtcatgtttcttctgtccaagggatggtttgttgtgatgatgaaaaggtaaagggaagatcagtagtagactaagaaagagggtgccctggctatctacctggtgaaatcaggactgtcctgatcttaagagtcaggttaccactttaggtctcagtttccccacctttaaaatgaaggaactggtcgtcatgatctttaaggtcaactgaggtctgaaattatgtgattaactctgaccaacatttagaaatctggactgaacagatctagaggatgctgcctgggtaaaggctccatttgaaagatagagaggttaagtatactgaagaggatctgccagaagggaaagggttatacagcactcctaccagtttacccaatttgtattccgcccctccagggtgcgggagctcgctgtttctaggcagccctttccatttttaaacagctctgttaataagttgtagtgatatttgaagtgaaatgcctcctgccactaccacctgttggtcctgctttactttttgccatgaaaataagcctctctcagatgacagatttttaaatcatgtttcctttgaatcccatgctgcgcctcctatagcataaatct

SEQ ID NO: 102872 - DNA, 1072 bp, Homo sapiens
gctcactgcagcctcaacctccctggctcaagtgatcctcttgcctagtcccccaaatagctgggactacaggcgagtgccaccatgcccagctaatttttgtattttttgtagagacagggtttcatcatgttgtccacactgatctcgaacacctggattcaagtgatctgccctcctcaccctcccaaagtgctgggattacaagcgtgcatcaccatgcccacaccaggcctaatataccttcttaatgacctggaaggttgggttcaaatagaaaatactcaggctccttagagttctatgtcagtagttccggcagagcagaccttcagcatagtgctcttcccttcccagccacagcactatccatgtgttgtgagcttgagcacgtgtgtggcctcctgcctgcacaatgtaggtgcaatacacgccagcaagcagctgcccctttgaccaccacctcaagtgcacctgctgggtacagactacacttttccagatgcagggaattcccgggcacctgaggagcattttccccgaccccaataaccttctctcatgggcatgggcatgtctgggtgagggttagtggccagtgaccacagatgtctcagtctcttacctcgcctcctgtttcctctttcttttctttgcggtcttgcttttctgtcagaagcctactcatccttcaggataaggcttttgcgggcctcatcttcttttaatccttcccttagtatttgaagttaacccagctcctccttgggtttcagaagtgctttaatgtgataaaaggcaaagtatgttctctgttcctgtctccttctctcacaaaattgcaagtttcttaagagcaggatcattatttgtttttgccaccagtcctaacatgaagcctcacaaatgggaagttcttgacaagcgtggcttgaattcaccagaactctgtcttcatttcgtgttgttgtggtaaccctatcaaaacaggaaataaagctagtttagcatgacttgttcataattgactcatgctggttccctttccttccctaagcaatcataaaacatc

SEQ ID NO: 102873 - DNA, 1053 bp, Homo sapiens
aagacatgagctatttagaacatacagttgtgtccttgaggaatttcatctaattggatggagactgcttgaacaggaccctgctgggacatgtgaggtttgtgaaataagcacccatttcttgtgagcctgctctttgcccatttatccagagctgtggctccccttcattctgagttggctgaaagggctccttgcctccgggtgacccagtgcaccatcctccccattccattctttcaacaaactgctacctgaggaaaagttataaaaatataaatgttgccatgcttaaagtctgtgcttagcatcctttggtggcttcccaggataaaattacgaaaatataaatatggcctggctcttgctcaccctccagcttcccctgtcatgtccctgtgtgtccgcctctctgcaggcactctgtcgccccaggttcccacaggcctctgcaccactgccccacatctcctctgcctggaatttactctcccttctcttccccctggttagccattggagccttctctttcaccctacccggtcctgcagccttcagcctcccctcccccagcccccgaccatggctttcataacatcctgtgcctctcagtttttcacctggatttaagtttttttcgttatccttgccttatgatcactctttaaaaagtagtcggctgtactctttctgctcctctccccatcctctccatttccttacttgaaccaaagttaccacacatcgtctggttgcatgcagattcagtgaatgctttccagttcttacttttctcagtctctcctgtttgaaatgccttccttctttgtcttgggaaacaccacccttttctggttctgctacatggttaagcagaactacatggcctctggagttggacaacaaaggttcttttttttttgagactagtctcactctttcacccaggctggagtgcagtggcacaattttggctcactgcaagctctgcctcctgggttcaccccattctcctgcctcagcctcccaagtagcgccagccaccatgcccg

SEQ ID NO: 102874 - DNA, 1077 bp, Homo sapiens
ctttccaagagttacctctttttttttttttttttttgatacagtcgcaatttgtcgcccaggctggagtgcaatggtgcaatctctgcttcctaggttcaagtgattctcctgcctcagcctcccaagtagctgggattacaggcacgccccaccacaccctaggctcactgcaacctctgcttcctaggttcaagtgattctcctgcctcagcctcccaagtagctgggattacaggcacgccccaccacgcccagctaatttttgtatttttagagacgggatttcaccatgttggctaggctggtctcgaactcctgacctcagcctcggcctcccaaagtgctgggattacaggcgtgagccactgcgcccggccgaattacagctattttaaagatcatcttcagtaactagtaactgggtcactgtggatatgtggatatgttgtctcttttttctcgtttctgtttccttgtatgcttggtaacgttcaagtgaatgctggatactgtgtatgaaaattgttgatgctctaggtgacatttttctccagagagagctctccctaatcactgataggcagatacagtggtgacagataaccataattcagtgagagattgagctgattcgagggttggttgcagttttttttttttttttgtattacacaccttttaatttgaattaattaggcatgatcattattgaaaattggtaaagtgtagattgataacaaccaaaacaggggaaaacattcatttaaaactttcccaaataaatgctccatgtataggcctctattaaaataataacaataaacattttttgaaccactttatatattttaagatttgtttagggctttttcatttgcacgtgaaaatattcctttttttttttttttttttttagtatttattgatcattcttgggtgtttctcggagagggggatttggcagggtcataggacaatagtggagggaaggtcagtagataaacatgtgaacaaaggtctctggttttcctaggcagaggaggaccctgcggccttcctcagtgttcgtgtccc

SEQ ID NO: 102875 - DNA, 1020 bp, Homo sapiens
gtttacttaacttttttaatcaagaagtctcctctacacttttggagctcaaagatgcaaggacagcagcttacatgagtaacagaagaatctagtgtttctgagcagagtttagagtaaaaggataagtcaaaacaaaattaatttttatattaatagcatccctaatgatgtattcctggtagttagctataaccattacaccattcccataatctgatttgtgtaaattcaagttgacttttccccaaaactgtatgtaatttattcctcaccttgctcacaatttatatacctattaattgaaaaacacctcattccccaacaaacatctagagctccttgcctccggcctactccacccaccctcttgcctaatcctgagatgctattttgctcccctttagatttgctttttttctttcacttcttgaggctcccacactgaaaggtgcctaggagctcatccagtagctgcgctgtctctgctccctctaggaaaggccacctgcctgagctttgaaatggcccacaccgtaccagaaggaagaagagagattccaggaggattcagacgttacccaggctttctggaaactgagcagaaccacaggaggagaaagctataggcagctgaacaaaatttatgtgtttctatttcccctgctataacatgaaaggactgggctctgtctgtggttttcaaatctcctcctctcttaggggcttcaggcctcaccccaaatagggaaacttcacatacagcattctctcccctaatccctgttttttctattctttgctcttctcttatctacctccttcccctcccgtttcccttcttcctctgcccttagtcttttttctttttcttaatttccttttagtcattatcatcttcagttcacataggtagtaactattagggttagcagggcaagatcccatttggaaaaaggatttgattgctttgaaaatgatgttgggcaacccacaggatagatggtctccaaggtccct

SEQ ID NO: 102876 - DNA, 5413 bp, Homo sapiens
gacggttttttttttccccccgagacggggtctcgctctgtctccaggctgaagtgcagtggcgtgacctcggttcacttcaacctccgcctcctgggttcaagcgattcttcttcctcagcttcccgagtagctgggactacaggcgcgcgacaccacacccggcccatttttgtattttttagtagagacagggtttcaccatgttggccaggatggtatcgatgtattgatctcgtgatccgcccgcctcggcctcccaaagtgctgggattacaggcgtgagccaccgcgcccggctgatggtagtttttattagagcaaactagcgatagcattttgtgctggtgaggacttgtggaaatagatttccttaaatctgaatcttgtgaatgtgtcttttgtgttgactgaagaaagtaaactaataatttattgaacccttcgtggcaggtactgtgctacatatattatttcattttatttgagcagccacattgagggaggaaaagatggtgttattccttttttcaggtgagaaagtatttcgaggtgaagccaattcttgaggtcatagaactagagttattaagattgtagactgagattctactagacacactgtagctcttttcagctgtttttaggaaaacactctgcgttccttagtgtaattaatacttgcagaattttctgtatcttactgttataaagtaaatataagtctgtttcggaaatgtattcaaatttcaatcataattttagaaatgccatagaaggtatgttttaccaagtattgtagctagatagaaagattagttaaaattctttttaaagagattttaattgaatctttaatgttttcactttgtttaggagcaaaatgctgaatacaactgtgaaaattaatgtgaactcacaggcttaggagccaagacagaatttaaattaggtcgagcctgaaagaaataaggccctaaaaagtaatggagagaaagtattgccagtagcatcatttctccaccacacatcgcattgctgttgcactcactgggaagtgtgccagtgaacatgtctcattatgagaggctcagaatttcccatcacatcctttggcccttttaacaagattagcttatctaaaatgtggactgaaaaaagtattttacgtttaggacatgtcaattgaaaagatacccccatctgataagatttctcctgtctgataaggtttttactagtctgaagttgtttagatgtgggaactacttctgtcactgctgtaggcttgtttgaccttctgactctccatttgaaatgctaagtcccctttttgtgattgtcgtttcctaagtgaaatacaaatgtaattggaatttgaatccaagatccagattatagccttttatcaggttgatgaaataccctgctgttaaccttctccattgcacattattagcatttaataaatattggctaacagtgctggatttatggagggctcgttgaaatattcactaatatttgaatggtgatcttttaaaaaatgcttccaaaaggatttatggatttctagccattttttagatttacccccttctgtttccttatcagttcattaggaattgtgactattttgtttagagtcctttcctaatgattatgtagaggatgtaaagatgaagagtgggatttgagttgggcctttaagagtgggtgtgattttgatatgcagataataggaacaagtgacagcttgagctgtggaatctaatcttggaaatgtacttaggtggcaaactgtagaggactccaaaggcaaaactaagtttgactgtatatttgttcagtggaggaagcatcttatttatttatttatttgtttatttttttttttgaggtggagtctcactcttgttgcctaggctgtagtgcagtggcatgacctcggctcactgcaacctctgcctcctaggttcaagcgattctcctgcctcagcctcctgagtagctgggactacaggcgcgtgccaccatgctcagctaattttttttttgtatttttgtagagacagcgttttgccatgttggccaagatggtctcaaactcctgacctcaggtggtccccctgacttcagcctcccaaagtgctgtgattacaggctttagtcaccgtgcccggcctttttttgaaagaggcagtcatacatggtcaattttgaaattttttgggaagacaaatcaacactagtgggaatgaaggaagaagaaccggagtggaggaataaattaggaaagcctaaccacctagaggtgcagtaataaagtggcagcggaaggtagcagatggaggtgaggagttttgtattgacagaaatagtaacagggacccttgtgggaagagtggtaaaaagacttttaatcatggcaagtctgagtggaatcaaaggattatgagaccttaaagggtaagagaccaagagaggtgggatttggatttggagggatttctgagatagaacaaggcttgctggttgattggctatgggcggttgttcattctgaggcctctaggttgggagcctgggagatggtggtgccattatccaagtaaaggaatactgttagagcagatttgtcagggggaaatagttctggtttgaacttaagtttgtaatgcctgtaggccattcaggctatatccagaaaccatcttaaaatttgtaagaggggagcaggagctggagatgaaaatttgtgtaaatggtagttaaaatcttgagtggatgagcacagattcttatctgggtcattggttaggtgaaattgcaatcatggccaggcgcggtggctcacgcctataatcccagcactttgggaggcccaggtgggcggatcacgaggttaggagatcgagaccatcctggctaacatggtgaaaccctatctctactaaaaatacaaaaaaaaaaagtagccggccgtggcggtgtgcgcctgtagtctcagctgctggggaggctgaggcaggagaatggtgtgaacccgggaggcagagcttgcagtgagccaagatcgcgccactgtactccagcctgggtgacagagcaagactgggtctcaaaaaaaaaaaaaaaagaaattgtaattatatgttttctatatttatctttttggttaaaaaatacatagcatttgatagattttcaaatgagtccattatcctggaaacattaagaaccactgaagtagaacagaggaccaaccaggtaactctggcaaagaagaggaaactgatgactggtcagatgtataagggaacagtgtagacggggaggagggagaggaggagagattgaaacactcttagtatgcttggtcatcttagactaagatagcaagtgtctattttggtttaattgagtttgaaatgctgtttctgaatgcgacaagagagctcatggggtcatcttcatagagatattaattgaagccttaagagtggataagacatctgagaactaagccaaaggagtgcctgcctttactgtgtcaataaaggtcaagttatggaagaggacagaggaaatgtggccagagagaccaaagaactgggagtgcacgttatcaaaggagccaagggagatggtactcattaagggattggtattgagtactataggagggaaacagaatgcagctgacaagccattatatttgttgactttcagctctttttttttttgagacagagtcttgttctgtcgcccaggctggagtgcagttgcacaatctcggctcactgcaacctccgcctcctgggttcaagtgattctcttgcctcagcctcccgagtagctaggattacaggtgtgtgccaccacacccggctaatttttttatttttagtagagacggggtattgccatgttggccaggctggtctcaaactcctgacctcaggtgatccccctgcttcagcctcccaaagtgctaggattacagtgtgaaccactgtgcctggcctcttttttttttttttttaaagcggggatgttcaacttgggaaagctgaatgaataaaagaaaaaagagggggatggtttcaactaaaatttcattgtgatcacattcctgatggtacaatgtcctcctgtcttgttaaggttattgtgattatagcagactagtagaactaccactttttcagcactcttgttttgtattttacatacattaatgctaagccatataactgtacagcaaaagtggtaacttctgtttgttttttaccccacaagtgaagaaacttgaggcacacagaggttagttaacttgcccaatgacacacagctaggaagtgatgaagcaaccccagtttttctggttcctaagtagtgctccaccaaagatcagagttgagaaaatagattatttcagtaacaagaaatatctgttgtctgcttttgcttgtatcactttttagcctttaaaacctttcatgtagagttatttactcagaaaatgtttattgaactcttcatccaaataatgggatggaattggggaataatacagagaagataccagtgttacccaggagtttgtgaagtgctgagaggaagagaagagctgagtgacttggggctgtctttctttggcttcccagacttctgagctaggtgttgatgtgtgagtaggagtttgccttgagaaatgccttctaggcaaagcgaagtgtgcatgtaaaggcacagaccgtgaacacagtgcatcaggtcaggaaaaccacaaattacttgggaaggctggagtgtagggtgccttagtaagaaggtgggagttgagacagctgggggtaggcagggccaaatcctgaagggcattatttggtaaggactttggacttgatcttgtgggtgacggagtcattaaaggatggccctgtttctgtctgccagttccactcccactttatctcttatgctttctgcccattttgcctacttacttactttttttttgagacagagttttgcttggaggctcactgcaaccttgcctcctgggttcaagcaattctgcctcagcctcctgagtggctgggattacaggtgtgtgctaccatgcctggctaatttttgtatttttagtagagacaggatttcgccatgttgtccaggctggtctcaaactcctgacctcaggtgatccacctgcctcggcctcccaaagtgctgggattacaggcgtgagccattgcacctggccgcattgtgcctactttatctcgtggtactcagtgggggtgattttacctccctgctacagaggcatttggaaatgtataggggggcggctttttgttgtgttgtcacgttgattagggggtgttattggccgtcagtaggc

SEQ ID NO: 102877 - DNA, 1048 bp, Homo sapiens
tgagccaggaccccagaggatggccatgccccgtgcctggcagaggtctggtgccagcactgggagctgctccgcccttgccttggggccgagggagccctcgtccacccctgcacagcagctgggcacagaggagcgctcttccatcttgaccaggactgcaccaagaagcaccaggtgtcttcagcctccaacctccggggcgaccttctcttccagccacagtcccatgagggcccctagccagggacactggtctgtaaattgtaatcctttctccagcccagctctccacttgttccttgtgtgagctgagcaggcagtgcacctctgagtgtcccttttgtaaggcccaggggttgcactgagtctgcagaggccgcgacctcctagaacgctgtgggtgcaggtgagccggcgtgtcctggggagatgctgccagcacacaggggccctcctgctgccagcaggttggggtggttaagtcttattagtgtctattcttaaaattaagtgggctggagaagaatggagctccacatgccagcaccgtatatggaatacaaaagctggggaagcagggcctgccttacaggtgtggctgactctgagcccaggcctgcaggggtggagggcagtccctcagaatcccagaggcagtcccagcctcagaacccaggataggaaatgggtgtgtttagtggggaaagggacggggtgcagacggcagggccagtatggggccccctccctctcctctcctctcctatggtgagcccagcgtgggcaccgggccgtctcagccgtgttcccagggctgggaggacagctctggcccttcttaggcctagcctcgtcccaagctaaatgtaagccagttgggctgtgttaaaggaagcagtgtttttggttcgattctgcctctgtagctcaaggggggcagcccccagagtcctgtgcattctgccaaggctccatagctttgccaaatgcacggagctctgccattccggtgcagtgcaggccttgcgaagggtttatctgcgtt

SEQ ID NO: 102878 - DNA, 1030 bp, Homo sapiens
cagcccagcctgaatgacagagcaagactctgtctctaaataaataaataaataaataaataaacatctttattgagatacaattgacaggtagtaagtggtgcatatttgaagtccacaatttggcaagttttggcttatacacatatacacctgtggattcctcaccacagtaacggaagtattcatcacccccggaagcttcatcctgccccgtgtcatcctctgcccttccctacctcctctcaactctcatgggccctctctccctgcagcggctgcagagcggcaccacaggtgtgtgtgcgctcattgcaggagcgaccctgcacgtcgcctggctcggggattcccaggtcattttggtacagcagggacaggtggtgaagctgatggagccacacagaccagaacggcaggtaaggggatccctgcgcccaggcccaggatattcctggcctccatcatgctgggcccataggggaaccccacccagcctgggaacttcaggtagtagtaatcctggcacctttcaagagggagggctccctgcctgatttgagtggccgggggtcccacgtgagcccttcctgagagctctgtgggtcacagctatatggagcccagagctccgggggagagcagagccctctgcactgacaggcatcccagtgcagtcagtgcagcccagtgcagaccagagcccatcatacacacggacaaggaggccacaggctgtgggtgaggaaggcctcagggaggtgatgctgccccgaggctggagggaacctggcttggggctgtactgactagaggctgcctgggaccctggcactcaggtcatcacctggacatgaggatgacagtcccactcagacctcttctcagaagactgtctcatccatgtgtctcctgaggttggattgcgagcattcagatatcatggaatgactgtttatccctcaaaccccacttttcccacgtgctgttctccaccagctatgtttgattaaccatgcacatggtggat

SEQ ID NO: 102879 - DNA, 1034 bp, Homo sapiens
tacaggcatgagccatggcgcccagcctgtttgtttttaagagacaaggtctctttatgttatccaggctggtcttgaactcctgacctcaagcagtcctcccacctcagcctctcaaagtgctgggattacaggcatgagccactatgcctgggctagttttttttaattaaactttttgttttgagataatcatagctgcacatgcagttgtaataaataatacaaagagattccatgtatactttacccagtttcctccaatggtaacattttgcaaaactataataaaatatcaccaccaggatcctaacatggtcaaaatacagagcagttccatcaccaggatccctcctgtcacccttttaaggccacccttatacccccacccctacagaccccatccctaaccactggcaactactaatcttctcggcttctaccattttattatttcaagaacacatataaatggaagcatatgatgtgtaactttaggggactggtttaattctctggagattagcccaggttgtttgatgcatcaggagttcattctttgccattcttgagtggtattcaaaggtatgggtcgaccacggtttgtttaaccatttccacgttgaaggacatctaggctgactccagattttggctgttccagataaagctgctatgaacatttgtgttcatgtgttcaagcttttatgtgaacagccttcattgttctgggataagtccacaggagtgccacggtggggtcgtatgggagttgcatatttcgttatgaaaatcatatttaatagcagcttaattcttcatcaagagactagatcttttttttttttttttttttttgagacagagtcttgctctgtcgcccagactggagcataatggcatgatctcggctcactgcaacctccgcctcccaggttcaagcgattctcctgcctcagcctcccgagtagctgggattacaggcgcccgccaccatgcctggctaatttgtgtatttttagtagagacggggt

SEQ ID NO: 102880 - DNA, 2528 bp, Homo sapiens
cgctcacaacggcagcagaatcaaggagcagagaaggcttgcggccccagtgaggtggagggtggcggtcacagccctccacaggtcatatagttcccagtcagcccacgaggcaggggtgggtggtgcagacaccctcctgtgtcctgtctgactgaagttccagaacagcccaggaaattaaagatgcttatcccgtttcacagaggatctcacaggtgatcgatctctggtcatgcagccaggttcaagtgccctcagtgttgtaactcagttaacatgcgcccgggcaggcgaagtcagggttggccaggtggcatgccagcaggtctcggggcagcagcgtggtcccctcaacgctcgggccccctgcctcagctgcccccaagtcaggattctgttgggtggagacgctctacggtgtccatgagccccatggttagatgctggtggaagcttgtctgtcagcctgctcctgggacagccataagcatggtgtggccaggggaacccagaaatggagagggctgcagatccatttcacagaggatataatcattaaaaagcagggcttttatttcatgtgactttctttcattctcctagtaatttcattttattatatttcgccaaagtgttggttgatgttagaccagaaatacagggcgtaagaatcgcaggctgcagcaggggtgccacaagggggtagcaacgtcccacccagctgaatagttgtccctggacaggccagcaggcagcagagttgcagtggattttcccttccttgccatttcctgtcggccatttcctttcccttcctttgccatttcctttcctttccctgttgttctaaattcggcattactagtgcatgcgtgcatccggggaaaaggaacaaggtgggagaagagagagaaagcgaatacccgaggccgccagcatcagtgggtgcccgcgctctcctcctcgctctcgtcctctgccctccgccctggctccctgcccgcattccctgggagcgcagccttgccttagcctgggagacagctgtccacagtgacaggcggccattgttctcggccgagccagcaggcttccggccggtggcagctgctgctcctccgctctgcggccccaccaagggggcgccgccaccgcccaggccctccccgcctgatgggtctctgtccgtccacgcgggagacagcgccacctgccggtgagaaggagcgttgctgcgccggcaccagcccagtcctacgctcggggctcctgcaggcctgggaaggagggagggcgcagctagaaggaagtctcgcctgcccttgcttccccgtctgtcagagtgcctcgcatgcaggcctgcctagcggccttgatcatgctctccctgtcacggaagtagaatgtagtcaagtttttggactccaagccattcttacaaaattgcgtcagagtggggattgtattataagaattgccactgaagagcagcgagtggctgaaacctctgtgtggctgccagtcagcccctccccggtgactggatcagcgaagaatccagaagcgaggttgcggggctgcagcccttggcatggggagtccgtgggctgggcagcactgcctcagccgctggcctttcctgagcagagtctaggctaagcggctgttggaaatagcagtagcacccggggcgagaccgtgagccacagcggcggccggagtctcccccagcccgagctcaggcctggtaagcaccaggagcccacagtttccagagggagtgaggaggagtccatggcatttaggggcagttttctgggcacagtggccctcagacgagaggaagaggaggcagcgctacaaggactggcaggacgaggggggtttcctgctggtttgcaggggatccactggccaaacttgtgtggagctgccttccctgagctgggcctgcctgaatgagttctcaggcccctccttcacccatagccttgccagtccccagttcttgccaaatgcttgaataggcccctgtgttggccatggcggcagcagctggctctggatgcccccacccctgccttgatgcatggattcccaagaacctgtctttctgtgacctcctgcgtgcataagccctcgcgttcatggttcttcctcggtggccccctctggcctcagcccttctccttttcttccacagcctccgcctttaggcaggagctctttcctcctctcagttccccatgtcctttgggtgtggcctgtgacactcaactcctgccctcggctgactggccctgattcaccatgcttgccacatgcacctgggctggcaggagttccaggagagtttgtgcattgaagtgacatgagtccctgaagccagagcccccatggtttcctttgggcctgttactggttgatcttttcttgagaagccaagcttaggtaggatttgggtattttttcttttcaaatgagtattgtggcttatattatttgttgctacataacaaattgcc

SEQ ID NO: 102881 - DNA, 1294 bp, Homo sapiens
tcataatgagcctgggactgtgcctccttcccggacggatgagcctgcctgggcagtctgggtttgcatccctgctctgtcacttaccagctattgacggcagaagttgcttaatttctgggcgctgtgacctagggattgctttccccatccagccgcccacccaaagctgcagaagagaagcaagaggctggtgactggggcggctccggagcccaggtggagccgcagttcgcctaccactaaagggccgcagtcaccgtccacgtagccgccagggggcagcagaggtccggccccgccagcctggaggcccgactgcgcctgcgcggcgcccgcggcgcccgcggcggccagggacgggaagtgggcggggccggccggcagcagcttgcgggacacggagccgcgaggagacagctgaggcccgcggagaccaggggtgaggaggccgggggggacgggattagagggctgacggggctgggacgagggtcaggcgagcgcccaaggcgcacaggggtgaaatgggaccgaggaaccggaggggtggaatcagagggctggggaggcaaggaggccgagacgaggctcacatgggtgcaccgaaagggtgcgggggtgcagtgcggggggccgaggagcaagaggggccgctgcggacatgaggaacccgaggctgggagttggggggctggggagccaagggggcagaactggggggcaggcgggggtgtggccgagccgagggcctggtagggaccgagggctatgaggcagaatcgggtgctgagggggacgcgccccattttccgagatttggcctctccccaccccccaggagcctctgggccggcacgttgccccatatccccccagtccctgcaccttcaggggcccagtctgcctgatggcccccggctccgcggcctcccaagcgtccgtgaagcgagcgtcagctgcacaagtgctcgggctgcagctgcttcagccacaggtctgtgagccagagcctcaggcgcggaggccgggcacattgccgctgggttcggtcaggcaagcccctgaacctgtctgtacaacaggaagaactggctccggctgcagggatttcggcacagcgcttgacacacagtgaggcccactgcatggtggcgggctccttcgaagccttccaccctgcgggacagagtcacacatgtcgtggtggcattccccgggacaagttctctgggcccagctgagctctcaccacgggggatagaaagtggggccggccagcactctgaggcca

SEQ ID NO: 102882 - DNA, 1187 bp, Homo sapiens
tgtgcgtctggcagcttcccaggacctgctgcaattcccattctcacaacaagcccttatggtcttagaggcagctgggtgccccatggaacccattcacatgccaggtttagaaaataccctgtaggccagactgccgtgtggtgccaggtgctggtggcagctgccctctgacctcagtgccttcttgtgctcccctccccagccacccgaggagagacacctgtgcgggatccactgtgtgttggaaactccctccacactccgcccgtgcctcattgagtgatgacgggagctcagcaaaacagctttccagactgttcagtgggacctttctttgaggggcaggtcaggaatgtttcggactcagacccgcccccgccccaactcagtagtagattcccaggctgcaccaggacttatatgagagctcctgtaaggaaacccagagcccaccaagcataccccacctggacccccttcctggaggccctcacaggttaacacgggggttccctggaacacagtttggagagctactcgaagctgaatgaaaatacagagacatggggaaccacatagagggtcctgggatgtgtctcagaagcacaggcttcaggaaggagggggtgctctcagagcttctgccccctcccacccactctggtcccattctggggccctagcaaggccacacctgttaggtccccagtgcggggctgtgactctgctcttccacccacagggcccagtggacctggagccttctccgcagaaggtttcaagacctccaggacccttaggttatagggctcattcaggcttggaggagcagagacggttcctaggtcttaaacccagaccacccagtccttccttactatgcttctgcactgcgctttcagccacaggcagggctaatcacaaagtgttcctttattttcctctgcagttgtcccttgtgtgtgaccctccttcaaggcccttggcttccgcagcttgattctgcactccgagtccattcaccttctcccatccaatagcatccaaccccgctgctactgctgccaacctggccttgggagcaatgaggacaaggaagggacaagaccccttttaggccagaactgccttcagatcagccacgctccatgggactgtacctctgccctggaggctggagaggt

SEQ ID NO: 102883 - DNA, 2060 bp, Homo sapiens
cttgtaagcacctccgtgttctggtggagtggggctctggctccgggagcaggtgggtgccacaggacccaggcaggagaagccatagaagtcacattttccaggcgcagaataagcactgtgaccttggagagttccttaacctccgagcctgttgtctctgccataaagcaggagtaggcgccctgtacagggagggctgcccttgtgttctcaaggcagaacatgaaatgcatgcagttggtgcccagcacagtgcagggggagctcagggcacagccctccctcctgtgaccgggagcagtgagagggcctgagcaccaggggccccgtgacaggtgatacagcacatggttcagtggggcatgtccaaggcaggccaggaaccctggggccttgtacattgcaggcacggatgccagcatccctgtgcatatcaacaacatctgccagcgcaactatgtcacggtggagagcgggcgccggctcaagcccaccaacctcggcatcgtcctggtgcacggctactataagattggtgagttcctcagtcctgcccccagggcccaccgaggctccctggcttctccctggatgttggctctgctgcccgctccagacaggcccctgccctacagtgatcccccagccccacacacactccctcaacacccgctgaaggggtgctgccccaggacccccaggacctgcccagagcaggagctcagtgtgtttgaaggctgaacagatgtgtgagggaaccaaaaagggaggcgaagttgcctcagccctgttccctggaggttccccaggggccaaggggagagggaggagcacaaaactggcccaagggcggcctggagctcatgtgtgatgtggttctagccacaggacatccctggccactctgcctgacatttccaggtgggaaatcaggaaaggtctggggtcataagagccagcctggtaccatctgaggctgtggactggtgggtagggcagaggccaggaggacgggccagagcgggaggggtgaacagggcagtatccctgcctgggaaggggtggcatggccctgggtgcgagtgctcagggcaatatctgccccctgcccacttgcagatgcagagctggtgctccccaccatccgcagtgcagtggagaagcagctgaacctgatcgcccagggcaaggccgactaccgccaggtcctgggccacaccctggacgtgttcaagaggaagttccactactttgtcgactccattgctggtagagtctgcctctggcctgcccctcaccagaggggtgtctctctgtcagcaaggccagtacctggggacccaggtccccacgtgggaccagctcccagatctgggcttcaggcctccgtaggccaggtcagtgacacctcctggctgggttgaaagagcaggtgcattaacaccacacatggccaggaacacgtgcctctgacgcacagggctgctgccctgccgtgctgccaggacagtagaaaccaccgcctatagggaccctttcacactcagacccttgaccacgtgttgcggagccttttgctggggactgggagggagatgactcctgcactctgcttgcccgcaggcatggatgagttgatggaggtgtctttctcgcccctggcggccacaggcaagcccctctcacgctgtgggaagtgccaccgcttcatgaagtacatccaggtaggtgcagggaacactagctcaggcaagctgcctcacccctgtaggcctcagctttatcgttgatcagcaggaatcatgttctttgtcctggttgtcacaaaagaatgatggaacataaagaggccttgccaaaaaatacccagtgtccccacgtcccctagaatacacagccattaggccacgcaaacacacatggtgcatttttccctaacaccatgccacttgccatcatgggcattaatgtacacacagagattttagaactgccttttctgcacgcgtggagcaagagccagagactcatgctccttgcctggcagtgtgtcacag

SEQ ID NO: 102884 - DNA, 3269 bp, Homo sapiens
tctgcggcagcaggccaaccacccctactgggccgacacggtgagtggagccgggccggcctcagcatgtgtgtgtgtcactgaggccttgggaccaggtctggtacgtcagccaaacccaggcaggcagccgagcccagccacagactctgctctgtcttctctccctcaggtgaagcggttgttagcagaaggtatcaaccgcccgcggaaaggccatgacgccggcgaccatccccccatcacccccatgaagtctgccacagaggccgaattaggtaccgctctcatcccatacccggtgtgcttccagggagggaagggcgagctgcgacagtgaaggttgcaggccctgttggcaatgtgggggctccttcagcctctgcctgccctggctgtggggatggggggccacctggaagatgagctccattgctatgggaccaggacaggagtgaagaggtagcagcaggtgctgttgcagggaggcaagggggcagacgccacaggggacatgaatgaaaccagggtagagagtggcggtgtgggggagggggcagcacacctcctacctcccagctggcctaaggtggtaccagtggtccgagtgccaggagaaggcaaatgaggaagggagagcagtgcaggtagagacaggagccacctgtggacagtctgagtttgaagcaatggtgtcatgtcacgagacaatggaaagacaggccaatgcctgaagagcagtcccgccagaagcagggacaggaggttgtgcaggatggtgggagccgcagccagaaagaaaccactgaggcatggaggcttgtgttcccttcctccgcatttgctttttttttttctttttttgagacagagtcttgttctgtcacccaggctggagtgcagtggcccgatctcggctcactgcaacctctgcctcccaggttcaagcagttcaccctgcctcagccccccgagtagctgggattacaggctcccaccaccacacccagctaatttctttgtatttttagtagagacggggtttcaccatgttggccaggctggtctcaaactcctgacctcaagtgatccatccaccttagcctcccagagtgctaggattacaggcatgagccaccacgcccggccttcctgcacattttctttcctccttccccaggatttgcagtgtgtcctgcacagcggctctgtaagcaggagcttgctgctcgagcgagagtactgggggctcctcacggccagagcccccagctggctcccaactgactagccctggcctgttgcagggggtgacgcgtggcggctctatgagtacatcaccagacacttcatcgccacggtcagccatgactgcaagtacctgcagagcaccatctccttcagaattgggcccgagctcttcacctgctccgggaagaccgtcctctcaccaggtcacaccacgggcccagccttcctcctctgtgccttcatgggcagacaaacattctacatcgtgtctggggatgggaggcccagggtctgaggccccggccacccaggctggggaccctgagtggcggcgcatatctctccaggcttcacggaggtcatgccctggcagagcgtgcccctggaggagagcctgcccacttgccagcggggtgatgccttccctgtgggcgaggtgaagatgctggagaagcagacgaacccacccgactacctgacggaggccgagctcatcacgctcatggagaagcatggcatcggtgggtgcgcctgcccaggccccagagccggctccgtctccagtactcaggcttcgagtctactcacaaagctgccccgccagccctgtgtgcccagcccagcacccctccatgggctggtatctggaaactggtgacccagtgtgtggccagccaggcaggtccacagcgggcatcccctcctgaggcctccattcaggacctggccttccctgtgaaggcccagatgtgccctcgtgcactgtggggtgtgcacacaccgactaacgcccacaaggctgaagattggcccagatgccaggtgactcatagaaatcatattggcagtcccctgagtccacacagccagcctgggctgtcctgaaatcaggtgacagggaaatgagatctcacaggagctgcttccctgggagagaacagaaatgcctgtcccaggcacagggctccccaaagggtgaccaggaagtttccacgcaaaaatgggcagcccagggagtttatcaaagcaaaagtgtagtcaccagtgcacactcctcacaggagtggtggcctcacaagtccccaggcctggagctgtgagatgtctcacatgttgggggccagcctcactgccggagccttctccccaggtggcactcgcgccgctgggcactgcctgttccctggggcactacccctggctgacaggctctggagacctgtgggatgtcacagccactgtgtccaggctctgctccagcagtggtcatataggtggactctcagggagtgtctcttcccaggctggggtcctggtgaccatggcgatcttggcaggagagcagagctctgggcttgctcctctcaggggtccagggcacctgccagggtcctgaaatagccctcagcccactgtggagtgtgggctctgctcccccgtgtcctctgccctctcgcattgatgggacactggctcctggcagccctatgctagccagtgagccagacccaatcaccaatacaagtttgtgacagtgaagagggctctggtgttaccttctgaacaggagagtggtcagggtggccctgtgactgagcccccaggagtgtgtcaaaagggcctgaccagagccgccacagaggagcccacaccacgcgtcatggcgcccggcagactcggggtggtagtggcacacgccacccacagcctgccacaccgggtgcagagctggcctcgtgccaagagccatgggccctcggcaggctccttagcccccagaggccagtttcttcccatgtgagattctctccgagctactttgggaaggtgtgtgtcacctgtccatgctggtgagcatgcagggagccccagcctcctttctgcccctctgactggcacccgccatagtcaaaacgcctcagcctccgctgcgcccctctgccaggaaacttcctctgggtgggagagtggaatcctggggactgggagcctcccctggggatcgtgacgggccttgc

SEQ ID NO: 102885 - DNA, 1117 bp, Homo sapiens
gaggcccctggccctgaacactgtggagatgctgcgtgtggccagctcttctctgggtatgtagggacatttctctcaagtcaccagaaggcttcctgaggcaggttcagcctggagcagcgagtgcccagggttgcaggatggtgcccaaggcttcaaggggatctgagcctcaggaggatttcacttatccttaggttgtaaaggtggtaaagttggtcaccacctgaggggacctcctgatgttagagtccctgagcagctatccctggtgaggggagaggccccagccagatgtcaccttcagggaaccagtgtgaacgtcgcccctcagcctcatctcctcagtcttttctccttagtaacgaggagggggttgggctggaaagctggtggtctctggcagctgtcagcccctaggcattggtgccccccacccccgcagggaactatgggcagtgtcctctcagtggacactgagtggtggctccagcgtcctcagagggcagcaatgctgggagtggttgctagctaagcgcctgcctctgctggtcagggagtagcaggacgagcccccctgagtggccccaaagtgctgtgaggacagaaacacccaagggctcaaaatggggctgcgtgctaactctgtcgtcagccaaccccgaggtatggttatggctccatggacaatgcatggggagtggtgctctgaaggccatgtgtcatccccatggccatgagccccatgaggatgcaccgtggggtagagtgagtggcgtttcccatcaggcccatcctgggtgtaggattcagccttacgggtgcgggattcagcctcatacaagactgtgtggcataggtgcccacccggccagcagctttgcactccagctgtgcctgctcagagccaccgtcaccctccaggaggggccggccacaatgggggagcctgagtgcataggccagggcaggcagctggccatccccacgtacctggccctctgagaacctcctgtctctcgcaggcatggggccgcagcacgccatgcagacggctgagcggctctacacgcaaggctacatcagctacccacggacagagaccacccactaccct

SEQ ID NO: 102886 - DNA, 1026 bp, Homo sapiens
aagtggggacaccacctgatgccacctccttcatgcaccacccctggccttgggctggactcacatgggtggccataatagtgtcttgagtgaatcagtgaccaaaatatctttccactccctccaggtttcagactaaatatttccaggggaaatacggtgatttagacagctctctcatctcctttgggccgtgtcagactccaaccctgggattctgtgtggagagacatgataaaatccagtccttcaaaccagagacctactgggtgctgcaggccaaggttccttgcctttctctattcatgctggggctttctgggtttggggcatggattctgagagtcttccatcatcatcagccggcaggccccgggctgagggcagaagtgtggacggctgtacctggaagtggtctgtggtgcctagggctgagggaccccagccttcatgggggcagtgggaagagactgggcctgtatatgctgaatctggataagtgggaatgagttcagctctggcagtgcagggtgaggtcaccccacaggaatcagtggcttcagtggtcaggtccaagcactggactgagaccattggctttcaaactttttaaaattcctagaaccctttcttcaaataaaagcctccacagaagctcactgtaagacttaatacagctaggcacagtgactgatgtctgtaatcccaacaacctgggaggctgaggcaagaggattgcttgaggccaggagtccaaggctacagtgagctacgatcgtgccactgcactccagcctagcaacacagtgagacactgtcttggagctgctgtggctgacacggggcttgggaccctggcggtggccatacctaccactggccaggcactggggataggcaggggtggtgtgagaagtaggggctcaggtgcttcttagggacacatcagcctcagctttgggccaccttcctgagactggctgcctggttttggggcaagtggtggagagggccagatgtcagctt

SEQ ID NO: 102887 - DNA, 1117 bp, Homo sapiens
gggcctttgctagctttttctgtgagtgccccctgctggcccacgaggcacctgcaggcacccccaacacacaaggcagttgccattgccaaccctcagtcctggagagcaggccttctgcttttaaaatagcttgtttggtcggggggtttttctccttaattttaaaacaaatgcatacagattatggaaaattagaaagtgcagataagtagaaagacagaaaaattatgcataatcatattacccaagacgactgctgttatcatttagggttatttcattttaacccttcttctgggcagttttggggtataagatcatgttgcatttatacttttttttttggtccaaaaaacatcaattataaactcaattcttttctgttggctgagccagcctcaacacagccagctccttacccagcccaggtaccagtcctcctaactgaggttcagggcctgggaccaagccctgtcctggatgggagcactgggggcgggtggcacagaccgggtctgcagcaggtacgtgtgaacctgtgctgtgtggcaggtggagggcagaggctgcgactacatcgtgctgtggctggactgcgacaaggagggggagaacatctgctttgaggtgagtgtgaggctcactttgttcctcacttttggcctttctgacaccagccccaaactgacaccagcagtcagtcacatcactcctggggccaaaggagggagtaaactgtaccggtttaaaaacacctctcccctccctttattctgaaactccacagatacttttaactgcataggctctattaaaggtggtcagttgttcctccgcttgctgaggcctcaacggtatgagtgaacataggaggggccaaattgtctgggtggatgcaggtttcagaatgggattgtcttggggcagcttggtgttcagcatcttgtgcccagcgtgacttctcagggaccttgggttgatgctggttgattcccgacctcagcactgagctccttttgcaggcctcgctctgctcatctcctgcctcatccaggatgcctcctgcctccagccaaccctgggagccctgcagagaagcaggtggcagctgctc

SEQ ID NO: 102888 - DNA, 1096 bp, Homo sapiens
aggacagtcattatccatatgctgggcctggtggggctattaggtacaggtagtagaaaccagccctggaaggaaggagacgcagccaggactacaccccagtcaaggtctgatgaggctatgccccaggcattgtcacccctggatactcccactgtcctgtggacctcacgtcactccagagtagccaatggactgagctatggccacaggcactactgagacaccagggagctcgagagggaatgtctgccactcacccccaactctggccactggggtggttggtagggtgctgtttccccctatctttgaattccctccaaataggaagagttttagatgctgggtacccagaaatgacaggcacctacctggcctccccttggtccagcagttgagaggggaagagaccctcgttcagctgagaaggcatggtccgcaggggacggtgccccaaaagtggtgcccggtgcccagaagctgagaaagtacagctgagtatggtcagtggagagggtgagaattcgataattagaaggtccctggtaaccgagagtagatctggagtctgttttagtaaacgatgaataacgtttcaatgaagtgaggcaaaaatggaattgaagagtgaaaacataaatacagagaaagagcccacccctgcctgctcctggctcccggcagcctggggctctgcatcgagagtgctctgtgctaggttgttggcagatgctgttttccctgagcgccgtcccacctctcagtgcccaactacccgcaccagtctgcggaatgtcgtcactcaccactctggggaaggaggactctggccctctgggaggtggcatccgggctggggtctccacagggtcttcagctcagctgaagcagccagtcactttgtgcttcctcatccccagggagcctgtcctcacacaaagggctgaacggggcctgctcagtccacgagtacactgggacctttgctggccagccagtgcgcttcaagatgacgtctgtctgtggtcacgtgatgaccctggatttcctgggtaagcccctctaccctccatcctactgaagggagttctgc

SEQ ID NO: 102889 - DNA, 1847 bp, Homo sapiens
ctgggtgccagaaatatggcaatgaacctgacaattgtgggagagacagactgctgacgccagatgcagtcttcaggaggggaggggcaggggtcagagcaagtagactaagggggaaaagtggcctaggccgaagcctgctggcgcacagggaggaaaggtgggtgcgcagcagagccttgggagatgcagctggagctgtcatgggccagagagctcatctgcagacagtgtcgtcattccacaaggcctcggctctttcactgtgggatggttgtacatttaaggggaacatccacttacttattttgaggaaaaaagcaaattgtcattttatttgggacagctttctggtcaagattactgatttcactgtagtcctgtgatctcttaagtggggaacaaggttgacagcccaaggccgaccttggacctcttcccctgcacagcatgatgagcagcagaagcccctttagtgagggagttcctttggcatcctttctgaacaatgccctttacaaccctcctttatttttctggttttattgtaaagtcccttgtcttagttcttgtccctcagtcacctgtgtccaggcgctaaatgtaaaaggtgcaaaagggaatgtggtgaggaggcacccccagccctgacctccaggccctaacacccactccaggtgattgcttggactgtttgttttgcgttccatccagacatatcgcctcttcataatcaagtgcacacgtgtgcacacatatgtgtgatcacagatggcagtgctctctacacaccgttacatgcccagctttcttagcatgatttatttcagtgatctgatccacgttagtatgtaccaagcagatgctttcctttgtaatgctgccaggtgctctactgtagagaatgccatgctttttttttttttttttttttttggagatggagtctcactctgtcgcccaggctggagtgcagtggcgcaatctcggctcactgcaagctccgcttcccgggttcacaccattctccgcttcccgggttcacaccattctcctgcctcagcctcccgagtagctgggactacaggcgcctgccaccatgcccagctaatttttagtatttttagtagagacggggtttcaccacgttagtcaggatggtcttgatctcctgacctcgtgatctgcccaccttggcctcccaaagtgctgggattacaggcgtgagccaccgcgcccggccagagaatgccatgcttttatttaaccacctccctgttgacagacaccagcttgtttctaaccttttatcatgattgataatgctgcagagaactccccagtgatgtggttcatcacaggcaccaccgtgcccagcctgaggccactccagcgctgccctgtcctacctcctggggactcagagtccacatggacagtcttgtcagggcccaccactgactcctgtgagtctccccaggtgacttcactctctacctgtctcacagcccttgccctccctgggtcagcatgccaccacccaggcccctctgtaattcctgtttgagcctcccaccctctgggagttgcttctttgactcccacttcctgctcttgtgcctcacttcctggaccccacagagcacaccctctgtggaccctccccaaccctcacctccctcttcacccaactcagagtcaggttctgtccttgtaatctctcccctcgaaccctgacccactccctctccctcctactcacctggactctcccatctaactaaatccagtgcttcctctgctgtgggcctgcccgcagcatcaccacctgtcctccctcagtggac

SEQ ID NO: 102890 - DNA, 1029 bp, Homo sapiens
agatgtggcttcaaaagatatttttagggggttacttttagccatctcactggacaagagcttcatagtttccattaactttggactgtgctccaagtatcctccaaagaatctcacttactgccctgtgagtgacatgggctgggatgctgtggtagagcacactctggctgatgtcttgtattttctggagacaaaagaggatgggggcacagtcctccatgggaaccctgaacaggtccttctttcttttcagatatggactttctggggaataatattgggtggcttttgttgttgttattgtttttgaactgtcttaaatgttctcccaaagatgctacagaacatagcctatccatttaccaagttaaaaggctgagtaggactgtgagagatgccctgctcatcatcattcttcttccacttccagtgactgctcttatattctttgccataagccaacaaccgctcatcccaagatctcataatccctctgtaaaactgatgctgtactacataccttgccagctgggacttgtaatcttactgtattttctaaggagtgaataatcttgtccaggtaactaacatatttaaagacattttcttctgtggacactgactccatgccacctgttttccaaagaagtggtgaagctgtttctgagaacacctaaaatcaatggttgtacattccaaaccaatctaaaagtgatttccttttgctgtgggtttggttctattactgatttggaaatatacctttgaacactgagatctctgaaactactagacttctagaagtgtaattgtataagaagtctgtttgcagctttaacaaaatgagaaactcttcccaaattaaagctttctttgaagttaaaaaaaaaagaataatgtgagattggaacctgtgaggtctgaggattcccaagagtactctcaattctgacgctaattgtaacctaagggctccccaacagcccttcacttcttatgattccctagaaaaactcacataactcc

SEQ ID NO: 102891 - DNA, 2682 bp, Homo sapiens
gaggttagttgagggagagcagtggttctttgttctagttgaaggataggcacacattcattctagtcttggggccaggtcaaaaggaacactgcttcagagtatctttacctacctgaaaacatccaaggaagccaaaccattcaaagtaaaatggttttgtttggtgaagggcccctgcagacatcaaacagccgtcatgtatcattggtttgaggtgaaatagcaataaaattaatagaatggtgcctggtactagctgacttcctgttctgtgatctaaaggtgaatttgattcattccctctcctctcccttctggctagccgttagtggagaatgaactggccatattctcagccacagctgtaaagcaagtttcccaaggggaagaagccctaatatctataatttgaactgtactggacccatagttttaactgaaaagggccaaacaagtggtgtctgtccagttcctggactgggctaaatttagttttcccactgttaagctggaatgaggactgtcccaacaacagtaggtacagtggacaaaaatagcccagggtgactgactgaatttaaacccataatggctttatatttttctgtgcatatatatcttaccctaattgaacatgtgaagcttgcaactttatgtcttgctttggacatgaatgtattacagcttgcagctattctgttaaatgtatagtttcccagttttttgacactaatgctgtttgggtcttacctgacacacaccagtgtgcaagaaatgtctctctaattcaataagttttaagacttagagttaatgtccttcatctgatctatcctatctaatctgtactatgggtgaatctttttcccttgctctccccaggggctgtttcacagtattctggagtaccttttgagtattggttcctgaacatcagcagtcttggctgcctctgtggactcccggagttgtctccctgcttgtgttctggtgccatcctttgttcctccacccctgaccaaggtgcccagcagcctgtcttcaccagtcaaggaatccgccatcttggctgtagacataggtctggagaaatctctccctttttccttgatttctttttaaaggtaccttatctctccccactcctttcttccctcctcaatctagttaaatttcctaagctttcacaaaaatccgggaagagataattaagagcttagcatccctcttagagtagaaggcagtacagataacaaagaagttgtgagtatattatctacattttagaaaattttctgactctagatccatagattctgttgtatttatttgccggacactcatttgattgatttgcaccttgaacactatactaggtcttttcagttacgttgcttgggttaagacactttgctaaaattacagcctgaatcctttctttagttgaagaaagggtatgtgtgtgcaagtgggtgtgtgtgtgccagtttttcttgtctcaggtagatactcccactgtgtataaatagatctacagacttttcatacttacctcccgtattctgtttctgtggtaaaaatatgaagtgttttagttgtatgttgagtgattggttggtattatcaacactgttgtttgcagtttcattaaagcatgctcttaaggagtacatatggtcattaattgccaactgtagattccagtgatctggcccctgcctacctccttcctctctttttcattctctgtcatgcttctccactgttttccccaatgacgcactattttgacacactggccttgctattccttaagcaaatcacattcttcccaatccaaagactttgcacatgctgttgtctttcttagaatgcccttcccctaggcctgcatggcttgctacctcacttaattgtttgacacttcctttggttcattgagcttcaaggctcttaaaatgccactgacaatgagatctccctttaaaaaaaaaaaaaaacttctacttttcctcttaaaggcactttactctctccccactcttttcttcctcttcaaagtatttaaatttcctaggttttcatgaaaaagctggaaagcgatcagcatcaagggctttgcttctgtcttagaattgagctagcttgagtcaatttctgtgcctgcaaccaaatgaaaattaatatagtgagttctttcaggagctttctctgtttttctattgatacctctatatatttttaaggcaatgtcactttgttttgtttacaaatatattgaatatgtcaagattactattttgttattgccctttgtgaatttccttgtctattttgctcgcttgttctttcaggtgaaatttattattttattaatgttgccaaaaattataagtaaaatatcaattatagtaataaaatgttttgtgaaaaaaatgctgttgctgtattgttgctgtattgtctttccaccataagtaaaatgggacgtttgttttgttttttgagacagagtctcgctctgtgacccaggctggagtatagtggcgcgatcccaggtcactgcaatgtccaccccctgagttcaagtgattcttcctagcagctggtactatgggcgtgtgccaccatgcccagctaatttttgtacttttcgtagagacgaggtttcatcgtgtt

SEQ ID NO: 102892 - DNA, 2533 bp, Homo sapiens
gtaaaaaacttgctaaagaggaagcatctggtgtgtggcagactaaggattccagcttactcttcaactccaaagcccatgtttctaaacactgcacaatgatgccctcataaaaatgtgtgtcttttccatataattttgcctagtgattagctgctggtaggttttttttttaaaatggaatagagcacaatcagtacagcaaagttatgattctagattcataggaacctgatcttttatcacaggttttaagctgttatttatcctctttcagtctcagtgtccttgtgggtaaaatagtggtttataaaaacaatgttttggaggaaaattaaataaggtaatgcattttcctgtacttactgatgtatgtttgtacttaggtggcagtttatataaaggaagcattgggacttgtggccccaccattcaggaataaaaaaattagaaaatggaacaatcatgtgaggaagagaaagagcctgaaccacagaagaacatacaagaaaccaaacaagtagatgacgaagatgctgagctcatctttgttggtgtggaacatgtaaatgaagatgctgagctaatctttgttggggtgacttcaaattcaaaaccagtcgtttcaaacattttgaacagagtcaccccgggttcatggtcaaggagaaaaaagtatgatcaccttagaaaagatactgctcgcaaattgcagcctaaaagtcatgagaccgttacatcagaagcagtgaccgtcctgccagcttcccaacttgaatcgagatcaacagatagtcctattattattgagcctttgtctaaacctgattatagaaatagttcaccacaagttgtgcctaataactcttcagaattaccttctcctttgattacattcacagattcattgcatcatccagtaagtacagcactttcagtaggaggtataaatgaaagtcctcgtgtatcaaagcaactttccactttcgaagtaaacagcataaatcccaaaagggctaaactcagggatggaattatagaaggaaattcttcagcttcgttcccttcagatacctttcatacaatgaatactcagcaaagtacaccctcaaataatgttcatacctcattaagccatgttcagaatggagcaccttttccagcagcttttccaaaggacaatatccatttcaagcctataaatacaaatcttgatagggaaaatgaattggcaaaaacagacattttgagtctaacaagtcaaaacaagacctttgatcccaagaaagaaaatcccattgtgttacttagtgacttttactatggacagcataaaggagaagggcagccggaacagaagactcacaccacctttaaatgcctcagctgcgtgaaagttctaaaaaatgttaagtttatgaatcacgtgaagcatcatttggaatttgagaagcagaggaacgacagctgggaaaaccacaccacctgccagcactgccaccggcagtttcccactcccttccagctacagtgtcacatcgaaaatgtccacactgcccaggagccctctactgtctgtaaaatctgtgaattgtcatttgaaacagatcaggtcctcttacaacacatgaaggaccatcataagcctggcgaaatgccctatgtgtgccaggtttgccattatagatcgtcggtctttgctgatgtagaaacacattttagaacgtgccatgaaaacacaaagaatttgctttgtcccttttgtctcaaaattttcaaaacagcaacaccatacatgtgtcattataggggccactggggaaagagtgcacaccagtgttccaagtgccggctacagtttttaactttcaaggagaaaatggagcacaagacccagtgtcatcaaatgtttaagaagcctaagcaactagaaggattacctcctgaaacaaaagttactattcaagtgtcactggaacctcttcagccaggatcagtggatgtagcatccataactgtgagcacatctgactctgaaccatcactccccaggtctaaaagcaaaatttcaaaaaagtcccattaattctagtttcagtaaatctaaagcaagtatttcaaaccaaattaaaaaacctcataaaacaaaaaatacaaaccatacattattcagtagcaccaaaaatagtgaaactagtggattatatatgactttttaaacaagattcaggatatatattatttgatctgaattttgaggtattattttaaaacatctggttttcatgttaactgtatctggcttaacacataaaaggtgtttgtgtgtgtgtgtgtgagagagaaaggtattaatttatttttttaattttaattttttttttttttactttagagacagggtctcactgttacccaggctggagtgcagtggcgtgatcctagctcactgcaaccttgaacttccaggctcaagcattcctccgcctcagcctttggagagtagctaggactacaggcgcagccaccacac

SEQ ID NO: 102893 - DNA, 1079 bp, Homo sapiens
ccagtggatggacatctgggctgtctgggttattcattcacaaacacaggccagtgagcccctgcatgtccccgtgcatacatcatgcctcccaaggacacacactcaccctgtaactagagggacacacgtctatatttgggtttactatgaactgagttctccccagagcagccagactaatgcacagcccagcagggccaccatctcatgccccacaaccacaccctgccttggaactgtggacgattgggatgttcctatccccagagagcacagacatctggcaccaaatgagaaccaggtaaagcccaagggcgaggcccagcccgccgggcgtcactcgaaggtcaccagaccctgccaccctgatgcccattctgctcctgcctcgttgaccttggcctccctgagcctcagtttccccatggttttattcagaggttgcagtcctggtccctactcttttgagtctgcacagactggggcccttcccagcactgctagcatgggggcagagacccttggtggccgaggagggtgaagtgggccaccggagccgggatgggattgcaggacaagagggggccaccgggttgggtagtgcgacccccggaaagcacagggagctgtgcccctccacaggattcccgccctcagagcccctcccctctgtgccccagagcagaagctgagcctgggctgtgtccatggtagaggaaatgctccctccattgggaacagcgtggccggcttctgggcttggggaaggagagggagaattctgggcgggcgatagaggggcccaggttccctctggtcatgaccttgaagttgcccaggtgaccaggaaggaggagggtgctcctctctgtcaagaagatctgagcttctcttccctagaatcagctactcttctatccccctaaaaatgtacaggaattttgcacgttgaatgaatggatagtttactaaccagtttgggaagaattgacacctttcaatccatgaatatcctctgtctttcccattagtatactttaataattctcaagaaagttgtacaattttccccataa

SEQ ID NO: 102894 - DNA, 1019 bp, Homo sapiens
gacctttgcctattccctctgttctagatgtaggcaaggagaccaagagctgcacctggatgatctgggacatgttctgtggactggagtcaggagggccccaaagtggccccagcaaaggcaacagaggaggtagagcatggtgacacgttgcaaagtgcaaaggcgctggccctgggagaggcaactgagaaagtagaggttgctgagaagacggaaggtacagagtggggcaacatgtcagacaatccctactggaggagagttgtgggcatcagtgggatcatcctgatcatgctcaaggtccttggcgtcatctactttgcctgaagcagctgggctggggccgtccaggaggaggcagagctgctgcttctccaggatcatcatgaacagggacaaagcgtttcctactgggagacccatgggcctgggaccaaggattacattaataaaaatgttcccttggtgtcatgcatcaagggctaccagcagcagcacacacatgccgtgtggcaggacagagcaaagtccattcgccattacagaaagtatgcaaatgagaacatctgttcctttacaaaatgagtcattttctccaaatggctgcactgcataaacactttcactttaaatttaattttggcttttcatctctatatatatttggaatttttgcttgtgtttacttcactgtcaccaattctttcatgtacccaacttccattgcttggttctctccttattttccaaggtatgtccctgctggccaagatgccgagttgtggaagccccaccccacccctgcaagggaatctcacctgtaggtgctctccagcactgatgaccacacaggccatggggaaacaggtgccagggatggaagctttggcccctgcctgaacctcagtgggactgaggcaggctctgctttaatagaacaggcctccccaccactcaactctgtttagcttctgctgtgctgcatcccttgagggcagattaagaagaaactccct

SEQ ID NO: 102895 - DNA, 1040 bp, Homo sapiens
aggcccaggttgatgcagcgagaacagggcctgccctcgtggggtgtgcagtctgtgctgagcagggtgagctgctgtgctctgtgcctgtcgcctggactgttgcagggacctggcatgtgactgtgggtttgggacacagggaatggattcttccctctgtccccagcctctcagtccttttgttttctagaatctcaggaggaacctcagagacctggaggccccaccagagtggccagaacctggtgcaggagtatgggtggggtctcagtctggccctcaggagcttctagaacaattccaggaatttgcaggtaactggattgacttcacaagggctgcccagggcccccgcagagaggccagtgggacaggaatgctgaatatagcaattcaggaatgctgaatttagtcatcttgtgtgtgaacacatgtgtgcggcttcctcccctggaggcaaggaaggcagccctgtgctgtctgtcccacgctagcctcagaatacttaagacggtgtgtggtggcaaaggcactctcactgctgctgaccatggcaggtgcacgggcacactggaggaggcaggtcagcatgctgctctcccgaaccctccagcaaggaaacctggggtagccaagcctctgagcacctgtgagcactgtgcttggctggaaggagcacaaagcgaaatgaacagaggcgtcagtgcagatgccaagggtcagccccaggcagaatcccagagcagaggctatgctgcggcctgggcagaatgaagagggacgtgggagcacccagactgttgtggctccggggtggtgaggtgagcattccagtctaggtggcagaagacctggagtcaggtcctggtcccaccatcctaggtccagcccctttttctctgaacctcattatcctcatccatacccaaagccaagagtgccctgccctgtccccacaccagcccctgccacacattttggccctttcgtgcgaacaccgccaggggaggcgcttcacaggattgaaccaacaggga

SEQ ID NO: 102896 - DNA, 1028 bp, Homo sapiens
ccctgtggcaagagggagaggtgccccatcccgtgctccttgtctgggcccgctgctgccagaccatgggatgtcggcaaagctcagaggaaaaagaagcagcccggcggtcccggagaattgaccgccacctgcgctcagagagccagcggcaacgccgcgaaatcaagctgctcctgctgggcaccagcaactcaggcaagagcaccatcgtcaaacagatgaagatcatccacagcggcggcttcaacctggaggcctgcaaggagtacaagcccctcatcatctacaatgccatcgactcgctgacccgcatcatccgggccctggccgccctcaggatcgacttccacaaccccgaccgcgcctacgacgctgtgcagctctttgcgctgacgggccccgctgagagcaagggcgagatcacacccgagctgctgggtgtcatgcgacggctctgggccgacccaggggcacaggcctgcttcagccgctccagcgagtaccacctggaggacaacgcggcctactacctgaacgacctggagcgcatcgccgcagctgactatatccccactgtcgaggacatcctgcgctcccgggacatgaccacgggcattgtggagaacaagttcaccttcaaggagctcaccttcaagatggtggacgtgggggggcagaggtcagagcgcaaaaagtggatccactgcttcgagggcgtcacagccatcatcttctgtgtggagctcagcggctacgacctgaaactctacgaggataaccagacagtaagtggggccgggggttttcctctgcttgttcctgctgtcgtgggttcctggaagcaagaggactcgtgaggtccaggacagtctgcagccagaaagggaaccaggcgcaggcctggccctgctgcacgataactgaggcagctccagcaaggtgggggcagagggaacagggtgtggagtgcaggtgtcatgtcccatgcctgaagtactcagggtgtggaggccacagggcaagag

SEQ ID NO: 102897 - DNA, 1052 bp, Homo sapiens
ctccacctgctctcacactgagcctctgccggggagtggcctcactgtctgcctggtttttgtctgtctgcccctttgtctcccagtcccattacctgtcatgcatcctaagctcctgaggacagagaaggtggagagtagcagagccagagaggctctcctgtgacgtggctggctctgtaccgagcagggggtgcggccacaaatctccaagcccaggccaggggagagaggcaagcgcactggactcggttccgcctagtggcaaagaggcccagaaaagtctcaagtgcttgggacagggccccatctgcatgtgatgtgttggggcctctggaaacggagatgccaaggcagtcttctctgaggtcagtggtgatgccagagaggtgaggctcaggccattgccagctgcaccagagacaccaaagcactccagggtcccccaaggtcactttagtagaacccagtgaccatcttggacaaacagcttattttactgaggcaggagctgcggcccagagcagaagtgacatgcccagggtctcactgcagtttggtgggagaattaggtttcagaacacaagacagccagtacctcccaggccccttcctcagggagccagcagggtcgtgggcaagcggccaggctccacagggcaagcccctttggacttaaccctgtttgtgacagccctggtccctgacagtcctcagatcccggtggcagtgggcagtgggctgtctgaaaccaaggtgctccttatttccaaaccagaggtgtctgatcacagagtgtgtcactaggagcatgttctgagaagccagggagcctggtgcccaggttcccatccttagaccagtcctctgtcccttgcagccttagtctcatccacagcaagactggagccttgggggtaaccaggaaaggacaggcactgcccctggcattcatgcagggaccaggagggccagaacacaggcaccctcagcctcctgtcttcaccccgcagcccaaaggagggctgcctgacctccgggcctcacttctc

SEQ ID NO: 102898 - DNA, 1099 bp, Homo sapiens
ctgcacccgaacaaactccatcccctcctccttcctgaatgcatactgttagtgtttggaatggaattgggttgaggatggtcttgtgagggatgggaggtggtttgttcctttggttctagagcaatgtgtttgtgaagtacagcttgtgagttgaaggaagatgcttcaggcagtaacctccttgctatgtgctctctccatgccgggcagtgaggatggcataaaagccggagtcatctctagcgcccacatcggatgctgttagcagggactgatttatgtcttgggcattccccgccaccccactgatcctgttctggaggggttatatgacacgtttgtgaaacctgagatatgctagctgctcctaggccatagaagtgtcaggtttgcttgctaaccagcagtcctgaacacaagtcacagcaggtgagaataggaattagaaggaagtgaggcgacaggcagttgtgactcagtgggccaccgaaaatcaactgcatggagattttatctgggggtgaagcagagccacacccgttctgatctgcctggctttgatgggaggcttcacccatgattattcaccaccaggctcctccatggtggtaacccagccccatttgctgaccctccagtgtgctcctgctgcctcatcttgccaaggataagcacccacaggtgcttatttggggctcccaatctgtggtcagattctagcactaagattaaaactatgggattgtacgcctaacttctgtgctagatgcaaataccatcaggcattttgggtcatgggactatgttttgagatccagacacagtttgccattggggtaaggaaagggtgggctggggtgtgtgtgtgaggctgtcgggaatcttttggagtcctggtccctgttaagctcatctggttttctgcttcattgatttttctttttctgctgatggaggagttgaatgtgcttggtttgtcaaaatcctcttcaaacgagtgaggctatttttggctcttagagctgctgcctttttgtggtgggcactctgtcctgtttgtgttaggtacttccagttactgatcttccatttgcag

SEQ ID NO: 102899 - DNA, 1060 bp, Homo sapiens
taaggttctttcgttagcttctttaatttttttctttaaatttaaaatttattacctttttttttaatagataaagggtctcgctctgttgcccaggctggagtatagtggcatgatcatagctcactgtagccacaaactctcgggctcaagcgatcctctctcctcagcctcctgaatacctggtactacaggcgcgtgccaccatgcctggctaatttttaatttttgttgagacagggtcttgctttgttgcccaggctggtctcaaactcctggcctcaaacgatccttcccgcctcggcctcccgaagtgctgggaataattatagatgtgagttactgcacacagcctgaatgtattattaacacaactttttccatctcttttctgtttatcttggtttatgtctcccttattaaaaacgaaggcaaccacctctccctatccaatcgctcaaaggtatttattgagcatctactttgtgcctggcactatcttcatggaaatcctttcttccttattcattgatttatggaaaggctgatctccaagggccttgtctttaaaacaacaacaaacaaacaaaacctttctaatgtcaaagcattttcccctgcgtatctttctttaacggtatatttgcagctgtttcctgttaatcctttgtctatctggcttcctttttagggtgatgggatccttaagcacagagtatgccctgctgtagtgtcctgcaggatgggccacactctggccctttaacagtgtttgatgtgacgatgcacctgagcccatggaggtctgtgtctcgggccccgtgggtgtttgcagattgaagatggaatgatacacaccatctctgagatttttatttgctcagaccttcccctgttctggcccaaccccgcttaatcatgtctaataagtggtggtgggtttttgggggcctagtgatacaggtggcccggcgatgaaacgttggctttggagattatcccgctggttctgtttccttctttgctggtgattggtactccctggctcacccttagagaa

SEQ ID NO: 102900 - DNA, 1047 bp, Homo sapiens
gtgctccccgagtgtccaccgtcggcctgctctgttccggggcagggccacatctttgtccgtgtgccgaggaggggactggtgggctggagtcccagggggagattattccaagtaggggctccagaaaggtgagtgatgtgtttgggtctatgggaaggttggtgacccccaaagagaggtggctgggttactgctgaacagctatcagggtgatatggctttgcaggggtccagtccatgggcctgacatgttgtagctatgctttgaaggcattttcctggtgggaggccaccgcaggtaaggggagtgaaagggtggctgtggcggctgttccctgtggctggtggccatggataagtgaagaggaacgtgatgctgggcaccatgctggtggtgcctggggcagagcctggccttgtggggctgtggagcagggtgaggatctgggatctaggactgctatgcaccgggccgaatcgtgatacccaagggaggcatcttgtcgtggagcagttgcatgggcccgcccttgttccctggagcagctggtgaggtactgttagaatttggccctaacaggactgggcacagtaggtcacacctgtaatcccagcactttgggaggccgaggctggtgtatcacctgaggtcaggagttcaagaccaggctggccaacatggcgaaacccggtctctattacaaatacacaaaaattagctggacgtgggggtgcacacctgtgatcccagctactcaggaggctgaggctaaagaatcacttgaacctgggaggcagaggttgcagtaagccaagatcacaccattgcacgccagccaaggcgacaagaacgaaactccgtctcaaaaaaaaaaaaaagaatttggccctaacaaatgcaggttgtgattattaacataagtctggtttcctctctcatggcatttctttagtggccagatggtgtgagtggctccagaagactcttctcttctctgtgcaagagccaggaaggctctagaaaggaatgtctgaggaagcatc

SEQ ID NO: 102901 - DNA, 1050 bp, Homo sapiens
tgggctacttgtaactgaatctgaaaagcattttggcttctcttctgtgcatcgtgagttaggtctgccagatagcattgtccagttaattctggctcatggagttcctgcttggctttcattgaagctccaaggaagcagaaggccatggcagaaaaggatttctacaaagggaaagggacttgcatggctgcacttggctggcagaagctgggctgggacgggaggacaaacacctccctgtgcaggcagtgggttcagatggtcttggctggaaggagggcagataatggtgagaccacgtttggagggagggcagcatggtgtcatgggcttggggaggaaaggagaggaatggccccttcttcagcactgactagtcgtcctgcaccgtggagggtgttccgtcttattttccagcgctcacaactaggagccagcagttcagttttagccatcccagctcatggattatggagctgggacccacgcttgctcctcctcttgctctgcgttgcccatcttagctgtgcccttggccgccactctgactccagtgaatcacgtagactccttgggcctctgaattcctgtccgtaaatgatgaagctgaatggcagcatttttaagatccgttagttttgtgattctaaataaaattaagtcatgttgctctgagttcccagaaaattattttaagatccgttagttttgtgattctaaataaaattaagtcatgttgctctgagttcccagcaaattatttggaaatccctcttggtggatgtcccaaagcagccttcctgtaggatcctggttgtgtctggcttcctgcagtaatgtggattggggtggattggcctctgtgtgcacccttaatgggaaccaggacactgctttgctggctgatttgttgtcctcccttactgcccactggccagtctacaggtcaccaccaggactggaacagatttcagaggccgtgcaggtttcatctggggcaacgtgccaaagtgcagagcgtgggcagcgggaggccctgccgtccgc

SEQ ID NO: 102902 - DNA, 1022 bp, Homo sapiens
tatagagacacccattgctcaggaccccagggccttaacagggagtacactggcttctgggaagcttgatggagttgttgctgcataggtgcagaaaatcccagcagtggagtaaggcctgaagtaagcccccactgggctctgtggggcctggggcagcctcctctgttgcagggccgccagcatctccagcagaagtgcagtgcttgctctggggacacaggggccttttggaatgagcatgtggacttggcttatggattgtgcctaccccagagcgttgctgtgtctctcaacacacacagcttccatgggctgctcactccaattctgatggagagggcatttatgactctgtccgttggtttgttttctcactgaagaggaacatagatgcacctgctctctgggcaagagatgtggcagctgcaagctgcacaccctgttctgaatattgcccagaccagaatatgaattacttggtcataaatcagtgtcttgtctgcagaaaacttggcaatgtgagggacggcagctttaacttgattcctgggaggctgccggcctcaaaaaggacaaggactggcaatcagatgggcattctctctaatttgggaggctttcgggcttcctcacggagtgctgctcctggggacgtaccacaagaacctcccttgtctagttttgttctgacgcttgggctcattcacctgactgtctccttgcttgtctggctctcaggaaagccttcccggagaggatgtggctgacccctgcagccatctctccacagacaatcatggccctgagcttggctgtccttggttgggtacatccaaggctctgcctgccagggtaggcactggccaggctgtgggatggcagcgttgctgacttgtgctcctgagtcctgggggccctgagtgagcctccgtgcaggagtcgggctgggctgagaggtgtggagagtcgttcccttaatggatggtcaggcacagcagctatgggctcaaattccggag

SEQ ID NO: 102903 - DNA, 1041 bp, Homo sapiens
cacacataggctgagacatttttctgcgaggtgggggatcgcattgagggaagaaaaggtgctctaatagcttcagcctggacttgggtccagagctttggatagaagcatctttccagacaattgggatcctgtagaaaatctgccctctgaggctcttctatgccttctgttgtgtcctgggaccccttggcatctccaggcagagcctatacagagcatccacatcagagtcccctgtgggccccagtgcctgtagttccatctcctgcctggatgctcggttcttggagcgagcttcctgagcagcctctgcaggctccaggctctggcagcatctccacgccactcctgccggcctttctcctggtggaagcagcctgcgttgcttctctgcccggtggtgacaggctgttctcgtttggaaacagaagagacaccactgcttccccacaccgacttcctaaaacatgaggctcccttctgtggtgtatgtgtaaaatgcctggctctgtatatgcacgtggtgcacgcctggccctggggtcttcacattcttcagaagaggccaggcatggaggctcgtgcctgtaatcccagcactttgagaggctgaggcaaatgaatcatttgaggtcaagagttcgagaccagcctggctaacatggtgaaaccccgtctttgctaaaaatataaaaattagccaggtgtgggggcttacactcttgtagtcccagctattcaggaggctgaggcacaagaatcgcttgaacccaggagtcgggggttgttgtgagctgagatcacaccactgcacgccagcctgggtgacagagcgagaccctgtctcaaaaaaaaaaaaaagaaaaaaaagaaaaaaaaaaagaagaacatggtgacttcacctgcccagggaggcgtgccagccaggggcccatggagaatcagatattcagccagggacaagggcatgtcagtgggcagagtgccagggtgtgggaggctctctgggtggtcgctgaccaaaaacatcacttctgg

SEQ ID NO: 102904 - DNA, 1017 bp, Homo sapiens
tgaggcctgccagtccatggacggctgcggcgtagggtggcaggcacaatctccaggggcagatgaaggtaatcacggagatactggatatcctcattggtaaggtaccagcagacatgactccaggcaaactgttccttcatgtagtagcctcgggacttgaaagactgcatggccttcatgacatgaaggttgggcacattcttcctttttttttttttttttttgagacgagtctcactctgtcgcccaggctggagtgcagggccatgatctcgtctcactgcaacctccgccccctgggttcaagcgattctcctgcctcagcctcctgactagctggggttacagggaacagtgttttcttttgtcaaaagagcctcttaagccattgataatatttcccaagcttgtaacagatacaagcctttaaagaatgacatttgcagtcacccagtaggacatatcttgagatgaaatcagagttgtgggctttgcagacaacagcagtcatttctggtggcttccgggagtggagggggactgcagctttggcaatgtaggtgataccaaaaggactatagtaattttttcttagtaattaaaaactaggctgggcgcggtggctcatgcctgtaatcctggcactttgggaggccagggtgggtggatcacctgaagtcaggagtttgagaccagcctgaccgacatggtaaaatcctgtctctactaaaaatacaaaaattagctgggcatattggcgcgtgcctgtaatcccagctactgaggtgggtgaggcaggagaattgcttgaacccgggaggcagaggttgcagtgagccaagatcgtgccactgtactccatcctgggtgacagagcaagactccatctcaaaaaaacaaaacaaaaaccagacataacaaggtcgagctcagtggctcccgcctgtaatctcagtagtttgggaggccgagaagggcagatcacctgaggtcaggagttcaataacaacatgg

SEQ ID NO: 102905 - DNA, 1055 bp, Homo sapiens
atgaccattacccagagctggcaggtgagtgtcagggtacagcccagggggagggcacaccttctccctaacccctaccaacaggacttcctgggccttccagaggaactgcgcaggctgtcaggcctctcctctgtgggccacaactggaggaagcgtatgggcactcggcgaggccgccatgagcaaagccccacttcaaggcccagaaaggtgagctccctgccacccaggagttgctagctggggcagggagccaggtacagagcagatttggacatccacagagacacccagagtgggatcccttcctgcaggacagacacatatgatgaggggcagaccctcaacaccaactccacgcacatatacccccagatggaacacactgtaccctgagacaggtccccaccaccccacgggagtgccagcgcactaagggccggaatgtcctcaggcttcacagatgtggcataggggctggcacacagtaggagctcagtgcacaactgctggatgaactcaatgaaggcggcagcatggtgtgtgatggcacggcccacactgggtttgaagggcttgttcttccattctggcaggcttggggacctggcacactactgccaactagccaagttggactcagacccaagggggttagccatgacctctgccttgtgtgatcaggtgcaaacagacaacaacccagcaggactcctcttgcagaatctggaattgctgagaagttgcatcagcaagaggggcaaggtcagacaggatttgaggccgccaggggcacctaagctgtgggtgcagagaatgggatgcagaggtagagacaagaagggtagaggtggcaggtatccctgataagggggagaccatgggttcatcctgggattccaccctcagagtcagatgcccttgggatcaccgactaatgcctctccacctcactctggactgcccaaggaatctgtcctgtgctacccacagtgcagattgcaacagggctcctcctccccacccagggccctgattaaggggatggattg

SEQ ID NO: 102906 - DNA, 2006 bp, Homo sapiens
tggatcatgagttcaggagttcgataccagcctggccaacatagtgaaaccccctctctactaaaaatacaaaaaatttgttgggcatggtggcgggcgcctgtagccccagctacttgggaggccaaggcaggacaaccacttgaacccgggaggcggaggttgcagtgagccgagactgcgccgctgcactccactctaggtgacagagtgagactctgtctcaaaaaaaaaaaaaaaaaaaggcagcagaaacatgctgtctgtagccgcctctgctgctggatcactcagcctgcctaggacccttgggacacccaggctggggatgtggggaggggcaggtggccccaggtttgaaacgcacctccaggtgccaactccaagctgatcctgcagcctcttgcactgtacccccaggcccccacccccgctgccccccagcccctgcagatggggccctgcgcctacgagatcaggcagttcctggactgttccaccactcagagtgacctgtccctgtgtgagggcttcagcgaggccctgaagcagtgcaagtactaccatggtgagtgagtggaccccgactcaggcggggagggggagaggccaaccctcctcttgcacctgcaggctgaccaccagcctgtgctgcccctcccttcccaggtctgagctccctgccctgaagaggtcggtgcagactcgggggccagtcctgcacccacctctacccctcgccgacagccagaccacaacaccagattgtacccagatagctgggattggaagtgaggaggtttctcaccccacagataacccaagacacaaatgtgcaattaaaagtttattttagaccacagcctgttgtgtgcctctctcgatggcctgtcttcagggagctccctggctgatgaggtggggtcaggatggatgtctcactacagtgtgcaatccatccccttaatcagggccctgggtggggaggaggagccctgttgcaatctgcactgtgggtagcacaggacagattccttgggcagtccagagtgaggtggagaggcattagtcggtgatcccaagggcatctgactctgagggtggaatcccaggatgaacccatggtctcccccttatcagggatacctgccacctctacccttcttgtctctacctctgcatcccattctctgcacccacagcttaggtgcccctggcggcctcaaatcctgtctgaccttgcccctcttgctgatgcaacttctcagcaattccagattctgcaagaggagtcctgctgggttgttgtctgtttgcacctgatcacacaaggcagaggtcatggctaacccccttgggtctgagtccaacttggctagttggcagtagtgtgccaggtccccaagcctgccagaatggaagaacaagcccttcaaacccagtgtgggccgtgccatcacacaccatgctgccgccttcattgagttcatccagcagttgtgcactgagctcctactgtgtgccagcccctatgccacatctgtgaagcctgaggacattccggcccttagtgcgctggcactcccgtggggtggtggggacctgtctcagggtacagtgtgttccatctgggggtatatgtgcgtggagttggtgttgagggtctgcccctcatcatatgtgtctgtcctgcaggaagggatcccactctgggtgtctctgtggatgtccaaatctgctctgtacctggctccctgccccagctagcaactcctgggtggcagggagctcacctttctgggccttgaagtggggctttgctcatggcggcctcgccgagtgcccatacgcttcctccagttgtggcccacagaggagaggcctgacagcctgcgcagttcctctggaaggcccaggaagtcctgttggtaggggttagggagaaggtgtgccctccccctgggctgtaccctgacactcacctgccagctctgggtaatggtcat

SEQ ID NO: 102907 - DNA, 1643 bp, Homo sapiens
tccatcctgaccccacctcatcagccagggagctccctgaagacaggccatcgagagaggcacacaacaggctgtggtctaaaataaacttttaattgcacatttgtgtcttgggttatctgtggggtgagaaacctcctcacttccaatcccagctatctgggtacaatctggtgttgtggtctggctgtcggcgaggggtagaggtgggtgcaggactggcccccgagtctgcaccgacctcttcagggcagggagctcagacctgggaagggaggggcagcacaggctggtggtcagcctgcaggtgcaagaggagggttggcctctccccctccccgcctgagtcggggtccactcactcaccatggtagtacttgcactgcttcagggcctcgctgaagccctcacacagggacaggtcactctgagtggtggaacagtccaggaactgcctgatctcgtaggcgcagggccccatctgcaggggctggggggcagcgggggtgggggcctgggggtacagtgcaagaggctgcaggatcagcttggagttggcacctggaggtgcgtttcaaacctggggccacctgcccctccccacatccccagcctgggtgtcccaagggtcctaggcaggctgagtgatccagcagcagaggcggctacagacagcatgtttctgctgcctttttttttttttttttttgagacagagtctcactctgtcacctagagtggagtgcagcggcgcagtctcggctcactgcaacctccgcctcccgggttcaagtggttgtcctgccttggcctcccaagtagctggggctacaggcgcccgccaccatgcccaacaaattttttgtatttttagtagagagggggtttcactatgttggccaggctggtatcgaactcctgaactcatgatccacccgccttggcctcccaaagtgctgggattacaggcatgagccactgcgcctggcctctgctgccttctaatgggcactttgggcgggtgcaggagagggaggagaaggctctaggaaagcccagtactctgcctgtactctcagagtatgagccccacccccacaagttctagcaccttcctggctcagctacactaatcctcatgacccctgacctagccacaaagccacatttggcttacggcggtggggttcctagcaggggaaaggtcatcagggaagtggctccccttcgcccttgcgcccagcggccacagtgcccagacctgggtgtggggagaacaggggctcaggaaatccaacatccctcccctctgctagggtgaggtgaccttgggcgagtctctgagccctcagggcctgggtttcccatctttaaagggctggttggtgtctctccctgggagcttagggaccctggcctcaagggagaggccgggaagcctgcctctaagtgacagtgaactcaagaccagtggactaggacccttcccgggcagagtcctgggctgaagcaatggtgaatacacgcggacactcctcactggacacttgggcagctccctgtgtggcctcgagataatcctgcctcagtttctcttggactcgctgctcacctgctggacagcaggctgggagggctccgag

SEQ ID NO: 102908 - DNA, 1050 bp, Homo sapiens
cctaagggcgtccgcagagtgaccttggctgctgctgcgccatcttggcggggggaggggtgggggtgcagcacccacgtgtggagacgtgggtcgtccatctctccgggggtcgtttccaggagctgcagccctccagcctggggtctggccaggattaaccctgcttcctcccacccccgcagccgcccagccgcgccctctgcccacccgcccgcgcacccaccgccctcggcagccgccccagcccccgccccttcgggccagccggggctcatggctcagatggcgaccacggccgcaggggtagccgtgggctcggctgtgggacacgtcatgggcagcgccctgaccggagccttcagcggggggagctcggagccctcccagcctgctgtccagcaggtgagcagcgagtccaagagaaactgaggcaggattatctcgaggccacacagggagctgcccaagtgtccagtgaggagtgtccgcgtgtattcaccattgcttcagcccaggactctgcccgggaagggtcctagtccactggtcttgagttcactgtcacttagaggcaggcttcccggcctctcccttgaggccagggtccctaagctcccagggagagacaccaaccagccctttaaagatgggaaacccaggccctgagggctcagagactcgcccaaggtcacctcaccctagcagaggggagggatgttggatttcctgagcccctgttctccccacacccaggtctgggcactgtggccgctgggcgcaagggcgaaggggagccacttccctgatgacctttcccctgctaggaaccccaccgccgtaagccaaatgtggctttgtggctaggtcaggggtcatgaggattagtgtagctgagccaggaaggtgctagaacttgtgggggtggggctcatactctgagagtacaggcagagtactgggctttcctagagccttctcctccctctcctgcacccgcccaaagtgcccattagaaggcagcagaggccaggcgcagtggctcatgcc

SEQ ID NO: 102909 - DNA, 1210 bp, Homo sapiens
gtaggggcctgggagcaggacactaggatgccacctgtgtgtccgtgggtaagccagctgccctcacagctgctgcttgagacacaggccagggtagatcttcgtgtctaacagacctgtgtgtccactgaaccccagggaggtcatctatgggcaaaccccctgaaaccccaacttagacacatacacatatggagaccctccctcagcagaggggcagagcctccgtcatcatgcaaagagtcgcagcacatgcctgcggacgggtgttcagtcactcaggcagcctttacaagagacctgtgaggaccaggctctgggactccacggtgaatgaggcagacacagccccatcctctgtgtcagtctgaggtgggtgtcagccatgtcattgtccaactctaccatcacaacttgggcttcgagcaggtggagacagtggtaagcggggagaggcaatagtgggcatctcactgggtgacctgggaggaccctgggcaggtgatggggaagctgaggctcacacatcctgcgggtggggacccagcctgaagaatgggctggtgtcacacagcattggagctgagactggggtctttagaatttcctaggtgggggcctgggaaccaacaggggctcaaggaaccaaggtgtccccacagtaagtggcactgtcaggtctaggatgggggtctcgggacccctggtcctggttctttccactgaattcagacacttgtatttgcctaagtatgagcaaaccacatacacatgtgcccatgtggccagggagaccagtgcgctgaagctgaggcccagagtacacctggcctgtgtcctgagtgttcacacacccaccaagcatccaggggcaactcctggtgcctcagccatcgggggctgtcccttccctgaggcccaggcccctccatctccctccaggatccttcggttcccatggcagttggtgcaggagcaggtgcggcagacgatggcagaggccctaaaggtatggagcgatgtgacgccactcacctttactgaggtgcacgagggccgtgctgacatcatgatcgacttcgccaggtgaatgggcggcctgggacccctccgggaacagcctcgcctgccagcagccactgaccccgcccccacccatctgtaggtactggcatggggacgacctgccgtttgatgggcctgggggcat

SEQ ID NO: 102910 - DNA, 1016 bp, Homo sapiens
ccctgtctctactaaaaatacaaaaaattagctgggcgtggtggcgggtgcctgtagtcccagctacttgggaggctgaggcaggagactccagcctcaaaaaaaaaaaaaagagttgggattacaggcatgagccgctgagcccagccacagctgcaatttcattagattgaacggtgtgaaatcatcagtagtgggccactgttttactccctgcattattcaatcatgattgctttcagactttcattagtttcactagcttcgcgctgtaagagccaagaggcagagccacagggctgggctgcctggtttcactccccactgcagggctcggttaagcagagtgtaggctaagagaggaatggagaaggtggaaggtgtctctcccttccaacgctcatctgatgcaccagccaaaccaaataccacctgggcctttgaacattgccaagcctcatccgctgttgtcattttgcccacctccacagctgcagggacagccgtaggcccggaactgggatatctcttcctaggggcctgcctatctgctcagctgcactgcgttttaggggtggggaagctaaggcacgagattggggtcccaaagcatgcccagaccacccaggcttccagatactaggtcctcctccttcaggcctcacttcgttgcttttcccctgggctcagttccagtcctggctgtaagactgggaaagccactgcttgagtcaggacctcattggctatttttgtccgtgagaagtcctctacaccacgacttgggaggcagcctgggagaaagagaaattagtcgtggctcctttaaggggtccgcggaggcgcgcccggccttttgtttgagcggcggcgcgcgcgtcagcgtcaacgccagcgcctgcgcactgagggcggcctggtcgtcgtctgcggcggcggcggcggctgaggagcccggctgaggcgccagtacccggcccggtccgcatttcgccttccggcttcggtttccctcg

SEQ ID NO: 102911 - DNA, 1171 bp, Homo sapiens
gaagttccagctggaggacgacggcgagttctacatgatcggctccgaggtagcccggggcgcgttctcgccctccccgggctcggccccgcgggagccccggggcgggcccatgcgccgagagcgcgcgtctccattcatcggggcgggcgggcgcgcgcgcgcgcgctcggggctgtggggcgtggcctagtgggcgtgtcgggtgtggcccccgccccctcatcgacctgggatttccttacttatttcgccgaggtccgccgccttcagtgctgccaagattttggcgccgcgaggggccccagtggttccgcgctgggttggtttccagtcagacgcaaagaaacgggatattgagttagcccctgcgacgcttgggggactgcactgctgcctttgaccctttttagatgtcgtaaatttcacgtgcacccctccccgtattgctacttgtgggaacctcaaatggcaggctggaaaccctggacttagtgagggctcatccccattgtgtttgttgcctcttaggtgagcagtggaggtcttttgacctttgtttaccggtgaagaaacagattggaggaagatgtttgcttttgggtgaataagggccccatgcctaagctagatctttcagcagttctgaagcgattgacactttccatatctgtgaactgattctgaattattacaggggaaagagcctaaggatgtttaacccttaactagagtggctgcattttgttgcatcaactggatgactgacttcaggaaaactctactggcctttgaatgggtgtttgttccaagtctattaggttcttgttttttgttttttatagagacagggtctggctatgttgcgcaggcaggtctccaactcctgggctcaagcagtctgcccgtctgggtctcccaaagtgctaggattacaggcatgagccaccacacccggccatatattaggtttttacagattgtctcaaactagccttttttgctccaaaggcagtccccagctagtatatgttacctttttaaaaaaattatggatatacagttcagatgtacaaatgtcaagcagtagaatctcatgtaaggaagtaagtgccaatcctggagaattaaagctatcatgaaatgccaagagtttcttctccttatagca

SEQ ID NO: 102912 - DNA, 1020 bp, Homo sapiens
aagccgtcctcccacctcagtctcccaagtagctgggactacacgcacacaccaccacacccggctaatttttatatttttagtaaagatggggttttaccatattgtccaggctggtcttaaacttgtgagctcaagtgatctgcccgcctcggcctcccaaagtgctcgattataggcgtgagccactgtgcctggcctccactaatttttataaaacaaaaaatataggattcaataaaattttcacgttgtcacttaaattacaactgttcaaagatgccagtgctggggaggtagagccagtgcctgtccatctgccacagttcagaatggtcctcattggccagtaggcacctgcctaactgcagaatgcaaaaggtgtcaaatttcagcctgtgatactaggcgagttgtttacctgatctaatgggtgtaaaagtaatcagtttggctctaagtaggtgacacttcaaaagaaagctttcatttattagttggagcaaattgagaagctgtgcgtggccaagtgggaagaaccttgggaggcctggttccagccctgctctgccttgctgtcgtgtttctcatgtgtataatgtgatgcttagactagatggtctccaagatcttccccaaaacacattttagtttctagaaagctaattacagtcttgtctttcagccccttgactcctgggcctcccagtaagaataatcttcctgagacccaggctgtaagagactcagttggagaggcagtttgttcttttgggcctgacttaatcatcagaccttcggagtttagggaagagttcaaggtcagagctctattgaaattcagtagctccagtgatagtagtggatggacggtctcagcccactgccctgtggaaaacaggcactgtattcagagaggtgggccagccatagcaacatacccagtgcctccatgcgccatctgtggagctgtcttgggaaggcatctgcatttactaagagtgtgtgtcactgttctgc

SEQ ID NO: 102913 - DNA, 1921 bp, Homo sapiens
ccctgtggtgctgcgacccttataatgagccttcttgctttactcataggtgggaaactacctccgtatgttccgaggttctctgtacaagagatacccctcactctggaggcgactagccactgtggaagagaggaagaaaatagttgcatcgtcacatggtaaaaaaacaaaacctaacactaagggtgcgtcttcacgagggtttgtaaacctgtttcaaaaccactcgcttatgtcatgaagataaaacgttttcactccagagtgtcttcactgcagccttggccttagtcgggcagggagcatcccggggtgggccgccctgtgagcactccaggcaaggaagtggctccagggagccattggtggtccactgtcagttatttccagcagggccattgggtatgtgagcgggccggggccaggacactagcaggtgctgtgaagacatgttggtctcaaaacgttttaggaatgctgcgatgctctgccatctgtcgtgggtgtgtcgccataatcatcttccatgcagcccaagtggcgggtggtggtcccagctcccactcccctctggggctttcactgcttgcttcctggagcacatccatcccatagcacttcatcctggcagccagtgtgctagagcccatgtgcatgtccctgctcctggtggcctgcgtgtgcctggggcttgctaggtacactagtgaaactagtgggctttgggtcacggcagctctgtgcagggtgaaagggtgctcttcagacactctgggggctctgtgggagacactcccatggagacatttgggtgtggacacagcatgtccttgggcaggtggcaaaactgcttcccacgtggcaatggcgccttgtagagagctgccctgggcctgggtgtgtctgtgagcatgtgcgcgatgcttcgtagtctgccctgtttgtttgtgtctgtaggtgctgctgtggttttgtccactgcgggaaagtagtggttcttttaatgcaggagccggagcttctttttgatctgctgctatgacatttccactcacttgcttaaaacagtttcctttttgttccccctcctcccctagcagagcatcagtcgctaacacagtgagtccccagctttgcttccccctccgcaagtccctgggctaagtcttgggagataccttccccataagcgattgatttctccaggagaagccagactgggcccacagacaggtagctcttgacggagattccccggaagagctaggggtcgagctgcctagaatctgtcctgcttcccaggcagcacgtgtggaccggctcggggatagaaattcgtgtttggtgtgaagcagctctttccaactctctgggctcttgttttaaaagaaaagtattcttcatcttccattccatctccccaccttgcatcgtgttgtggattgtggtggtgtcagacctcttcccactggggtgttactctgggagctttcttttcccctgagtgaggaccaagagaatatgttctggagtcgagtgtccccgctggtcgtgctgtattgtagttgctggtgctgccctgagcacttccctctgccccgagccagtgctcctggggcagattagtccaaatcagtcccattggaggctctacccagcaggacttgtaagtaaagcactcagtccagattgcccttttggaagaggccagcattcagcagtagtaagtttgacaccttgcttttcccacctcccgcatgcgaggaccttgatgtgctgcatccacttggctggctgctgtgtgccaccgccaccagcagagtgacccagtgatgtttgtctgttacagatcacggatacacgactctagccaccagtgtgaccctgttaaaagcctcggaagtggaagagattctgg

SEQ ID NO: 102914 - DNA, 1039 bp, Homo sapiens
gagatggaatcttgttcttgtcgcccaggctggagtgcagtggcacgatcttggctcactgcaacctctgcctcccaggttcaagcgattctcctgcctcaacctcccaagtagctgggattacaggtgcctgccactatacctggctagtttttttttctttgagacagagtttcactcttgttgcccaggatggagtgcaatggcgtgatctcagctcactgcaacttctgcctactgggttcaagtgattctcctgcctcagcctcccagatagctgggattacaggcatgcgccaccacgcccagctaattttgtatttttggtagagacgagtctctccatgttggtcaggctggtctcgaaaccccacctcaggtgatccgcccgccttggcatcccagagtgctgggattacaggcgtgagccaccgcgcccggtcctgatttttgtattgaaacactttttaacagttccctctgtttttatacattttcttagccaggtttctaagtttcttctatatcattggaatttctaagaaacgtaagccaagtcctggattccggagaacagttacaaatgcttggaaagtgggactcgtggggcacagtggcttatgtttgtaatcccagcgctttgggaggccgaggcattgcttgaggccaggagtttaagaccagcctggggcaacacagcaagacctcatttcttaaaaaaacatgtaagtgggaccaatttgtcagaaaaatcagtggctcacataaactcacaaaagaaacaacaatagatttgaatgtataaaaacttagaacctggctgggcacggtggctcacacctgtaatcccagcagtttgggaggccgaggtgggcagatcacctgaggtcaggagttagagagcagcctcatccacatggagaaaccccatctctactaaaaatacaaaattagccaggtgtggtggcacatgcctgtaatcccagctactcgggagcctgaggcaggagaattgcttgaacccgggaggtggagattg

SEQ ID NO: 102915 - DNA, 1050 bp, Homo sapiens
ccatcccctttccctgatcagtgggccctggctctggacactgagtggagcagacagtcctcctgcccctataggttccacctcctgactggcactgtggcatcagcatggtccagcccgtgctgtcctgtcaaggaccacctccacagccagtggccccttcctccatctcagagacagagagacgctgggcacaaaagccctgttgaaagttcactttgaagggaagcccatggggtcatggcgacaacacttgttatggaaaggccctggcgcctccagcagctcccttgaggttcaggtgactggagcatccactgggtgccagcagtgctgctgggaggagcagggcacagacaggggccaaagctttctgaggattctccatctatagctggaaaagtcattcctctcactgcctcccctcctcgtagcgagaaccctctgcccacagtggagattgccatccggaacacgggcgatgcggaccagtggtgcccactgctggagactctgacagacgctgagatggagaagaagatccgcgaccaggacaggaacacgaggtacccctggccctgtggtcctgggctctgcccacaggcacctggctttccaggcagaggcagggccattgcctttcccagtctcccatggtctctgagacagagtacctctagtgctgctagaggcaggcaggcttctgggtgataaggccccatccaaacgccagggtatgtttccctgcatggaacaaacataattcctcaggctgagggtctgaccacagcccagatccaggttttggggtccctggagtgatgagcagggcctgagtggcagacaggcgaggctgagagaaggctgggtctgaccctgctgggggcccacatcctgcctctgttcccacccctacacttggctgccctgtagagccttgggaagggcagcgcccaggctgggagctggccccgactcattgccctccccactcctcttccaggcggatgaggcgtcttgccaacacggccccggcctggtaaccagccc

SEQ ID NO: 102916 - DNA, 1050 bp, Homo sapiens
tggccactcccctcaggacacgctgcttatgccctggggcccctctcccatccttgctggagttctcctcacacctggctccatccccatcttcctgccctcccagctgctgtgctcttacagcccctcaagccagccggcccacataatttgcatcgtcaggacggatctactgatgcttgcacggtcctgatgggagtgaggatgggagggtcagggttcctgccccatggctcccactcctccactattctcaggccctcccctccctgggtcctgcctgcttctgggccttttaagcttgtccttcacggccaacccggggctggcactctgtgcaaggctttggggcactcatgctgtggggcctgcagggccaccaggctgtggatgggggcctggggcaggctctgctggtctaggactctgggctgtggagggtgaccccacagtccgtggctgtctcacagggattgcggtgggccatatctactacttcctggaggacgtcttccccaaccagcctggaggcaagaggctcctgcagacccctggcttcctgtgagtgttgagagccctccctccctctccccaccctcagaaggatccccaccgatggggacctgtgctggcctgtgctcaacacgggcccctccccacagaaagctgctcctggatgcccctgcagaagaccccaattacctgcccctccctgaggaacagccaggaccccatctgccacccccgcagcagtgacccccacccagggccaggcctaagaggcttctggcagcttccatcctacccatgacccctacttggggcagaaaaaacccatcctaaaggctgggcccatgcaagggcccacctgaataaacagaatgagctgcagtctcttggcccacagcactggcttccccatctcacctggccacatccttctatgcctgccccgtcctcactcagtgtggcctctcagcccaactgcaggtggtaggataggggtgcccacagagggcaaagaaactgcccatggttgcctggcagagc

SEQ ID NO: 102917 - DNA, 1401 bp, Homo sapiens
gggctcagtgcgtgcagtggaatgaactgggcttcatctctggaagggtaaggggccatcttccgggttcaccgccgcatccccacccccggcacagcgcctcctggcgactaacatcggtgacttagtgaaaggactaagaaagacccgaggcgaggccggaacaggccgatttctagccgccaagtggagaacaggttggagcggtgcgccgggcttagcggcggttgctggaggaacgggcggagtcgcccagggtcctgccctgcgggggtcgagccgaggcaggcggtgacttccccactcggggcggagccgcagcctcgcgggggcggggcctggcgccggcggtggcgtcacaaaaggcgggaccacagtggtgtccgagaagtcaggcacgtagctcagcggcggccgcggcgcgtgcgtctgtgcctctgcgcgggtctcctggtccttctgccatcatgccgatgttcatcgtaaacaccaacgtgccccgcgcctccgtgccggacgggttcctctccgagctcacccagcagctggcgcaggccaccggcaagcccccccaggtttgccgggaggggacaggaagaggggggtgcccaccggacgaggggttccgcgctgggagctggggaggcgactcctgaacggagctggggggcggggcggggggaggacggtggctcgggcccgaagtggacgttcggggcccgacgaggtcgctggggcgggctgaccgcgccctttcctcgcagtacatcgcggtgcacgtggtcccggaccagctcatggccttcggcggctccagcgagccgtgcgcgctctgcagcctgcacagcatcggcaagatcggcggcgcgcagaaccgctcctacagcaagctgctgtgcggcctgctggccgagcgcctgcgcatcagcccggacaggtacgcggagtcgcggaggggcgggggaggggcggcggcgcgcggccaggcccgggactgagccacccgctgagtccggcctcctccccccgcagggtctacatcaactattacgacatgaacgcggccaatgtgggctggaacaactccaccttcgcctaagagccgcagggacccacgctgtctgcgctggctccacccgggaacccgccgcacgctgtgttctaggcccgcccaccccaaccttctggtggggagaaataaacggtttagagactaggagtgcctcggggttccttggcttgcgggaggaattggtgcagagccgggatattggggagcgaggtcgggaacggtgttgggggcgggggtcagggccgggttgctctcctccgaacctgctgttcgggagcccttttgtccagcctgtccctcctacgctcctaacagaggagccccagtgt

SEQ ID NO: 102918 - DNA, 1145 bp, Homo sapiens
cgtggtcggctcacctccagcaccccacgtggtggccctaggtacaacggattccggcgggcagagcgccttagatcccgagtctgcagcccagggcagagtgccaacttctcctcatcccttcgtacgccatagaatggaaagacactggggctcctctgttaggagcgtaggagggacaggctggacaaaagggctcccgaacagcaggttcggaggagagcaacccggccctgacccccgcccccaacaccgttcccgacctcgctccccaatatcccggctctgcaccaattcctcccgcaagccaaggaaccccgaggcactcctagtctctaaaccgtttatttctccccaccagaaggttggggtgggcgggcctagaacacagcgtgcggcgggttcccgggtggagccagcgcagacagcgtgggtccctgcggctcttaggcgaaggtggagttgttccagcccacattggccgcgttcatgtcgtaatagttgatgtagaccctgcggggggaggaggccggactcagcgggtggctcagtcccgggcctggccgcgcgccgccgcccctcccccgcccctccgcgactccgcgtacctgtccgggctgatgcgcaggcgctcggccagcaggccgcacagcagcttgctgtaggagcggttctgcgcgccgccgatcttgccgatgctgtgcaggctgcagagcgcgcacggctcgctggagccgccgaaggccatgagctggtccgggaccacgtgcaccgcgatgtactgcgaggaaagggcgcggtcagcccgccccagcgacctcgtcgggccccgaacgtccacttcgggcccgagccaccgtcctccccccgccccgccccccagctccgttcaggagtcgcctccccagctcccagcgcggaacccctcgtccggtgggcacccccctcttcctgtcccctcccggcaaacctgggggggcttgccggtggcctgcgccagctgctgggtgagctcggagaggaacccgtccggcacggaggcgcggggcacgttggtgtttacgatgaacatcggcatgatggcagaaggaccaggagacccgcgcagaggcacagacgcacgcgccgcggccgccgctgagcta

SEQ ID NO: 102919 - DNA, 1722 bp, Homo sapiens
ttcaaaaaaactttaagctcccgttgtattggttattagggtcgagcctggggaagacccctataggtgtgtgtgtgtccttgtgtgtcgggggtgtggtgttcagacctctaatagggctaggaaccgggcgaccacagcgcggaagcttgagagggaaacccacctggcgccaggcaggagggtcgggggagacagggtgggtccactaccgggttaaagacctgtagtgggtggggctacacgtagggcggagacgatgggacttccggaaatcagccggcacacgtgacttttgtttgcagaagcgggaggtaccctaggcagccaatcggggagcgccgagtctctgtccagccaatgagaagccaggttgctgtggcgcctcgcccctcctccctggtccgcgagccttgggtacccccagcttttcttccgccagagctgtttccgttcctctgcccgccatgccgttcctggagctggacacgaatttgcccgccaaccgagtgcccgcggggctggagaaacgactctgcgccgccgctgcctccatcctgggcaaacctgcggacgtaagcgtgggccgggcagcacggggcgaggggaggttggtgggccaggggtccggccctgtccctgctccgcctccccgacagtgaccccgaatcttttccccagggaccactccccactcctttcctcacgccaagctctgactttccgtgctccacgatcccgcggctccccctccgcacgtctttcccttgtcgccctccccagtcatgacccgggcgtgaccttcagggaccgcggcccgtatcgggatccctgccccgcgaacactgcgcgtttcggctttcgcgcgctcgggtcccgtccccagaggtagcccggccggctccaacttcgggcaaaacttttcatgtccccctcagcgcgtgaacgtgacggtacggccgggcctggccatggcgctgagcgggtccaccgagccctgcgcgcagctgtccatctcctccatcggcgtagtgggcaccgccgaggacaaccgcagccacagcgcccacttctttgagtttctcaccaaggagctagccctgggccaggaccggtgcgtaggggtagtaggggatccatgtgggactgccgcagactggagccactgatcctgcctcagggggaaaaacccatttcttgccctgcccagtaaggacacatcagggtctggagctttggggccccctgaccccttaggttcctgctgttaggaccatcttcaaagtgcgagcaggattgaatgaatttctggctctgctcctcagtgtgtaagtctgtgaaccgggaaggctctcttttaacacccccggggcagtgcaagggtcatgtgggattgtctgtgtgctgtacctgccttggcacctgacagggtaggtacacgtggctgaagtgtgattttctagaacttttccaggctggtcagaaggaattctgggtatgttctgaagttacgtattttggacctgtgtcccagccaggttccaggtgaagttcacgggagactcacagagtagtgaaagaccattggcctggatgtctagacatctgctttctgggtcctgcatagctgggggaccccagacaaacttggaaatgaaccatctccagttggcaacctcctcttctgtgaatacaggggaaaagacctccctcccccacaag

SEQ ID NO: 102920 - DNA, 1052 bp, Homo sapiens
actggaaacttgctgttacctctgagaggggcatgttcacttatggcccagacattagtggcggggttggtggggtggggggtcaccctgtgctcagcctttgagaaaacaggtggctgaggtactgtgcccttagggagcctgcaattaggaggcagggtacccctcagtacacaaactgatggagatgatagagtgtacggcacacacaccgaggctactgtattgtgtgtctgtcctagctgggtcatgatgtgcggctacctcccacacctgagtgtcccactgccctgctgggggttggggaaaatcattattgggatgagcaggtttgcaaaatgcctggtggactgaggcaggctgtcctgagtacccacagtgggagtacctggcaggggtcttgcaagatgtggtattagccaaggagctgatgatatctttttctctgtctcctgaaggatacttatccgctttttccccttggagtcctggcagattggcaagatagggacggtcatgacttttttatgattgggcacggagggatccagggcatctgtgaactggctgcttcttccagagagatctcttggcagagtgagggcctggagataaccagctttggattatcccgcatgcaacattcctgtgatcacataatcctcttcttcatcctcatatgaaataaatgaagagagcttcctcattcaaacatgacttcttaccttctattatctctcctgggcatctggggccaccatgggcagcagggctggtggataagaccgtagggaacctggagggggatgatttagactgctcagatctggggctgggagactcagcctggaggctctgctctccacacccatctgcaggcctgtgggaaggtgtgagcagctggtccagctggggccttcctgcagactgctgacctgaggctcctgtcctcagccccaaaatgggaccagacctctgtactcctcctgaagtctactccctccatgactggctgggcagcctgccacgccactctccccttttccccactg

SEQ ID NO: 102921 - DNA, 1003 bp, Homo sapiens
gttcatggcctctgtgttgtcacttggccctcaactacctttccatcctccattcacatccctgctctaaggccttgtcttctagttttcccatcacacctcgctctccctgcctctttgcttcactgtcttccactgcagtgtattccattcttcaaggcttgatgcagtaacttactcctttgccttccttaatcgctttgaattgttctttgctgcctttagatgttgcctgtgtttcttttcgtatcattcaggttttgaaaaaaataataggcttgttacctctgctagcagtgatccctgggggcaaggattgttctcactcttttgtgtgcctggcacctgatgcattgccaggaaatgatgaatgctatcgtaagggaccaaggagctccttgtgtgttagaccacaccgctgtcccaaggcagctcttcactggcctgtctgcatagagctcagggaaggactggttcctggtggaccttggcactgtgaccttcctggctcttcataggccttgtctcagtttgtcctatttcctttctaggagagttgtggactggggcaacctttgccagtgatgagaagtgatgctcgtggcagtgctgaatctctctgaatatggtaaggactgatgcctgcctattttgcggacctcagtgttcttttgttacgttactcctgggggcgaggggcattttcctgttagattctgaaggctcttattatggagtagccttcctcccaggaaggctgttggcacctttgagggtgtgagattgcttgcctggtggttgaagcggcttgcaggaccttgtcacagttgctggaaagacataaagttaacatgttttgttgaaatctgttgttccattacctgggtcttctactgtgttgagctgttgctggggtgtccccagtgtctgttgcttttgcagtggacagtacccaggacatactttctgcacagattggcataaccctcccccctcggccccc

SEQ ID NO: 102922 - DNA, 1049 bp, Homo sapiens
tctcaccccctaccccttttagatttgataatttgctagaatgactcacaggacttagaaaaacactttacatttaccaatttattatgaaggatacaactcaggaacagccaagtggaggagatatttatggcaaggtatggggtggattcacagagcttccgtgccctctccaggtgcggcaccctcccagcaccttgatgttgttcaccaacttagcagctttctgaaccctgccctttagggtttttaaacagagattccatcacataggcatgattgattaaatcattggtgatcagctcaatctccagcctctcttcccttcctggaagttgggaggtgggggagctgaaagttccagctatctaatcacatggttggttcctctgactgtagccccgccttacacacatttttggcttaaaaaagacagatctttatgctgtatgaaaacatctcttgtcttgatttgcaggaagcagaggcttttgcattgtaccacaaggcccttgatctgcagaaacatgaccggtttgaggagtctgccaaagcctaccatgagctcttggaggcgagcctgctgcgggaggtgaggcatcagcaggccaggcagtgtgccgtggtggttagtgcatgggctgtggggctgggtactctgggccttacctctgctctcccatttcttggctggggaaccttgaaaacattatttcacctctctgcccctatttccccacctctaggtatctgcctcattgagtttttatgagggttgagtaaatccagtgaagcatgtaaaatgattcctggtgtaagtgcttgttaaaggccagctatcgttattacttaatcttcacaaccactctgcccagtagctgggttttacaaatgtggaaactgaggcttagtgaggtcttgatggctcaaagccatccaagtaagtgaagcattcgaaccaggtttggagtccatggtttgctgatacctaatgatcctactggcagcacattttagcaaatgccatttgagtaaaagaccatgagctt

SEQ ID NO: 102923 - DNA, 1188 bp, Homo sapiens
actttaacttttgctatttagggtaggaattatttttcttaattacagaggtcagacactaacgttttagttaaattagcaattgtctatgctcatgtgatgagttatagagttgggagctcagtctcttgattcctaatcctggagtgcctgcagtgaagctctaggccttctgcccccaggcagcctgctgatactttgtcttttatcttatacctggagctgctgactgggtctacctatgctgtaaatgttattcgctaggcttgaaccctcaggcatggcagtagtggtggggcagtttctctctgttggatgcccagactctctgcaaactattaatacctcagggtggtctgttcttctctgtgcgcttggagtaggagtggtcttataagaacacatggtgcagtgccttcattttccagtggtggacaacactagactggctcaagggcctgcagcagaggccagcctggaagccaagtatcctgctggctgcttgctgaggcttcaaggtctagttgtcacttctgttctgttttgttcacaggcagtttcatccggtgatgagaaagaggggttgaaacaccctgggctgatactgaaatattccacttataagaacttggcccagctggcagcccagcgggaggatctggagacagccatggagttctacttagaggtgtggttttggcagtgcttagctaccttggtgttttgaaagctcttggtggaggggatgaggttgcggtcttgtgggccaaaaagaagagtttgtagtggtggatcaccaagctatagtacccaaggctctagggtaggtccataggtgataacaattagtactgaccaggcctggagagcaggggctggggcagagcacatgcttggatgcagaggcctgcatgtgaattcttcctttgctgctcagtgcacgtgtggctgtgagtgagttattcagtctcttggtatctctaggtctacaccaatatagtggtaataataaaaaagagcatagttgtgaaagttaaatgagttggtatgcataatagtatcaaaaacaaagtctgaaactgagcattcaatatattaatacttacagtcataatagtattgctgttatttcatgttactatcagtctgtctctgggcacctctaaagcaccagacactgcgctgttt

SEQ ID NO: 102924 - DNA, 1348 bp, Homo sapiens
cccaggctgctctcgaactcttggactcaagcattctgcccacctcagcctcccaaagtgggattacaggtgtgaaccaccaggcctggccatattttcttttctttcttctccttttacttattaaatatgtaaggaatacagatattcagattgacaaaatatatcaagacaatggggaaactgaggcaggaggatcacttgaggctaggagtttgagacaagcctggataacatactaagaccgtgtctctacaaaaaaattgaaaattagctaggtgtggtgatgtgcctctgtagcctcagctactcatggagctgaggtgagaggattgcttgagcccagaagtttgaggatgcagtgagctatgatcacaccactgcactcttgcctgggcagtagagtgagacccagtctcaaaaaagaaaaattttttaaaaaaattctaagttaaataacttggtccctgtaactttttatatgccattatcactctagatcttggaaacgtgcgactccaggaaagatgagctggcattacttgtcagttataagatagtcatggcacttttgccatttccctgggaagttcaagtggctgtgccagtgccgtgctcctcccgtccccggggtgcatattcaaggagagatctgactgtgtgtgtgtgtgtgtgtgtgtgtgtgtgtgtgtgtgtgtgtgtgtgtgtgtgtgtgtgtgtgtgtgtgtgtttgccctctgcttgtgtcgcttccaggcagtgatgctggactccacagatgtcaacctctggtataagattggacatgtggccctgaggctcatccggatccccctggctcgccatgcttttgaggaagggctgcggtgcaatcctgaccactggccctgtttggataacctaatcactgtcctgtacaccctcagtgattacacaagtgagtcatgctttgatgctttcttccatgtgccagtggtttttggaacagcagaggaaaggcagtttgggtaaactgaaagccaaagttaacactgaaggggtttgccagactgtcagggagaatggcaatgttcttagatttctgctttattctgcatctctttcttgatttgttaaatgccttgtagtaataaagtagcatgttttctgaatgattttactttttttttttttttttttttttgctttgcaaggttttgtttgcttgacagaagtggctatcttatttcctccctgcactgtcccattttgtgtgtcttagtctgtttgggctgccattaaaaaaaaataccatagattgggtggctaaaacagcagaaattgtctgggtatgttggctcacgcctgt

SEQ ID NO: 102925 - DNA, 1890 bp, Homo sapiens
cctgtcttctcaacctggctcccactatgctctaaactctcatgccatcttcccacctctccacctgtcccgccattgcccctcctttgccaggtgtcttcccacagacacacttctgaggtgacccaagaatacctgcccctcctgcccagactgtcctgatgcctgccagcagggccacacctcagagctgctcacttacaaacttatctgtttctcaggtcacctctctgttgctttctgagctctagctgcccttccccacagccctccagcccagccaactccttttgccctctggtcttccttggccctggaacacacctgtaggggttgattagtagtgatttatcttggcgtctatccccggtgagcctgtccctctcctgaaggaactacctgttggcagagataggaactgagggaacatctgtcatgagggagctaaccttgagggagacagataagaagcacatgaaacagataaattcatgagtagctctgaggtgtaaccctgctgggaagcaccaggacagtctgggcaggagggcaggtgaggttaggtcgcctcagaagtgtgtctgtgagaggacacgtagggcctccaagcccctgccctttctgtatttttgggtcgtgatacactttggtgagcttcacttttccgatgactttttgttggcatgggcagtataggatagttacattcttttaagattttctaataataattgagagaaagattttatttttctgtggcttttcagatattattgtgatagtgttaatacatatgaaaactctttctctgcccagttttgaattgtcaaaggaacaaagaatattagtcatttctagtgtatgtgggtattaagaaggctatttactgccctacccaggccagactgaagtggttattttatttataggaagaaaaatacacattaaaaggtattaacctaaatgcatttttgtgtgtaaaatttcagcctcagttttagtttgtaacatgataatttctccctgtctcacatgcttttagtgacatgtcgattcacgatgtttcggtgagtgcagctgagacacaggcgattgtagatgaggccttggggctgcgaaaaaagaggcaagcgctgattgtgcgggagaaggagccggacctgaaacttgtgcagcccattcctttcttcacgtaggttgtctagcgtctctgggagtgctgggtcggccagtaggccctgttgtgggatgctgccctgcacaggagggagagaccttgaggcttgatcctgggttggtggtatgaatgggggctgggtgcacagtggccaaatggttggaggtgcatgcttacttgattactaagaagcaggtcagctctctctcaagtacctccagtctcagtccctttttgctgttgctgttcttgaccccagccacctgccacattcctgtaaggcccttctcagcctgccctatctagagggcgaatggaaactaacatttgccaagcacttgccaggaggaaactgatgttcagagtacttaaatggggagcccagagacagtcccgggtctgggcttctccgctctcaagtccatgttttctctctagggccacgtggggagccctgcgagatgggcctcaatatagtccttgccagccccatgatgtgagagtctctctctctccaggaagggcaaattggtatcggcggttccctggagttgggatagtttagtcccttagcgagctctggaattcaatttctgtatttaaaattctgacattgaatctttaagtttagcatgacttagcagtagcattccatttctattccccaccccctacctccacccctgtctgcctactctgagggagctctggcc

SEQ ID NO: 102926 - DNA, 2012 bp, Homo sapiens
gctggtcttgaattcctgacctctagtaatccgcccacctcagcctcccaaagtgctgggattacaggcatgagccactgggcccagcttcattctgacttttaaactaccacctggtggaatgtagatatactcaatgctgtctgtaaaattgcttccccttgcccttgcccctgactctcggcagggggcagggtctctgcatatctttgtcttaactggtccaacctctctgatgcctgccactcagggagctgtagggctctgaggggcttagggtgcccctggagatagggtgggtgtggttagggccaagtgcaacttctgagaagcagaagggcattagaatgctacacatgaagttgactcgttggcctgatggtttttagtgtctcctcggaactgtcctgctggtatggtgaatggcagatttggacctgacttcccagggacccactgcctgggtgacctcctacagctgtcatttgcctcgtcccagcgcgacctgttcgaggatggttggctggagtttgtggtccgtgtttactggctgaaggctcgcttcctggcgctgcaggttagttccatggtcagctgcttggggagcatgccctgacacccagcagggtgggcagaaaattgaccatgttgagggtgtgtgtgtgtatgtgtgtgtgtgtgtgtgtgtgcatgcatgtgtacatgcatagcacctgcccgggcactgggcttggcatgagaaagtgtgacacagtggggaattctcagcatctcagacttccaagcatgataccaatctgtaaagctctttagcataaccacagagctctggaaggcatttgctctgcctctacctcccccactcaagattgccttggcatcttgactctttgcttatgttttcctgagagagcccgagcaagtgaataaacagatacagagctttctaggagggaattattcacctgttttatgagagttctgggaaagcttcccttcagagcctggtctggaaggccaggatggattggctgttacctagcaccttgcacatggtggtactggtacactgtggtagaatgagtcaagagattgctagggccctgtcagcaaccatttagtctaaagaaagcaacactgtttgatgtgaagaacattagttctggaattaggacaggcctggcttctaattctggctttgctcaagtgtcctcagtgttttcatctgcaacatggggtttatgatatctcccctcgcagagttgacatggactgttcatttagtcaacaagtatttattgagcccaagctacatgccaggcctttcttaggggggtacagtgtaattggtaaaaaacccaccctcatggcctccacagtctagtgagataagtggtgtaaagcatctggcacatcatagtcagtcttctgctttggttccctgacctgttttccgtctaaccagggagacatggagcaggccctggagaactatgacatctgcacagaaatgctccagagttccaccgccatccaggtggaggcaggggctgaacgaagagacattgtcatccggctgcccaacctccataatgactctgtggtttccctggaggaggtaagtgagaattttcgtttgtttgtttgtttcctgagatggagtttcacttttgtcgcctaggctggagtgtaatagtgcaatctcggctcactgcaacctacacctctggggttcaagggattctcctgcctcagcctcctgagtagctgggattacgggtgcccgccgccatgcctggctaattttttgtatctttagtagagacggggtttcaccatgttggccaggctggtcttgaactcctgacatcaggtgatccacctgtcttggcctctcgcagtgctgggattacaggtgtgagccactgtgcccagctgaaaggtttttttttttttttttttttttttattgatcattcttgggtgtttctcgcagagggggatttggcagg

SEQ ID NO: 102927 - DNA, 2114 bp, Homo sapiens
actgagtgaacgagactccgtctgcaatcccggcacctcgggaggccgaggctggcggatcactcgcgattaggagctggagaccagcccggccaacacagcgaaaccccgtctccaccgaaaaaatatgaaaaccagtcaggcgtggcggcgcacgcctgcaatcgcaggcactcggcaggctgaggcaggagaatcaggcagggaggttgcagtgagccgagatggcagcagtacagtccagcttcggcttggcatcagagggagaccgtagaaagagagggagagagagaccatggaaagagatggagagggagaccgtagggagagggagagggagtgaaaggttttaaatggtattttttagtcaaaggtttcttgtgatttggcatagttagccaagggttgacctgtttctgaggaacaagagagcttcccatatgctgagtggggcctctgttgggaagacaggagaggcctgggaaaggctgctgtagtacactgggacactgcagatccttggtggaaagcaggtgtgggagctctcaccagcactatttagaagcagtcattgctctgctctcctggctatgtgtggcagccaccccagtggaactggaaggaaatatcagctggagcagaccagtattgggctggccatggggttgagtcagcagtgtgtggcctatatgccaagttccacccaggtgccactttattcattgtgcagctccagaccctgctgcagttctgcatctgtgacatgtccacactggctgaaagtggccttcagactctcctagagttatttcagggacaagtacaagtacagagctgtctacatgccagggcttcgtcaggtcctgcatgtagcgtatgacaacctctggtccaggcttgctgagtctctgacaacccgatgttccgcagttctgcaagactggttcgccgaactgtgaccacaaggctgtccagctatcttggtggatgctttcctggaactcctctgcttctgagtagtttttggtttttgatgtgcttgttttttaaagaattggatgcctagccattaatagaaatacttttaacacatacgtttagtgtaaacactgatgtatgaaggaggaatctaattttttttgggctggaacatagtctaatttttattctcctcatccaagtctgataaaaacaaacactggccagatttggtggggcaggggctgaggggtttaccctcatacagcattgccgggcctttttcagattgataagaacctgaagtcgctggagcggtgccagtccctggaggagattcagcggctgtatgaagcaggcgactacaaggctgttgtgcatctgctccgccccactttgtgcaccagtgggtttgaccgggccaaacacctggagtttatgacttccattcctgagaggccagcccagctgcttcttctgcaggtgtgtgctgccagtgtccctcacacccacttgcaccttctctccttgcttgtttgtgtttattctctggaggttctgcggtagttcttaagaatgtatagctagaagagagtggatgtcaaaaccactaagcccccaggaagatgttagtcagaagatatggtcaagactaatggaaagttagaaccaaggagtgcaggttctagggttctgcgtggctcagggtgaaccccacacttgactcagaacttctgtgtggcagaggaggaaggaagaatggtcaggtcatcatctgtccatccacttgtttattcatccatcttgttttgtattgctttttaaggtaaatataaaagtggctaaaatatctgtacagtggaaagaatcaagataaaataaagaccaatgtgttgaagaaaaataacactagccttatgtttgaaacctcgtgtgccctcctgaatccttctgtgcttctgttcctcaggaggtaaactcttaccaagagcctgccagggaactggcagctgctgggtgctgggcagttattcaacctctctgagctcagttcctcatttctaggatagggatgaccaatgtccttagctcagagtcctgttgtagggattacacaaggtaatgtgtgttggcac

SEQ ID NO: 102928 - DNA, 1094 bp, Homo sapiens
tcactacatgtcagggctctgtggctaggatacctctggccttgacaggtttgtgatagtgggagacagatcaactatctaacaccaggatggtgtggtggatggagaggagggcacctgatgctgcccatgggtgtgggtgtgggttgagttgagccctgaaggaagagcaggggcagaggaagacattggggaggtggagtggggccagggactgagcaagccttaagtcaggcaggagacctggggcatggggattggatatgggaagaggggccagattgcaaaaggcttttattttctgttttgtaaagctgttgctccattttgctccattgttttcatcatgctgatgagaggtgcatgcactattgaaccatccccgctgctgaacccttagtttggctgcactatttcattcttacgggtcatgccgtgatgaacacctcattcatgcctttttgcttgtacccaatttttttttaggataaatttctaggaatgaatatctttagagctcttgataattattacctctggtaccacattgttctccaaaaggattttagtggtgaaaaaaaacctaaagtttataactataaaagtttgttatttttcttagaaaaataacacgaaaagacttctggactgaaattctccttttcctcaaaattaattatgcaaacaaaaattagttttcaaaaaactgccagcaagtaaatgcggatagaggaatagtcaaataccttaaactttgaaaagtacatcaaagaaagagagagagattggaaaggaaaaagaaagaaaagaaagaaaaaagaaagattctggtggagtggcagtagatgtggctctgtctctgcatgtccctcagcaggagaactgatggaagatagcaagttgaccaaatcctgggaaatattattaatattctcatttgtggagagtggcatgaggggaaacctcctccatcccacccttggccttggcagaggcaggaagagccacaggatcctgccatcttccagtgtgcagactgagctgagggaaggggccctgggataaaacacactatggttgggtggtgaggggcc

SEQ ID NO: 102929 - DNA, 1128 bp, Homo sapiens
aggaattggaggctgcagtgagctataattgtgccaactgtactccagcctgggcaacagttagaccctatctcttaaaaaaaaaaatttttttttttaagttaagaaatggcatgtgtagtatgggttccattgtaacaaattacttttctctcattcaaaatgcatcagatatgcacagatggatgctgtgactgaggttcaccagatgtcagcattggttctctctgggctggtattttgatggataaagtgtgctcctttatattttcctatatggcttgaattgtgttttgataagcgtgtattgctttagtaaagccagtcaagtcactacttatttaaaaaggcaaaaaaaaaaaaaaaagggaaaggaaaagtctgtagtcatgttgataaagacagaaaagcccgaaaagaggagactgagcctcgcagcccctgcaggcacgcaggttcccacactaactctgtgtctgtcggcctgggctttccctagggatgtcagagacgcccatgctcccatcctccctcatgctgctgaacacagcccacgagtatttgggcagaaggtcctggtgctgcaattcagatggggctctgctgcgattctatgtaagtgcttccccttgggctgcagactgccagtgcagggcagggctggggtgggaggtggaatgggaaggggacagattcatgttggcacgctgggcttgcttggccttccctcagtgggcccactgtgtgtctttgacttactgcatttctcactgtagttaccgaagcttgtcagaaagtctgataagactttcttgccagaaagttcccttgtgtacctgaggctcaggaagctccggagctcttgaacagcaggtggatttagatctactagtccttactgagtttcttcctagtcaggcacggggctaggccttgtagttgtaatttcaggagtaataaccacatgcaccaccaccgccttctattgagtcctgtttactaagcattactcacaatgccaagtagtagttgctcattcaatagctattattacatccattcagtcactaaatgattagtgagagcacatacacttccttgcacttgtcagttgtgattgactggaag

SEQ ID NO: 102930 - DNA, 1049 bp, Homo sapiens
tacctattttaagaaagtattcagtaaatattcgttgaggaaatcaatgactaaataaatgagtgaagttcccaggaggcaaatatcttcttctggtggctggtagaaattggctaggtgtgctgaaagaaaggcagcttggtaaacccatcaggaggctactgttgggcccagaggtgggaccagaattactcctattaggataacaagacttttccaggaaacaggtgtttttggaatcaagtcatgcaggagcccaacagacatagccacctcaggttaaaagagttgatagagtggtggtttctctggggccctgctgtgacagggaggcagtggctacaggccctcacctcaggccatctcttctgcccaccacaggtgcgagtactccagaaggaactggctgcatccacctctgaagacacgcacccttacaaggaggagctggagacagccttggagcagtgcttctactgcctgtacagcttccccagcaagaagagtaaggccaggtacctggaggaacactcggcccagcaggtgagggtgctgcaataggcccaacaaagagggaagcaggagctgtaagctcttttgaaggatgtcatatttgtcaacagtcatcttggcagtcctgcttggagttgcatcagaaggaggagagaagacggtctgatgagtgtatcaaaggacaagggtttttcttgcaaaaacttattttcataaatgttgactgacattcaactaatgttgactaatatgtagaaccagatatggtggtgcatacctttagttctagctgctctggagggtgagggtaggagggttacttgaggccagaattttaaggctggagtgcactgtgattgcatctgtgaatagccctgggtggcagagcaaggccccatctctaaaaacaaacaaacaacaaacaaaactaccctaaaaccaaaaaatgtagcatggcagttgtcgatagtttatttctattttggatatgaataattccttagaggttttccatttttgtgttgttttggttttta

SEQ ID NO: 102931 - DNA, 1968 bp, Homo sapiens
taccctgaatgtgttgctaatctgccttctgtctttttttcaaggtggatcttatatgggaggatgcactgttcatgtttgagtattttaagcccaagacccttcctgaatttgacagctataagaccagcaccgtgtctgctgacttggccaacctactgaagagaattgccaccattgtgcctcgcacagagaggccagcccttagcctggacaaagtctctgcctacattgagggaacttcaactgaggtgggcccacaaccttgaggacgtgggggacagggctgggtcacactcttccgctctgccactgctgtatatgctcctttgcttctttttctgctctgtaccagactgaggggcaggagaggctggagagtctgtcctgtgactaaacagtcctgggtttactggtcacatctgagtccttgactccacctcccctcatacttttcctctcacctgccaggtaccctgcctcccagagggggctgacccctcccctccagtggtgaacgagctttactacctcctggctgattatcatttcaaaaacaaggagcagtccaaggccatcaagttctacatgcatgacatctgcatctgccccaataggtcagtgaccagatcatgaggctaggctggctgcagggatgactggggtgactccagctcagcaagctcttcagtgggccactttggggtttccctgtccattgcaaagagaccagggaaaacggaatgagagggtggtttagcactttgctgttgttaggaaaggcaggttttccataaaaagaagagcagaggagaaggcctcttttccaaagtcctctgggagggttattggtaaagggttattagagaaggtacgaagtgtccatctggaccctggtgtgcagggcaaggaggcgcaacctggctccatcctgttggttttgtgctgccccctttcacagccccagagtgtgtactcttgctgcttccactgcaggcttcttaactatggttgccttcttggggacaagtaatagaaaaactcaagccagagttctcttttttgctctgatgcagtgcactgttagcagtagcgattgtcatgatagtacatgtagaagagctcattgcacatgaagctcatgctctcttcctgtggaaccctgtttggctttctcttaaaatgtagtgattgcctggagcctctcaaggggccttctacatttgtaaagtttgatgcacttgattaagagggaatattttttcctacctaggaggtaagccttgggtgaaggtcaaaaggaggctaccctctgtggcagacctgcatctaaagggttcagagtagcatctgtaggcacactttctggaaggactcagaggccaggctgtgatagctgcccttgagccatgggtgagcacagagccaccctaactcagggaaaaccagagaattccaccttgtcaggatccatctggccaagaagagaagggactgggtgtgagtggaaaagccagtttgcaagacttgtgtagattgtgtgaaaggttctcacagaacttcttttgcttagcctgtggtttcttccagtcagggagccatgtggcagagccctggccgtcctcttggggtgactgggaaccagtgtgatagagcagacctatctatgctcagtctggctgagtgcttactgcgccacagttcaggtttcctcgtctgttcccctacttccacatctgaaaagtgagggtgataaaacccacctgtctttgcatggcacctctcacctgacagccccttattcaacagaattaaggctcatggcagcttaactgggcctccctccaaccttcatacctgcctgtttagagggtatcaacccatcagcctggcccattaggcaaccctgccacagaggcgtggtctcccgtgggattggccccagtgccaggaaagcacttgatggct

SEQ ID NO: 102932 - DNA, 1105 bp, Homo sapiens
aagtaggtaagatcacacctggctgagggtcttcctggtgctttagctggactgctgctgccttgccttgtagagcactccttttcctctccaccagagctgttctgtgggcaacccctcaaagcaggggaacagagtccaagagctcatccattagagtacttactgcatgcctattaggcgctgggtgattaaaatacattttgtctcataatgcccacagctcttctcttgaggtaggtcttcttagccctgtgtcacaggttaggaatgaaggctcagagacatgactggtctgggtcatggtcatggcattagtgagtggcagagttgggctctgagccctggtgtgggaagggagtttccatggggtccatctgcctgtccactaggctgtcattatcttccatgcttttcatgtagtgttgtttttagctggtgcttttgttaccaccacaggtttgattcctgggcaggcatggctctggcccgggccagccgcattcaggacaagctgaactccaatgagctgaagagtgatgggcccatttggaagcatgccacgcccgtcttgaactgcttccgtcgggccctggagattgacagctccaacttgtccctatggattgagtatggcaccatgtcctatgccttgcactcattcgcctcacgtcaattgaagcagtggagaggcgagctgccccctgagctcgtgcagcaggtgaggagggggtgctgcagatgggcttgccatccttctgtccagacagagtgccctcaggtcaacgaagctctgtctcattcgtactttattcttgtccacacatccatgctgggagctcactgacgaatctccccatgaggcttaagccataccatggtcagtgacaacttggtccctggtctttggacacccagtctagtgtagacaaatttagggacaggctgttagacccagctggtcagccattagttatagtgtagttgagagatagggaggggagaggtgttggccaccagaagtagctatttcttccctgttccctcaaaggagcttgttggatccttgtaaaattcttgagcttaggttgggatttttgaagtc

SEQ ID NO: 102933 - DNA, 1050 bp, Homo sapiens
agtgggagcctgcctcacacccactcctgcatgagaagatcagggcagacctggttttaacctggccctgggcattcccggctgtggggccttgggcagctcttcacccattttaaattgaggaatgtggtaaggacttgaggaaatggaggaaagcacagggcccaatggatgcaatgagctgcctgcccacccacccccccaccacacccacggggaagacgttttcgaggcctgtgggtgcctggctttgcctgggggctgggctataaacagaaatccaacctagtccttctttcagggagtccagagttcagtggggagacagatgtagaaactcactttctatgggtgcccactgaagggcacaaagagaacagcagcactgtggcgggaggcagtgcccagtgaacggagctgaagggttatcataatgagtggttattactctcatctcactaccatgtgcctgagttactgcgtgaacgtttaagctggaatgctgacagtatacattttaattttcacagcttgttttaaattagttgtaggatggttggtttaaaagctaacaaaaacaagcagtgtgtggcagcctgttgccctggtcatgggcccatttccagtgtggctgactggcctgtggaacaaatcttagcaactgggaaggctgctcacactagaggtgtcgttctcctaggtgtactttcggctccatgcttccatcctgaagctcctggggaagcccgattctggggttggtgcagaggtcctggtcaactttatgaaggaggctgcagaaggaccctttgccaggggcgaggagaagaacacacccaaagcttcagaaaagtgagtagcaccctttaggcgacccctagcagcttaccccatctgcatcccagatggctcgtttactgcaatgtgttgttcagagggttgctacacagtaaacagtaaactagaactcatggagtccctaggacccatctggaaactcccatttgctgggccaaggtatttctgttgagtctgagaaggagagggtga

SEQ ID NO: 102934 - DNA, 1057 bp, Homo sapiens
caggactttccttgggcatggttaggagaccttgcattggagctgccttcccacattggtatgcctttgcttcaaaaccagaaatcagctaggatcaattctgatttggtttaagatttagaaaagatttagaaaaatagctccaggtacatgtgggttgtttgacatttgataatagctgcttcataggacccaaatttgttctctgaaccaccctcacctgcaaccttgtgtcacctgcattagggtggggagcatcctgcagcctgtgcataactctggttaaaagcctttggaatcagcccctcaggtcactctgactctaccgcagcctggtgtcaaagccagcccttcacggaacagccaggagggcatcacagctgacctctggccaagctgagaaagagagcaagagagagaacaacagagagagaagctttgtcctctgctgtgctgctggcagctctggctggttgtgctccccatctgcctaacttctcccttccgtcaatctcttggaatttgcccacagggctgaaatccctaatgttgaagcttcctgaccaggaaaacgaggtgacccgaggagcacattgtgaccttcagggggttcccagtgattactctttatacatattcaagcaacataaggagatctttgaacaagacctctacccctaccctgtgtacagtatgcgtgtatgtatgtgtgtgtgtgtgtgtgcccgtgtgtaattacgccctaccactcaatgctgtgtgcttgctctgtgctgggctctgggcaggtgcctgcagggtagtagcatgtctccatcttcataactgccctgcaggctcggtcatgcccttgtttccccaagaggaacctgagctgagggcaggtaggcactcatccaaaactgcctgctgtagtcagggtatagccaagagatactgggtctgaatctccctccacccctagccagaggtgagactgacactaggaaggccctgtggttggccagcctggcagagactgaatctgtgtgtgtttcccttgtccttcagcagaggg

SEQ ID NO: 102935 - DNA, 1962 bp, Homo sapiens
tcagtccggctccctgctacccctgtgaccaggagcaccttcatgtctgctcgccctgtgatttggagagtgtgtttgatgcgcttggcttctgctgatggcctatcctcccagttctggccagaggcagatgcggtgggggcctcttctccactgcccccctgcctgcacctccagcaggtggcccagtcctatatttccattgctttgctctttcttgctttaaaataaacaacaaaggcaacagactctaacataccaaattatctttacaaggacaaaggtgtaaaaatgcaaattgtgcacagtagccttgatgctctgaggtgggtcctgtgtcttcagcccaccagggccaggctatgtaggacggggagctgtgaatgccagtcagtcctaaagggcaggcccaccctggcctctgctcagtgacctcccctcctagggctaaggggaggtcagtttctggttggagtgccattcctaaacagaccttctcaaagtgggagagactgtaagtggagctcagtttgttctgcttgttcctgacgggcaggggacaggggaggctgtcagcgaagagccactcacctcttttgttctcttctttcattcttagctttttgaaaacctttaggagttagctggtcacggcatttattgaacatctgttgtgtgccaggcatggaaaagggtgccatggggaaagtcaagatgatggtgccttgattcctgctcccaggttggatctgatgtcccatggtatcatgggacagtagttggtgccaaggaggagtgccatgagctggcagacgggagcaagttctggggtttggtgggttgggaagaattcctggagaaggtgagtctctagagaggcctgcaggcccatttagacatggagcttggagagtcctacagcttttggatactgaggtgactggggtggatgaaaaagagactttgaggggagagagcttgggaaagcagctgggctctgagggttgggctctttcctgtgggcagtagggagagtgatgtggtcacaggatctctctctctctgggctctaaggaaggcacaattttccccccatcatcctttgaagagccttcctgggaagctcactagatggctgggggatgccagcctcacaccttacagaactgcttcgcttcttctggcatttgtatcaagaggggctgttcacctgcctttggtcaggaaaatgtttaaagcctcccgaggcctccctggtcagtgcctttcctggctcagagggcaggatgagagatgcatgatgaggcctccgagcatcaggccccttcagggcagcaccatggtgtctacacatatcaggcttctgatatgtctgccaggcttcgaggtgcctggcagtgctcagttggccctcacctgtgagcactggcaaagaatggacaagtggtgcagcctggccctcacacaatgccgtcatgcccacctgctgcctgctgtgtatcttcctctctctcaggggcccccaggtttctggtaccacttttctttggcatccatccagtcttctcagcctgacaatgggcaccccgatttcccgggccagccttgcttctggtggacgtgttcttttcctgtggttggccaggattgactgaggcagcttttatctagtcagaaaatttctcaaaatactaattccacccaagtttacggttcttagaaacctgttgtttcctggtcggcaggacatttgtggtcttttctggggcactagtcagagctgttgcagtagcacaagcatacatcttcttcctcaggctttcactgccccaggctgatggaacaaatggccgtgagctgtttctggtcttactgctggagcaaatggaggaaacacacttaaagagacactggaaagttgcatcttgtaactaaagagctcttttaggctggcctgagaat

SEQ ID NO: 102936 - DNA, 2283 bp, Homo sapiens
gggcctgctgggagtagagagatgacagtagtcagcggcatccttccttttcctcctgcccctcttcaggggcctcccagagcaggggcttcctgcttcaggaatgggggtggctctgggttacacaccacagtccaaacaaccctccctgctgcctgccctgccagcttatccaactgcaggggtcctgttctccaagagctttttcccagcactgtggcacattgtcctccctaccttgactcacccagcccctgggctgtcccatccacagcagcccagctggtggcaggatgagggtccttttcacatgctctgcgatgttcctggcaaacttaccccactgttcatgtctgtctgtctgtctttctgtctgtctgtggcctctctgaggtcttcagtcagctgtaccagagaaagtttgcttccccagaagaggaggaatggaggctggggcactgtctgcccaggtagatagagccattctttaagagctttttcattcatcccttttgccctattgacgtgaaagaattgaaacttggtgttctttcagtctgactggcttgaaacttggtatgaaaccttgggttgacttttagtatttgaaatcagggtcattttaaataggctgtgccaaccctttcagacacacaagatctgaaaggagcagaaaatgggccttgggccttgagtcccttttggtggctctcatttgaagagataacacatccctggactccttcctgtggtgctgcccccttggtagtgggcgggaaccttggcaagcacctcccccacctgcttgcttcacaggccagttgggcatctcatctctgtgtacatagcccctgcctctccagctctgccacagcagcccaccccagcatcatgacctgcaggtggcacccaagactgtggtgagccccattagcagagccttcctcagggccacttaggtaccttgattaccccttaaacaagggtttgtctagaatcaccacaatgccccccagggccagtaccaatctctgctctctggttttttagatggttggcagttccagattctcacatctgtgtctgagaggctcaggaagggcctggcaaagtgtagtcagcagccttttgtccctgccaggtcccttggcttgtgcttgccctgttccactgctgtggatgttattttaagagtctcagcagagtccccactcaattggtggtcgttcttcagggagcagaagcccctgcacagcatgccgtcctttcttgcccacacagttcctggtgaggtctggccaccttcactgcctgctggatggatcctggttccttcacattgcagcatcaagagggtgttagcactttgagagtaaatatctacttgcctaaaccaatccttagttttcataatgatcacagctgggattccaccaaattggcaattcctttaggcccagagcccaaaagagcctgtgagccggtgagctcgtggggcagcttgccagtcggtgaaatcatcctagcaaggcttgcttcccggagcttgccgcaggatgtgctgctgagctgtgcagtgacttcagctagtctcaggctggctgaggagacccagccctagcttgtctttcagggagacttcaactgcggggcatggcctgctgtctttcagagactctgaggcctcacgagcattgtctaagccatcggtgttctcactgtcagggccagagtgaatgctgcagggctgtcacttgtgtgcagggcactagccacgcctttgtgggatcccatgtatgtgtcagggacagaggtaggaagacaatggcaatcgtgttaaaaaacctgaagtgggggcctagagcagcaaaatcatttggccaagatcacccaacccctaagtggcagatctgggatgggaatgtgggtctgggagcccaacccttaagctcctacaatgaccctgcgtggcctctagagggtccccattgctaatcctccctttacacacagccagcaaatgggctgccccacctcttcttgatcccctcatgctggggactcaagtttgggacattttgtgagggctgcaggcctgctcataactgccattcagtgctcatggagccttgtattctggctttgtaagtcagggaagagcctttcacaagcgtgagagagaggttctggtcaggtctgtgctcctccactcaggggtcttatacacgtcccaagtcctcatttctcattgttctgtcagcccagctgatactgatgatccat

SEQ ID NO: 102937 - DNA, 1006 bp, Homo sapiens
gtccgtggcctgttaggaactgggctgcacagcaggaggtgagcagcaggcaggcgagcactaccacctgagccctggctcctgtccaatcagtggcaggcatccttagattcttataggagcgtgaaccctattgtgaactgcacatgtgagggatctaggttgtgcgctcctcgtgagaatctaatgccagagaatagtttcatcctgaaactatcccctccagcccccacagtctgtggaaaattgtcttccatgaaactggcccctggtgccaaaaaggttggggactgctgatttaacacaaagcctattttatgataaagtgttgaatatctcatgcaagaatattgtactgcatatcactagctcaggaaaagatcaaaattcaaaatttgaagtgtagtttctactgaatgcatatcacttttgcatcattgtaaagtcaaaaaaattttaagttgaaccattgtaagttggagattgtcggtatgtctagtgacctgttttcaagttttgatttccttttgctcctcagctgtgtcaggttggctgcaatgtctgggaaaggcattcgtcatctctgttactgtgttttttatttctagcctttgcatttgactcttgcttttttttatctcactgctgaaatttcctgtctcttcatgcatattgttcagcttttccactacagcctttgacatactaatcatatttatgaatcatattaatcttagttattttaaattccctgacatgtagtaccaatatctgggttatctgtgagtctggttctgctgattgatttgtctcttgacgatgtacttttttctttctttctttgtgtgtcttacaatttttacattgaataccagatatcacgtgtaggacagaagaaactgaaataagtaatatttatgcctggaataggcttccctcttttgtttctaggcttttagtagggaaagttgagttaggctagtcagaaattgagctggcttgggtt

SEQ ID NO: 102938 - DNA, 1012 bp, Homo sapiens
tttttgtttgtttttttggggggggggttaggtttaataggcaaaagaaatagaaaagagaatagctgtctctctgagagaggggcggctgagcgggtcttccctgaagctgggtttctgactcagtctaggattgctgttttcttcctctttatgtgttctaaggactctggctgaattcttgaccctctgcctgctttccataaaaattgtgctctgtgtgtctttgtgtccaagctctcagtgcctgatgtgaaccgctgagaggcctgcatcatcatctgattcctctgtctcccccgtgcctagcacagggctgatcccagcattatggcttaccctgtttggtgagccacattttgaacacattagaaacctggcacattttttaataaagtgatggtatcccctgtaagatgggtgccagccctaagctgtgggacgcaggcaacttcttgagctcacatgagaagacagtgtagtgtggaaggagctaggacctcctggcattcagtcattagggccacctcaaagggtagggggagggggcagcccatggtaggctctgggcctgggggaggggagatgctcttatggcttttctttgccaacaccactgggggcagcgatgcaggggagggagaagggcaatggctccaggagaaggagtgatggtggagaggcaaggacactgagggagagcagtggggtgggctgcaggggagcagggagggaaggtcagactaatagcaggtggctgaggggaacatagggagtgaatgctcagattctttcctcaacgagaatagtgatggtgggcaacctggccacacacctgatgtctgcagataggcttcgacttagcatgcggagaactgggggccttggttgttgctgactcggccctgccccagcaggccccagctatctccaggctgctactacagtagggagagggctcagccatcgcataccacctcagagctggtgctgctggctgcttctctggcct

SEQ ID NO: 102939 - DNA, 1033 bp, Homo sapiens
agagggagttggggcaggcagtgggctgagcactgagcaggggagcaggtatgatacttcgtgaaccctggctgtgttttatgcgatgctggtggtggcaacacctgccctttgtgggctgcttccccataccccagccccagaggtgggacagcctgtgccaccgttcagaggggaagacccagagcccagcccataacttcccctctctgtagcctctgggtccctcactgcatgccagctgggacagcctgtttcatggagcgggagacctcggttggggcagagccagcactgggccctgtgcctcctgctgctgggtccagcatccactcagcaagggcattgatccagccgtgctgatcacttcaccaaggcgcctccgttactggtggtagaccactgcatggacagggcctaaaaccagggtgactttctttcccttcttctcaactgtaggaaaaaacgaggagtcattggagagtacagaaggcttccgggctgcagagcaaggtgtccagaagcctgctgcagaaaccccagcctctgcttgcatccctggcaagccctcagcatccacacccaccctgtgggatgggaagaagagaggggacctcccaggggagccagtggccttcccccaggggctgccggctggtgctgaggagcagcggcagtttctcacagagcagtgcatcgcctccttccgcctgtgcctgagccgcttcccccagcactataagagtctctaccgtctggccttcctctacacctacagcaagacccaccgggtgagtggctgccgggccaagggggcttggatcttcccagggcagctgggcatctttgaaggttggtgggcagagctaagacagattggagcttcacggtagcagcacatgggagggatgggcgaggagagctgcaggaggcagggccagccccaggagtgggccagcttgccagggaacctggtggtgagggcccagggtcacagccaggaatggagggaggagtgtagggggtctcacag

SEQ ID NO: 102940 - DNA, 1065 bp, Homo sapiens
acagagcaagcagcccaggaaggtggccattctgggctggcattggtgtaggcgagggccagagagggccaggtatgctgggcaagcaggggtgacctttagggcctagctgtgaggactcagtcaggtcctcctcctagaggtctcctgctggctccccccagcatcctcagtggaatgtttgaagaaccagaatggacagttggccaagagatgggccctggcttggcactggctatgtgcaggaagtggcacttcacagaattctgtttgggggactagatacaggggtccaagaaggtaagtgctgtgtccccacagtgaccggtatgctcatgtgacttggttgatttcctcagggcacagcaggtgacacaggtctgggagggagggagtctcatcatctggggctttggtctgtagttcaaggtgcagtgcatgctagcaaacgatggccagctccggcttccctggctgttggtgccacactggagcctggcttgctcactgctcagcctccacttggcagtggaccttacctctgtatcccaggccttctgcacccaggtggacctgggtcttaataaaccccaaccagcatgtcctcactgctgaagccgtctttgggcctgaggggcaatggctgatatgaactctgttgggctcaccattgctttgggaactttcccctttccctcttttgggagcagcagagcccactgcaagagcccacacacacatcagtggaacggacactagtaaccattgtcctgtcctcccccacctctggtgtccttctgttcaagtgcctcctcaggcagccatgcagccccctccagctgtggtcagctctgaccaggatctggtgttccctagtagtgagctcagacccttcctcatcctgttacagggtaccttctcaagaggcagatgtcgagatggaatttcgggtacaaaatatgtattaggaattggcacctgtgcaagggaagtggggaaggacagcaggtttgggtgggaggagagttgagtagcgatacgggccccacccacccaccctccact

SEQ ID NO: 102941 - DNA, 1032 bp, Homo sapiens
acagatctgcttccaggaggcagctctgcaggtgccaagtgtgcctcaggtagcctcgggccactgagctcattctagaccttgcatatgctgggtctagggtggttcccattggcttctgtgtttgcttcacccagaaacctttgctgagcaccagttaccaccaccaaattgaatgcaggttgttaacacctagctcccctgagagcctgagttaagaccttcctgctgctctggggcatgccatcctgggggctgcatgtggctctgcccagacctggggtgtcagctctgctggcagcagcttgttcacagatctgggggacacaactccatgttgtcactgactaatgtggaaccattaactgggaagtagttaccactttccaaacacagctgtttgttaacaaacacttcccgctgtgtatatttgacagcagcacatttcttcataaaatcctgcctgtgggcttggcagtgcctttttcttgttgccatctcacagctcactggtggactggagcatccgatgtctgcctcttcaaaggggcccacaagcagagcctgcctggagctgtgtggttgactcctgaaccctcaggtctttcacagacacctccaggtgaggctctgcctgcccaggccttggaaagaaaccgccttcagggcacagtgtgccacttgcttagttgctgacagcagggcttttgggggaggaggagagaatgtgggctctgaagctggcctcacctgggttcagatcctcgctccgcatgggaactcttggaggtccagggctcttctttcctcgatgagaatgatagtgatatgaaagcagaattattgtgttaatgaggtgagggatgcagtgctggggcaatgtccaacataccctgcactgccctcagccaacaatccttctcacccatatagtgagacccatttcttcagtgtcagcatctcccatggctccttactcctctgccaggccctctgagggctccctgcctggggcatagtggccaagggcta

SEQ ID NO: 102942 - DNA, 1032 bp, Homo sapiens
acagctggcccctcactcccctctacctccaagtccttacctatccaccgcccctcccagcatggccagctcccagctggatgactttggcaggtcatacaccccctctgagctttggtttcttctgtattttccttgattccctcttactcatggagaaactgaagggcagaggtggcctgaacaggagctgaggagagcaggtttcaggtctggaggggtgtaacaggccaattctcagggtacgtgggcaggcaggtccccgctgagagccagccagctggtgggagtgtctggatccatggctcctcctctcccagggtgtggtcttctggggtcagagtaggagcttgagatcctgaaagccctgcatctgcccaccctctctgttttggtattttatagacaagtaggggtgttattggtaatcaatctacatgataccaagggatttgctgcaaaagagaggtgctctcttatctgcatgcccaggccacagccacctccccacagcagaaactgtttcttgtctcatgtgtgtccttctagagggcatctgcccatttacaagctagtgcacatagatgcgcataaaaggcaaaagtgcacacacttctgccccttgtattttttcgctaaacaatatctctaacagtatctcttggagatactgttagaacccacccattctttttgatagctactgcatagtagtcccaacatagggatgtcccacagtttacctagccatccctcctttttttttttttttttttttttgagacagagtcttgctctgtcacccaggcttgagtgcagtggcgtaatcttgggtcactgcaacctccgcctcctgggttcaagcaattctgcttcagcctcacaagtagctgggactacgggtccacactgccacgcccagctaatttttgtattttttttttttttttttttttttagagacaaggtttcaccatgttggccaggatggtctcgaactcctggcctcaagtgatccgccctccttggcct

SEQ ID NO: 102943 - DNA, 1125 bp, Homo sapiens
accgctgcttgtccctttgctcacacttcaaggagcataatacctgctgtgtgccaggccctgggccagctgtgtggtccaaaagggctcaggtccacaggccagcctgcaagcctggattagtagtcacctttcaaagaggtgctaggaagtaaagtgacttggccatggtcctatcactagtctgtgctggaggaggggtgtgtacttcactatgtatagtgtggaagcccatgcgttgtgactggtagcctcaagtcaggggccccctggttcctacaccgggattggcccagctgtcctagacaggagtgttatctgaatggcccattggctggatggggaggatggaattaggtagcagtgggcagggggatgtgggcatctagccctaccataggaggtgaggctgggattccagactgagagggaaccagtgctaggctgtggcatcaagcagggattcccttgggttgcgggactacactgtctgctagcctgagcccccacccccttttggtgtggctccaactggctggctagctgggttgtaccatttttccttggtagcctacaggcgtgtcctgggctggggctcttgaggctgagagcagtgacaatggaggatgctaccctgcctgcagtgccacagcagctgggcctggctgtgcctggccttgttgggggcctggcagagagtagcggcccatagtagcagtggcaggaccagcacttattgggggcttgatcggggggtgcctccttaggtgacatagcatgtccgtgaggcttaggtactattatcatcctcattgtacagacggggaagttgttaccaataggctctgcaggctgggaaaaccaaagcccttttctaccctctgccccctgggccatcagaggcctcgctcttccccttggacagcagtgcttatggctgttttcaggccctgggccagctgtgtggtcaaaaggggctcaggtcagtgccactccccaactggttggctgctctgggtgccgggagagaatgctgccaaagggatgcttgtcaagtgcttgtcttctgcagcagcaattgccagtattcctgacacagtgggccagggccccatgggagcctgg

SEQ ID NO: 102944 - DNA, 1057 bp, Homo sapiens
cattctcctgtctgtcctaggcccctgccatcctcaccttcctccagtggcccatccttcctccactcagtcctccaggctgtggctgggtcactgcccatccacaagagccctggtattggtgactaagatcccagttctgcctcctggtgatggagaactgtggggacagccatcttggggcatcttttccccttcagtagggcactggtagcaacaacagccctgtgcacaccaggtgccgcatgtgccgtccccgtggatgtgcacgtgatccaggcacagctgtccactgagatggaggcagccccagactgagggacagggatccttgagtcgatccctgctgtggctgacccaggaaggtcatttctgtcttcctcatctctgcgtcctcactcatggctcacacagagcatttggactcagtgacatctaaagttcagcacaggctggacaatttctgagtagcagaagctctagcctgcaagaatcaagtggagctgtgggcatctggacaggatggtttttgggggtctgtgggtctagggaggagaaacgcacttcactctgtctcgaccgttggggaaaggagaggaaactggctgactcggaactgtaaggctcagcagtctctgctgtcacactctaggtagaaaaattgccagacacaggtcacacagagccagtgtcccacagcagggaggcaggtaagcagcagcaaggccttgtgcctccaaaccaactggaagcttcaaagctcccaggctgagaacggggactgttaacactgaggaacattcttgccacggcaagaaaggagccagggccaggcacggtggctcacgcctgtaatcccagcactttgggaggctgaggcaggtggatcatttgagattaggagtttgagaccagcctggctaacatggtgagaccccatctctactaaaaatataaaaattagctgggcgtggtggtgtgtgcctgtaatcccagcaacttgggcggctgaggcaggagaattgcttgaacccacgagacagaggttgcagtgagc

SEQ ID NO: 102945 - DNA, 1003 bp, Homo sapiens
cagaggcttgtgtcctggacatccaggtgctttgtgggtaattaggtcccacagggttttcctgcatagggtgctgacagtgccagtaagcgcagctctttgagcccagagaatcctcaaggatcagggcaggcagtctcaccagcctctgattgtcatagcactatcacatgacgctccagggacctcttggtatgtacacaagcacttcctggggggttggggggtgacagggtaaggctcagcttagtgaggaacctccatgctcagggcctgagtgtttttacctgtcagacatggcagtatccatctgatggggctttggagagggctggcacagatacaggcacagagtgcaggacatcgtgtggtgctgggagggggaccaaggaagctggaacccacaaggcctcggagcccagctgggagcaacattctcccagggaagtctccccagaggctttactcagcagaggcttagcacagaagccctgagctcccctcttccaccacaggactccctcctgctgtgatagccaggcactgggaccccaagctgcccagcccattctgagcctcagtgtgttcatctgtgctggtaggtggagtggtgcctgcagatcccttctttggcaatgtgtctgagagagcacctatccactctactctttctgtgggaaggcatgcgcgctggggagagctaggtgctgcccgtgatggacctggaggcctctgggatgcaggggactagtttccagagagccacacactcaccacagacaacacacagtttcttcctggcctgggtgtgatgagcagatgttctcagcttcctttggtccaacttgatcttacaggaagtagataaggtatgaagtaaggtcatgagctgtgcaaggtgtgagtgtcgctttggtcctcgtgtctgctacagccctgtggacagccgggaagagtggcccaactagctctggagctagtcgggccttggggacaggtccca

SEQ ID NO: 102946 - DNA, 1945 bp, Homo sapiens
cagagggggagaaagggggtcccagctgtgtgggaggaggaagggagtttccaggtggggttgaggagggaagggaattccaggcagagattgaggattcggatggagggaagtgcaggtcaggggggtcaggcaggtgggagggggcagctcatggggcctggctccaggggaggaggctcatgaggaacccctgcacggctggcatggccctgggcccagcttccagcagggacagggatcctggagtgtggcaggaggtgatggtcacccaagccggggtccctgctagaacagcccctcctaaggggaccgcctggcggtccatccacccatctgtcaggctgctgtaggtggcaaggcctggggccaggcctcgaaggaaccccagggctaaccaggcatcctctccctcaggaatgccctactcacaggagtggactgcaaagtggtcgtacctgtaccccctggccacacacatccccaactccggctctttcactttcaccccaaaacctgctcctcccagctaccagagatggcgagtgggtgcacttcggatcatcgacagcaaaaattacgcagggcagaagtaagaaggcatggatgtgcaggtgatggctggagggcctcgccgcccgaggcccatcatgcttgcctgggcagcccaggctgggggtggggagagtggggcgaccatggggtggtgtgggctggcccagctccagcatcatcacctccacagggacgtgcaggcgctctggaccaacgaccacgcactggcctggcacctgagcgatgacttccgagaggaccctgtggcctgggcacgaactcagtgccaggcctgggaggagctggaggatcagctgcccaacttcctggaggagctgccggactgcccctgcaccctgacccaggcccgggctgactccggccgcttcttcgtgagcctcccatcagggcccaggagaggggatgaggggttagcctccccactgaggacagcaccaggggaggcagacagaggtgtcctggagggtggggctggggtctcaggacccctgcagggttggcctcagggaggggatgacagaacccgaggccactgggtgacagccacctgctgctctgcagacggactacggctgtgacatggagcagggcagcgtgtgcacctaccaccccggggccgtgcactgtgtgcgttctgtgcaggccaggtgagcccccaggctggggccggtatggggattggggtcaggggtgggctcccaacagtggcctggccctgactcactggctcctgcagcctccggtacggctcaggtcagcagtgctgctacacagcggacgggacgcagctcctgacagctgactccagcggcggcagcactcccgaccgcggccatgactggggcgcacccccgttccgcacgccaccccgagtgcccagcatgtcccactggctctacgatgtcctcagcttctattactgctgcctctgggcacccgactgcccccgctacatgcaacggcggccctccaatgactgccgcaactaccggcccccaagactgggtgggtgccatcccgtgccccagaccctgggaaagatcgggctgggctggggtgcacccccacgtgaccctccactctcaccctagcctccgccttcggagacccacactttgtgaccttcgacggcaccaacttcacattcaatgggcgcggagagtacgtgctgctggaggcagcgctgaccgacctgagggtgcaggcgcgggcccagcccgggacgatgtccaacggtgaggccagggctaggggctgctctggttggcatggggtagaaccaaggtgggaggctggagccaagtggctcccgttctgctcccaccaccgcaggcacggagacccgtggcactgggctgaccgcagtggc

SEQ ID NO: 102947 - DNA, 1012 bp, Homo sapiens
agtgagactctgtctcaaaaaaaaaaaaaaacagctattacaatatacatgtatgttgtaaaataaccaaaccaacatagaagggtatatagtgaaaggagaagtattgttgtgggtaaaattgtttcaataaatggctaatccagtatttttttcctccaaaaaaacaccttttcccctttgatttagtgtataccacacagagtcgcttagccgattcagtgacttttttgatagctggagaatgcttcctaatggttgcaggtgtgtaggggttttcttgacattttcagtaagaaagtgaatgttgtgccataggaaagctttatcacaggtgcacgttggtagccaactaaataacgtgagtgtcaagtacagtatctagtgagtggagaataactgtaataattacaattacagttgtagttaaagtgaagtttgtatcaaaatttctgtttcaaaggtgaacttttaggaggtgtatctgcggtgtttcttcctcagatgtgatttctctgaagcagtggttctctataactgacttgacacacagtgcatctgatatttcgaatgacttaagtgatagtatcaaaattactatcatatacatatttaaatcacatgactaacctgtgtgtggtattatgcaaactgctcagctcagtaagggaacagaaataagaaaaaaaggacaatattgggagtcttttatacaattcaatttattcaattgaaggactatcttttctttaaaaaagttctgctttcttggtgttaaaataaagcatcttttatgaaatgatggtgatagtaaatggtgatatatggtaaacgtaaatagtaaatgcaagggtagttattgtgatttttaaaaataaagagagccgagaatctcttgttttcctgctgctgttagggagttcaggaaaaagttcctggggcttttgctgttaagaagattcaaatatagagtatttcttaagagtaaatatgagtttattttgagatcatt

SEQ ID NO: 102948 - DNA, 1014 bp, Homo sapiens
cctggggtcatcaccacatttaacattgtagcttatgtggtaggaaggaaattaaatactcttgccatttgcatgtcttcctgtttcctgcctttagaattgtactgggagagattccatgtgtttgtatacttagtttcttactgactgatgctacctgacctcaggattcagttatcacctctctggattagctgccccagtatggctttgtacgtttattttattttgctggggatgtcataacaaaataccacagactggatggcttaagccacagaaatttattttctcaaatctggaagccagaagtctgaaatgagggtgttagcagatttactttctcctgagatctcttttttgtcttgcagatggctgccttctctgtgtcttccctctgtgtgtgtgtcctcatctcctcctcttacaagaacgccagtcatgttggattagggcccaccctaatgacttcatcttacgttaattacctctttaacttcattatcctgtctccaggtgcagtcacatttgaggttttggggttagggcttcaacatattaattttgtgtgttttgtgcgggcacagttcagcctataacaacatccttattcttcagttcatctgctctacctttacctcctccagtgactttcctaagactgtttgatttccatgtatcaattcacttgtctttacctcagattattctgtctactcattacagtaatccagagaagaatttttcttcttttatctttcaaacatgaacagattttctttttatttatttatttatttatttattgatcattcttgggtgtttctcgcagagggggatttggcagggtcacaggacaatagtggagggaaggtcagcagataaacaagtgaacaaaggtctctggttttcctaggcagaggaccctgcggccttccgcagtgtttgtgtccctgggtacttgagattagggagtggtgatgactctgaacgagcatgctgccttcaagcgtc

SEQ ID NO: 102949 - DNA, 1068 bp, Homo sapiens
ctttttgtattaaacaaatgattgtgtcagttttcacaggtttaaaattttagtagttaagtaatcatgtgattcacgtagatttgattgacgcatcatcattatttaacattagtgcttcgttgttttttacatttagagagacagtataacatactggttaaggtgcaaaatctggaaccagactgcctgggtttcaattttggctcatctatttattacctgtgacatgttggcaaattatttaacatctgtgtctgagtttcttcatctgtaaaacaaggtgataatagcacctacctcacgtctttaatgaggcttatataagttaatgtatgtgaagtgttaatgtatttgtataaccaagtgctaggtatgtgttagctattgttataattgttattatttatgtggcattttatggtgttaaaactattttgcatttactttggtcagagtaaaatttttgtgtttctagtaggtagcttagatttttggttttcccagagactgcttttcccttcttgcccacctatgatctcccttcactatctgtgtacagttagtttaccaccgactggctaatcctggagtcatcttcacctgtcttgccctagaatattatgcctctggccaactggttaaaaccccacttctggattcaagttaatgtatatcatttaaataacagctttgtagaaatgtaattcacattccataaaatttactcttttaaaaacatgtaaaacaaagtgtataacttatttctccttgataattaaaagatgaatgatcttctggttttgaagaaattgaactttaacagactctaaggcaagattattgtagatctaaatcattgtgtagatcctggatttcatctcattacacctggggcaggaactgtgtattctatgtagccttttattgctgacatttttgccttacattttttgtattaaacacataggcacagcttcttcaaccaagcggagcacttctacaggtaataaagaatccagttctactagagaaagattacgtgaacgtacccgattaaaccagagc

SEQ ID NO: 102950 - DNA, 1322 bp, Homo sapiens
gagaaccaacacagtacaagtgaggaactccaggcaaccctgcaagagctagctgatttacagcagattacccaggaactgaatagtgaaaacgaaaggcttggagaagagaaggttattctgatggagtctttatgtcagcagagcgataagttggaacactttagtcgacagattgaatacttccgctctcttctagatgagcatcacatttcttatgtcatagatgaagatgtaaaaagtgggcgctatatggaattagagcaacgttacatggacctcgctgagaatgcccgttttgaacgggagcagcttcttggtgtccagcagcatttaagcaatactttgaaaatggcagaacaagacaataaggaagctcaagaaatgataggggcactcaaagaacgcagtcaccatatggagcgaattattgagtctgagcagaaaggaaaagcagccttggcagccacgttagaggaatacaaagccacagtggccagtgaccagatagagatgaatcgcctgaaggctcagctggagaatgaaaagcagaaagtggcagagctgtattctatccataactctggagacaaatctgatattcaggacctcctggagagtgtcaggctggacaaagaaaaagcagagactttggctagtagcttgcaggaagatctggctcatacccgaaatgatgccaatcgattacaggatgccattgctaaggtattgtttaaatagattaaaatgttccggacagcattaggcagctgccatgcacagtgtttactgagaacctgggttactggtttggtttggtgtgttattagcttttttttaaaactgatatttttaaaacttgggaatggtttccttttattggaatagtgtgaaaagtattcttaagataatgtcactttctctcacttgtattttgtttctgttttcctgcctgtgagaggatatggctggtattacagctaaaaccagaatttgtccctagttctgagtattcctatggagcgggtcatgaaattttacctccccccgcctcatctcgaatctgttttggtgtaataggtggagagtcagtattccagtctgtagcatcagcagtgcatgtttcctcttatcttgctatagtaatagtttttcaaatagagatctgttgatagttaaaaaatatttttggcatatagaggctcctgtttctcagaggcctgtgatttattgctggcagggaccttagcaattatcagtccagacccttgttgtacatgcctccagcataatagtgaggactcagttggaactgctaccca

SEQ ID NO: 102951 - DNA, 1063 bp, Homo sapiens
tctactaaaaatacaaaaattagctgggtgtggtgccaggtgcctgtaatcccagctacttggaaggctgaggtgggaggatcgcttgaacccaggagacggaggctgcagtgagctgagattgtgccagtgcagtcaagcctgggtgacagagtgagactttatttcaaaacagaaaagaaaaagtcacagattgatcctgtgtccatggtaactgcctggcaatatcagcatgattgatggagatataaccagagcgagaatggattattttttgtcagagaataatggggttcataatcaataatgggactcaaaagttatgaacccattattaaatgagtagggcagtgcccagagttgttcagaacaaagttggtctaataacattgagaacagcagtttgcctgatctctagaataaaaataacattgtaaaaattgagttataatttgtaatttaaaaataggaagatcatagtagtagttcttttccttggtcgacttgaatgttgcttttgagttgaagacagtagatggcagtgtccctcacagtaggaacactgaagaggaaggaaactgctgttagaggttcgagagttgaagagtaatgctgctttcttgtgtgaccacaaatcgtgctagatggcagttttgcaaactagtcttcacaacaagaacttaagcacaaattcctttgtttccaggaaaaaaaaatacattccatttcagagtaaaaacgtagtcatgactgtagagattgtaaagtttaaatcaaatccctacagacacttttagtgcattttattctgtctgagtatttccactggctgccactttcccttttacttaaatggatttatttatttatttatttatttatttatttatttatttataagaggtgacagtaataaaaatgtagtgccgggggcagaaaaacaccttttaaagaacagtgattatgtgaattctgtggccatgaatgaaaaaaggtcaataaagagaaaaagagcaaaggaatgaatgcaacttgagaatttatgatcagtctaagatgacca

SEQ ID NO: 102952 - DNA, 1054 bp, Homo sapiens
ttttgattggttatgtaccaacaaagtgaatttctaacggttttactttttgtttcaaaattaagatactgtggaaggaagtgatttagaaattgtgatttttaacttgatattttccaaagaaagtaatatttgttattacttgaatttaacattttttctgttaaagttttgtattaaaattttttatagtctttggacaggataacttttttcgaatgtcatatttaagtatcccttttctttgtattattactctgaagattgttgtgagaatagatatttaaactttggtgatcttttcagatacagttaaaaaactccaggaccaaaagcacgacatggaaagagaaataaagacactccacagaagacttcgggtaggataaatcttcatgtattgtcttgttagaaaacggttttctgaaatctgaggtgtagtcattgaccatgttatcattcatcttaagttttggatacagtgataatactggccccattgggctttgggcagaaagcaaatgctatcatttcaaattgggattggtgctagattttgggtagaagaatgtactataggttgagtacccctaaccagacattctgaaatctaaaatattccaaaatttgcaactcttggagtgatggcatgatactcaaaggaaatgcttattggagcattttggatttcggattttcagatttgggatgcttagctgttaagtatagtgcaaatattccaaaatccaaagaatcttaaatctgaaatgcttttggataagtgatactcgacctgtagaaatttatgggtagtaattttagaaagatagatttggggaaaaagtgtaagaaaggttattagcttttggttataaggtgccccaaactagtctgttttcatacaagttttcttcattttgtggccatgatccatcttgccaacagcaatgcagccatgctgcagggagtagggagaaagctactcagtcgtttgggtcataccacagttgctcaggctgctttcatggtgtaagaaaattgctttaggggtgta

SEQ ID NO: 102953 - DNA, 1004 bp, Homo sapiens
aaatcatgtggagagtttttaaacaggtaaaattcccagacctcatcctggtaaaccataatctctggggactggggcctaagcttgggattgttagtttttcaaaactccctgggtaggaattctacttctagctatgtgggagtaacaggctggattattctgccatcacaaacaacgattaatagaaagatggacaaaatataagaaacaattattttcagacattgtacgtaactgtgatccctgaacaaaaattttaaaatgaggtaagtcctactgtggcccacagtcttttcctggaggcaatttccaggtggtggtgcagggaagatgaacctacatggagcagggaagagaaaaccaattggatctgagtagacacaaatcaacattcaaggagaaggcgactgctcgaatttgcagggcagatactgggaggagggagctgcatagagaaaggagtatagaaatctgcgtaggcatccctttgagtcttttcctgaataccaacctgcacctgcattgggtgaaaccccacaaggataattttccaggaacagccccgcaagaataattttccaggaacaatttccaggaacagggagctatcacacaaacacttctggtagctcacctagggcaggaaatcatttgagttcccaccagccgctgtggagacacctctttgaatagatggcattcattatagactcctaaaggaccacacctgaaagtatcatagaactaaataccctcagagtaaatagtattctagatctgccgtaaaagatctttaaaaataagatgcagaaggaccaaggagatccttaagtagctatagtaggcagcctctaaaatgttccccagcgatcccccattggtggtagttgctccttgtgtaatttgctcctgttgagtgttggctgcagctcgtgatttgcttccagtgaatatggcaaagcaaaagaagtggtgggataaggttatcactgctaaaatcg

SEQ ID NO: 102954 - DNA, 1039 bp, Homo sapiens
gagtagtaaatggacctgtgttcttactgtgacaagtgcctctgggcagatttgattctcacagtggaaatacttcatgaaatggcagcagcctggattgtggctgttaaaatttaacacaaataatttttaaaacaataccctatttgggttctcagtgcgtttttgtgtattttcagaaagtaagtgtgaggctgtgacagggacagtctgtcagattgaggcagacttggatccttaaccatgcagtaagaaacagactcagccagcgttgggcacatgtatcagcaatacatttcatgaactttttttttttgcaattgtgcttatagtgtgtattgtaaaagagaaaattaagataacttagacagttttcatgtagggaatgaccagggcttatgcctgtgtccatagcaagcaccttgttttgatttatttgtcttttcaaccttcgttttcactttcttagcttgctgtgttcttctttgggagactaaaattttttagggaaataaccatggtgtcaaaattatagaatggaaaatttgattaaatgtaaaacattgatctttgtttcctactatttccatgttcttttgcctttgttttgtctgtcagattttgggcataatatactcttcctttacgggtaaatgccaactgccaacagagttcagaattctgtgatgcttgcttatgggttgtttacacagagatgatgtttgttcaagataagaacactgtagggactctttaagctatatacatcccatctttattaagctcatccttccactcccctaggcctccaaagtagcaaataattataaccaaatgttcctcatacccttagaaaataaattttagccagacttggtggctcatgcctgtaatcccagcactttgggaggccaagatgggaggattgctttagcttaggagttcaagattagcctgggcaagatagtgagacctcatctctgcaaaaaactagccagaagtgatggtgcatacctatagtcccagcccttcaagaggc

SEQ ID NO: 102955 - DNA, 1028 bp, Homo sapiens
tcttaaaggcgagaactattatgccttagaatcctgcaccttgcataaccttaccctgtatattttacaataagtaatttttttaaatgatgagatggtaaaggacataaacggttattttattttattattattatttgagacagtgccactcttgttgcccaggctggagtgcaatggcgtaatctcagctcactgcaacctccatctctagggttcaagtgattctcctgcctcagcctcccaagtagctgggattacagacacccgccaccatgcccagctaatttttatatttttattagcaatgaggtgtcaccatgttggccaggctgatctcaaactcctgacttcaggtgatctctctgcctcaggctcccaaagtgttgggattacaggcgtgagccacagcgcccggcacattttaattttaaatgcactttgtactgtctttgccactttccatgtgggtgatttttatagagtccctttcttcagttagcaaagaattctgacaacagtgcatctatggagccataaactaaaaatcaaatgtatgaaaaactatgtcttgcctttgtattgccttaccatgtatatttcccctgtttaaaaatgcaaactttaatacttttctcttattctggtgcccaaacaaaaaatatttcaactttgggttacttgttttcagagaagaaaggaaagaccctctctcagcattggccagagaatatggaggatcaaagaggaacgccttgctgaagtggtgtcagaagaaaacagaaggctatcaggtaatcatatgattcttttgtcccatgtgagtaattggcaaaccaactgctggagtgtcgtagcttactacgtgtcacacattagaaatgataagtcctgacctggcatggtggatcacacctataatcctaacacattgggaggctgaggcagatggatcacttgtgcccaggagttcaagcctgggcaacatggcaaaaccctgtctctacaaaaataaaaataataataag

SEQ ID NO: 102956 - DNA, 1019 bp, Homo sapiens
tgtctagctataaatggatgatcatgcccatcctttggagccagcagttttggttctgtcctttggtctctgactactcacagtctgcagaaaagagcaggttgtgacacttgactagtttatgagagcagaagctgttacgtgacacttagcacatactgctcccagaggccccagatggatcattaatgcttggaacgtgcgtgctttatgaagaagccgtctaatcaacggagatagattccctaatacccatatcatctttcgttaactctcttaagagtcaccctaaaattactgtgctgatcactgtaatttcattaagcatccattacaaaacaagcccttatgagtttagcttttatttaacaaatacatttttctcttttaacttgtgccctgccatttatcatacattgaagctttagaatagtagaatatttgtgttgaaaacatcttggcattctggtttattatcaggtttacagatctgggactgaaacccccacaaggataaatggctgcctcaaggctgttttgtgagtccagggcattatgtaaccagctttcagtactattgctttaagggttgggtcttcctttttttctcttttttaaaaattagtgcctctgtttatatacaattatgtttttaatttaaatatagggctaactctaataatttttaagtgcttatcatgagaagtggtaatccagttccctgcttccttatctctaaaatttctgctgtccagagacaaccacttttaatttttttagccgttgtctttagggtttgatggtacaaggttgataatacaagaataaccaactggaatagggaaagtatttatactttcagtaaacttttctttggttttagattttatatctaagagcttgtgttgcatcactgttttcttgccctggaaaaccctaactgaatgtaatcaggatgcccccaaaggttgatttgagagctttattttgaatgaaaaatctcaatgttttctgataaa

SEQ ID NO: 102957 - DNA, 1875 bp, Homo sapiens
ccagtttcaagcaattctcgtgcctcagcctcccaagaagctgggatcaacaggcatgcaccaccacgtctggctaatttttttgcatttttaatagagacagggtttcaccatgttggccaggctggtctcgaactcttggcctcaagcagtctatagtttgagaacccccttggcctctcaaagtgctgggattacaggtgtgagccaccaagcctggcccagagaaaatacggattaaaaaaaggctttgatcttctttggctagatgttagacctcaagttatcaagtaaggcaagattctgctcttggccttgggtgtcaagtgacagagtgattctttgggtttatagctcctgcagggaactgtcagcggatgcatctttgcaatgctagctctctcctttaggcatctaaacttgtggaaatttttctttcaatgctctaaaccagtcatgaaatacatatttgacacttgttgtgcacaaccagagaggtagttaaatacaaggaggaacagaatgcagtctagagtatgacctttgccctcaaagaactttctgtggttttttttttttgttgttgttttttgtttttgagacagggtctcactctgtcacccaggctggagtgcattggctcactgcaacctctgcttcccgggttcaagcgattctcctgcatcagcctcctgagtagctgggattacaggcgtctgccaccacgcccagctaatttttgtatttttagttgagacagagtttcaccatgttgatcaggctggtctcgaactcctgacctcaggtaattcacccatctcggcctcccaaagtgctggaattacaggtgtgccaccacccccagcctcaaagaactttcaagattatttctgaaacatattattatttccaggccttttaaaattctgccatttccagggaataatttaaccttttcaacactccagtttgtgattaaaaacactcatttactgtactgcatagaagttgcgtttcacgtggcctctgtacttctgctgccattgtgtccctccatagggtcctcaacactctttatctggctgtaccctaccctactgtgttttaataccaaggaaacagcaagaaaagctggtaaccaactcgtatgtaaaacaaaacccaaaaaaataagcatggggtcaggagtgaagtgccacgcagggcgctctgcttgaacaccagctcttctctggggtcctggtgacggtcctgtcgtcactttcttccagtggtggtatcttgttatatttggtccaaagtaaagtgttttatggttcccttcatcatttattgcactaaaggaaaaagtaagtaaactattgagcactgagttgagggctctggagagaagtacaggaaggtggtgccacaggtgtgcaccttttttagttgttttgccattttccctctgccaaaacagtatctagtaggtgtagaaacgaatacaccgacagagtgaaaagaatgcttcagttccttctgtaagcaataaaataagttcatcgtaaggtgagcacactatattgagcatctctttcctgatatcatttccttcctaagctcctgcaagaccatggtgcatttcatatccaggctgctgtactcagatggcctggatgtcccaggtcagactaaatgcactgcctgtgatttcagaaataggaagtgttgtgccagggaagaccagttgtccttttaggctcccgttctgtctcagccggtgtcaggtgcttggagggtgaggttgggtgggtgatcttcctctgaaataccagtaccaagacaataatgatgcattcagaaagtgcataaggtttcaccattgatgcagtg

SEQ ID NO: 102958 - DNA, 1044 bp, Homo sapiens
gccccaggcaggtgcccattcatcactcccagggcattctgtgtttaacagccactacccagagatatcaatcaacagtctcgatggtttttttactctctttcagacattatatcttctcccaccatactacacagaaaaggaacctcactcacctcactcaggctcccaaactctgccacagtataggggggcatcgtgagccagggttttgttagtaactcactcttacctcatgaggctgggctgtgatccccagcaggtttcattctgagtgcactgggttgcagcttaacagtgtggtgtccttgtgaagctggaggaccagtgaggaccacctctgcctgaaggtggacctggggacagcgctctgcacggctcagacaggcatgaggaagtggatgcttgcatgtgtcagcagagagatgaatcagagcccttggcttcttgccctgtgtccataaaagtggcatttccttaaatagaccagaaccttaatagctatttaaagagcatgtggtatttgggagtatattttatggcccttaattaaacttcaaacaaattaaaacatttagagatcttttatgacatatttttaatcttttttgtggagatttgtataatctcttggctttcacatcccaccctaaggccacagacagaaggcagggtcacatctacagttggggtttccatccttggtcaagaagcagtgagtggaaaccacccagccagtcccttggaggggtgaggctgtcaggagtctttatgagggtagaaaggacagcaaatggcactgtgaaacaggccctgtctgtcccctgtcacatctcttagttgacatttcctggatgaaggatgtgtgcccttaggagaaaatggggcagagcttctcattcgagtctgtgcagaggccgttttgaaagtttcttctggcacatgtcatctctcttgttttgtcgaccctaatccaaacatggaattatctcgtagagtagaaaagctctaaattgacctgaaaaaaactaagtgcaaaatctg

SEQ ID NO: 102959 - DNA, 1035 bp, Homo sapiens
gacagagtgagactccatctcaaacaaacaaaccaaaaaaaacaaaaaacaaaaaagggggggtcattgattaccacccacatcctctggtctgtactgtcaccccaacaggtcatggtagaggccagcttcagcagcctagggtcctctctttgtatgcaacagctagtaagtcagcaagacgccacgtgttataccaggcccaggcgtgaccacgtaggggcagccatctacagctggtgggtgggacgggttggggagtcatagataccaggtagcccttggacacagccgccctgccctggttttggttttgtgttttggaggccatgcagcatctgaggcctcctgcgtcctccttggcatctcctaagagggtcccagcatgtgttggttacatgtttttcttcctttccttcagaatattgacattacaaacttcagcagcagctggaatgatgggctggccttctgtgccctcctgcatacatatctccctgcccacattccatatcaagaactgaacagccaggataaggtaggccatggagggccagctcctggcacccacctcacagggttggagggctgagaaccaagggcagcacctgcctcagcaggtcacatgccacagcgctggcttgcgattgcctcgtgccatctgggtcttctgggatcaggtcattcatgctgagcccaccagtccctgtcccaccttgtgtggagtatttggttggttcagaattccccaagtgatatcattcctagtgggagcagccagtccttcctgagtgactacatttaggatgaagagcttcaccaggaggggcccaagaagctccgtgaaggcaggagtagtcaggcagtgctgaccaggccaggccagcctcctgccaccttgaggagggctgtcactccatagcccattctgcactgtgggccttagaactggcaagaaacaccaaccctgtgcactccagggcatggtttaatgtttcatccagatagttccttggggacagggtcagggaagaa

SEQ ID NO: 102960 - DNA, 1046 bp, Homo sapiens
gggactacaggcacatgccaccatgcccggctaatttttttgtatttttagtagagaccaggcttcgccatgttggccaggctggtctcgaacccctgagctcaggtgatccacctgcctcggcctcccaaagtgggaaatgggtcattttcaaaggggcaacagtgataccatccctgcactcctgggtcctgctcttccaatgcccaaggcatggcatggtggcagctgtgcccccgcccattgctttggagcacagatgactctgggggcagaggtgggctctgtttaggagggcagtgagaccacccagccaaattgcttctcaaccctagacaaagcctttggccaagagggaggtgctgttagttgggcagcccttctgggtttcagagaccggtgttggctctagactggtctcatctccattgccttaatgccaggtggcccaggagtacccatgcacagcagctgtggggtgtgggcatcttcaggtggtgttctggtaaaattgttagaatagctgtatgaaggaaaccagtgggaggaaatgaagttttcaggatggtgggatgtgatttagacagtgcacatgctgttagggctgtcactagggagtggccttcatggagggtggtaacagcacctcagtccagccaaaatgtttagaaacactcagtctctggtcccagaggatggcttctcagggcatgccacaagttaaaggtcaccttcctgaaagatgaatgagaaagctgcccattctcaagactcatctgcctagggagggtcacagaggcaggatgtaagacacactgtgttgcattcttgcacaagtcatgaaaatggagccagagagcctggacatcagggacttttgcccacagcacatgacaccgacagctgcccagcctgttcacatgctggggaccagcacagcacctgaagccatgtgggacagttgggctttgttcattctagccacggggatgaaagggatcttttgcattgcagagattttatatatattttgtttgtaatgagcc

SEQ ID NO: 102961 - DNA, 1065 bp, Homo sapiens
agagtcccaggaactcggagactggcacagctgctttgtctgccagtgccgtgtgttgtcatgtcactcaccccaagcacctgctggctgctggaagcataccccaagaccccaagccttgactccagctgcgcccacaggaagtccagtcccgacagtgcccttgttgcctttgagccagatccatggcaatggtctccccacagaccgcaggactgagcctggagagagaagttgcttgacggatgccacttgtcaggacagtatgtgagtgtctggagacagcatagctgaccccaatcccccagggctgaggacccctccaggcccctctctcctggaagtgctgcatatgcccctgtgcccagtggttgatgataccaccaccacctgcctacccatgggcccaagtttctgtggctcattacagggcatctgacccctgccacccagcatagacacacctcacagctgccctgccatgcagagccctggccgctggagactcttaaagcccccacagccctccaggtcctccagctctgtcagatggagggctctcgggcctagatcccactggtaggcctcgtggctggcagcagtgctctgggaataaacagctgccctagccccagagggatccctgcacccaggaggcctcctgacaccagccaaaatcctgacagcagggtctgccctcttgagtgtggggagcccctagtcctttaaggttggctgctaaggcctgtgctccaaagcaacgggctggggcagcctgcagctgcccacccaacctggtcttcacaccagattgcacaggatactgggtcttgtctatcttgatggagaagaggggttcctgcccaggatcttacaacacagcaagtagcatagagctctttccttcctcttttttggggaggttggggtcaggggttgtttctttgagatttaagttttcatttttgaggggtaatcaccttcaagtaaaacagtaatagcaagagtgaaggtactttggaaccactaacacctctgcacagggcagttagccagctcaagttc

SEQ ID NO: 102962 - DNA, 1062 bp, Homo sapiens
catctgggttaagaggaaggaagagaatgaggcctcagtccagcctgggcttagcataccaggccccagctgggggcaggttcacattattagcacctgcaaagggctttatagacgttcttgtccttagggttcacatcaccctgcaggctggcgtctggtagtccatttcacagaggaagaagcaggcacagagaggccaggcaacttagctagcaggtggcctgctttgctcatgccattgtgccttccatgggccctgctgcacatggagtagaaagacaccaggagcagtgataggtccctgcctcttgggaacgtataagcaacacaggagggcacagacaagctcaatgcaagggccgcatcctaggaggcaaagtgtgaactcaagcccagagaagtacagatgagtgaaagggtgtagccagtctgtgatcagggaaggccctggaaatggcctctgagccaggccttgaaggctggggaaggtcagacataggaagggaggaacttgggattcaaagcctggtaggttggaaaggccaggacagatcccaggactagtgagtggccgtcttagctggcgcacacagggaagtgaggggaactggggctggcacagcaggagggctcctggggtggctctacacagagctggtcacacagtccaggagagacctgccagatggggaaacaatgtgggcaaggttttcacgtgctgaatgagtgtcatgagtgagtaacagcagagataagtctcttcctctttagactctgaactttgtccaggttcatgaggtggctacggaggagggtcctgcatgccacaagcccatttgccccacctcagggccttagcacatgctgttcccccatcccctctaaggcacacccccactgttttccccagcctaggcctctattttgctatgtttgcttatttttgctatccaccaggagagtgactttgtgtcattcactgctgtatctccagtacacacaccaggcacttactaggcttttgggaaatatttgttgactgaatgactgaatcagacc

SEQ ID NO: 102963 - DNA, 1028 bp, Homo sapiens
gcggggcctccagattcgagacctggaagggctggggcggcgcttggggcggcccagccgccgcctcccgttctctcctccgcagcggcggcggtggcggagaaggaactcgacacgcaccgaccgccctcccgccccagccgaagcggaagctgtagcccgctctgggccggggccatgggcgccccgcgccgcccgggtcatgaggacggaggcggaggcagcggggccgccgctcgagcccggtcagtgcctctctgtgggcccagtcttcaccctaggaacgaaagggacccctccctagcgcggggcagggtccagtcgcgcgaccttgggccgactcccgcctcgcccccacacccgcctggttccagtcagtgggggtttcctgacactcgcaggattgcgacccttgtcagcatggtgggaaggtccgggtagcaggggcaccaccttccccagaagcgaaaagtcctgctggagccgccttgggagctcccatgccttgggaaaccgtggaggactgaggctgggaagggcaggaaactggccgagagcaccgagcaatggaagggccagtgccctggcctccgagactcggcgttttgtcttgctcttgttcttcactttcgttctctctgccacgcggtagcctgagcccctttggggcggagacccggactggtattcaatgtcttggccgttagtttgcttgcccaagacgtaggggagggggaagacgtgattcctgtcctgctgaaggcgcggggttgatgacaaacggagttctagctagtaaactctgaagtgaagtgccaactgtggaagaggtcaacagcatgtgggaccctgaccttcaggtgtcactcccagggagtgttcccttttgtgtctgctgtgtggagttggtgggggatttacaaccctcctcctccagttgtctagccctgtggtctgagacaagatacttgcctttcctgagcctcagaggaggaatggcttacattcacagggagtgttctatgagg

SEQ ID NO: 102964 - DNA, 1042 bp, Homo sapiens
caactgtctttagggataaccctgagcgggcagccgctctactctatacctaactttatccgtaccagatacctagcctcactcagggccccccttacctggcggtgccgggatcaacaaatgaaattgtgacgggaagtcctggcccttggcccaacctcctgctgtccccggtctgagggcccaagccccgcgtctccgccttgccgtccagcctgtccttggtgtggggtgcttggaagtgtgagcaccctctctggctctttgccggccccaagggtcgttgcggcggcccccgggcccagtcatcagccctcttttccggtgccggaactatcgtactggtgccctagtttcccagccggcaggcggagtgaggaggaagcggaggcgagaccgcgctcaacactggggaaaggaaggaggcgggccctgcgcgcagcattttgggaaagagtggaattctgggtgttaggcccgccattcgcttgactcacgccttcgccgtagcatctttcgcagcggaccgaagagaagaaaagtaggccagagccggtgaggctggggacgggcgaggggaggtcgaggcgcctgtgaggggccaggggctggagaaagacttgctgcatggaactctgcggggctcggggagggaagaaagcgggaagcttgggccacccaaacatcagcgtcgcctcactagctcctggaagtaagttcattagctttcccctcaacgtgcatgcttctcacattctgtatctctccaggtgagtgtttttcaaagcttccaggcagtaatctcgaagtcatttctgattgactatctccttcccccaaatcctatgagtttttttttgtttttttttttttaagtagagacggggtttcaccatgttgccctggctggtctcgaactcctgggctcaagggatccaccggcctcggccttccaaagtgctgggattacaggcgtgagccaccgcgcccagccggtcattttttaaaaagttctttgtatctctgccccagtcccctttca

SEQ ID NO: 102965 - DNA, 1032 bp, Homo sapiens
gaccacaggcatgcaccaccacacctggctaattgttaaaaatttttgtagagataggatcttgttacatttcccaggctggtctcaaactcctgacctcaagcagtcctcccaccttggcctcccaaagtgctgggattacagacatgaaccactgtacctggcctgatttgctttttaacaatttcaggaaatgtgcagtggttaagagtgtgagttagaaagaactgggttcaaactccagccaggccatgtaagcgtggtgtgacctcaagcaggagaatagagggaaagggcatgggtttctggggacagatctgcctctgaatggctatgtcacttcatctctttaccttgtaggattttgtggggtaacatgagctgccgtggggaaatcacctgggccagcacttgatgtctaataagtgctcagtaactgttggctttgttgtcttgtattttcaaaactcagctttgtagttgagggaacggaggctcagggaagcctggagatatacctagggttacacttctgacaaatggcagagctggatctcacctataggtctttaggcctattttgtgtcttctacagagtcatgagtgtggcacagtccccaaaacacgttttttgtttgtttggtttgttttttgttttttgagacggcgtcttgctctgttgcccaggctggaatacagtggcgtgattttggctcactgcaacctctacctcccgggttcaagtgattctcctgcctcagcctcccgagtaggtgggactacaggcacctgccaccacacccggctaatttttgtatttttagtagagccagggtttcaccgtgtttgccagactggtctcaggtgatccacccacctcggcctcccaaagtgctgggattacaggcatgagccaccgcgcccagccccaaaacacattttaattgtcagtcagattcaggtgagcctgagttgtatccagtttctgtcttgggtagtctgaccataaacctggcgttcatttgtggcact

SEQ ID NO: 102966 - DNA, 1724 bp, Homo sapiens
aaacttgactgactcctttatctgaagtaacgaccccgtccagtgtcattattcgactgctctggtcctcacatcctgtaggctcctgcccaagtgcctgctcttttccttgtgcaagctcttgcctcataaccctccagtaatttcaggccctttttacaggccttgtggtaccacctccatttctcagtccctagtcactcaacctagagggttctgtctcaccttctagagtatgcactctggagggtcagaaccacatctggtatatacttgtgaccttcatggtgcctttgaaatctgagtgccaggcagtgcaggggaagacagtttggaccagcagtttgaagctgttttcgttagggtttagcaccttcaagagctcttcacatctttgctcagcaggcagtgcagcacagccagggctctgaagctaggccagctggttcgaatctggagttccctgcattccagctgtttgacctgggataactgctttggtttttttaacatgtaaagatgggagcactcggctgggcgcagtggctcacacctgtaatcccaacactttgggaggctgaagcgggcagatcacctgaggtcaggagttcgagaccagcctgtccaacctggtgaaaccccacctctactaaaaatacaaaattagccgggcatggtggcgcatgcctgtaatcccagctactcaggaggctgaggcaggagaatcgcttgaacccgggaggcagaggtcacggttagccgagattgcaccattgcacttcagcctgggcaacaagagtgaaactccatctcaaaaaaaaaagggggggagcactcatacccacgctgaaggtgttgtgaggactgtttaggtaaagtgctcagtgcagtccctggtgtacacagttagtaccgatgattgctgggtaattcaccagctttgtcacaatgtcagtctgcttttctggacttccccctcccaccagtcaaggccctccccaccgctggtgctgttgaccgttaacttattagctggtgatttccttccagatgtccaacatcacagtcacatacagagatggccgagtggcacagctggagcaggtatacatccgtggcagcaaaatccgctttctgattttgcctgacatgctgaagaacgcacccatgttaaagagcatgaaaaataaaaaccaaggctcaggggctggccgaggaaaagctgctattctcaaggcccaaggtaggtgcttttcatgcacaggttttaaaatataggtttgtcttgtgtcttgtagaaaggggccctattactgcctggagacagagagggtttgacctctgctctctccacacccaccacccactgccaccccttccccttgcagcgtggagtgatcctgtgaggccattattttatttttttgagacagagtctcgctttgtcacccaggctggagtgcgatggtgtgatctcagctcactgcaacctctgcctcccaggttcaagcaattctcctgcctcagcctttcaagtagctgagattacagtgcgcactgccctgcctagctaatttttttatttttaatttatttttatttttattttatttttaattttttttaatttttttatttttttgagatggagtctcgctctgtcgcccaggctggagtgcagtggcgtgatctcggctcactgcaacctccgcctcccgggttca

SEQ ID NO: 102967 - DNA, 1112 bp, Homo sapiens
agtccccagcccctgcccctccgtctccatcccccctgttaaatgcagtggctgtcagctggacgtgttggcttatgcttgtaatcctgacactttgggaggccgaggtgggtggatcacctgaggtcaggagtttaagaccagcctggccaacatggtgaaaccctgtctctactaaaaatacaggaaattagccgggcgttgtggttcacggctgtagtcccagctactcaagtaggaggctgagacatgagaatcgcctaatcccaggaggtggagattgcagtgagccgagatcatgccactgcactccagcctgggtgacagagtgggactccgtctcaaaaaataaaaaaaaaaaaaggcgggaggtggaaatgcaatggccagggtggtgttggaccaggtaacccttcagaacccttctaactggtgtcctagggccctggctactctgtgctatgagcattcaccgaccacactgacctggcctcatattttctcttccctttcagtggccgcaagaggaagaggacgtggaatgggacgtggaaacatctttcaaaagcgaagataattttctaagttgaacagaactttgtccttttttctttcaggttatctgagttcattggagtgggtgcttgtgcatatatgctaggtatcttttgccatctttctctttagatcaggggaaatgtttaagctaaataaatctggggggttttttgttctgttttgttttgttttctttgagaaaataaggactttgtgttcatttgaagtttgctttggctaaattttgacaccctgggggatgtcctgggagaatgccagtactttgaaatagcacagctattgatgagattttaagctgctgttcctggccagttgcaggttaagccccagaaaagttcaccttggagaagctccgagaacacacagattgtgtctcattcatcttcagacacaggcacatagtgtggcactttgttcagttaacatttgtggagctgtcatcagctcagctttaacaacacaggtgactctttcccttgataaagtcataggtaattcaggggctgggtgcggcggctcacgcatgtaatccc

SEQ ID NO: 102968 - DNA, 1076 bp, Homo sapiens
tcccatagcctcaagagcagcctccagaagactctgctggcaggggagactgtggacctctcaggcatcccgctgtcgacacaggacgtgcaacacatcacacgctacctgagcagccatggtgctgtgctggcggtgctggacctgagcttcacggggctgagtgatgagctgctgcacctcctgctgcccagcctgtgggcgctgccccgcctcacccagctcctgctcaacggcaaccgactgacgcgggccactgcccgcaagctcactgatgccatcaaggacaccaccaagttccctgctttggcttgggtggacctgggcaacaacgtggatgtggcttccctgccccagcccctgctggtcggcctgcgccggcggctgagccagcgcacctcactccccaccatctacgagggcctggaccttgagcctgagggcagtgcggccggggccaccacccctgcctccacctgggactccacagctgctgggctgggacccgagccccaggcctgctgtgccaggtgacccaccacccacctggctcattgctactgacttgtgatgctctcaagcacatgatagtgggcgatgaaggtcaaggaggactcacaggcccccagaaatccagtgtaaatgctcagcctgagattaaggggacagaagaatggactcataggtggccaggtggccagccctggctagaggctcagccttccctcagtgggaggggccccagcacccacagtgtggaccccgcaataaagagtgacacccgcctctgcttttctgcatcaccaacctcagggtcactgagcaacagccctgctgctggggtggggagaaagggtggctgtgtctatccaaaagggtgggacaaaggtcacactgaccttcccccaggtgctctttgggcaagtcccccatggagtctaagatgtgggggtcctgggtccatccctgtgggctggagagttagaggaggcctccagggagcgggccctcacatctgggcagggcttgggctccttgagaaggggagctgcgaaggagcgggtcgggagccccag

SEQ ID NO: 102969 - DNA, 1050 bp, Homo sapiens
aagctggggagagggcctgttaggagaggcatcccctgccctggggttgtagaggtgaactaggctcctcagaccttgtggggcctcagatgcttacatctccagcccctcctggcgtgggcatctggctgcagcccagctctgtggccccatctcccagggaacctttggtctaatctgcctcccgctgaaacccagcctcattcagccccaccgaggctttcagagttcaggtctctcattcagggtttgagaccccaccgggctcagagacacctgcagcctgcagcggtcccagatcacagcctcagggatgggaccaggagccagcccacatcccacctgcagcagttcctgtgcctttaaagcctcccctccccccgccccgcccccaggccactaggggagggaaggaggagctgggtcacagcagggaatcttagcttggttttggtgtgctgctggatgaccagaccgggcgtcgggtgagcccagaagtgagagcagttggctgtgccccagtgctgtgtgacccagaggcgccgctcaccctctctgagctggtggacatcataggtggggaagctcaggtcagggcactcccatgagtgtctggaggcctgagtcccattctcagctctgccatatgcttgctgcgctctagaggagttcctcttcctctccaagcctcggtttatgtacccgtgcagtgggagtgagttgcacttcggggtgaagggggcaagacttgtgtgggcgcatcctgcagaaggatcccacaggtgggcagagccctgggttctttatccgactgggtctgggctgggggcctctgtttcttggctgatgagtttatgtgagtttgagtgaggtatgcgagtgggtgaaggagggctggggggagtcacctgacttgtgcgaagaagctcttgagagagccgtggcttcttggaattaagaggaaagagtgcagcatgaacagacaggccctggaggatctggcagccctgagtgggggcggggggtcagctctggagtagagccagagct

SEQ ID NO: 102970 - DNA, 1060 bp, Homo sapiens
tcacagctaccattcaccaagccctgcccacagtctaacctactctattcacaacactcccagcagcaaggcaagtgaggtgctgccgtcatccaggctggacagttcagtgatttgcctgaggccccacagcaggtgagtggcaagtccagcatcagagcagggcaggctggcggtgccccctgagccccctttgccatgctgaccacatgcacatcctgggcttctgcaggaatgccctgtcccctacctgccctgctccgtgcaaaaccctctttgagctgtgcctgggagacatgctgagagaattcatggaaacaaatgtgttactgacagcctctttgcctccagagttcaactggagacagagaaaccagctagaggcagagggaggtaacacggagtcccccagaaaggtctgggctgcgcgtgcttcaggtaacctcccttgaccttcaggagaacgagaaggctgcctgatcagagagtccctgaagaagattctgtggctacaggcttcagcagagtgtgagggagaccccggttatttcctcagctatttccaccaaatcctcctgtctttcgtggccaacaccccaggcaaggcttggggcccccgtctgctgctggacggtaagtcctggccccgtggcagtgaatctgtggggcgctctgattgtgggcactatggaagctaaaccccatgctccaggtggggtggagggtcttcagaggactcctggacagtgccaggctctaggctggggtgggggacacaggagaaaccaggccaggcccatccctactggagcttctccctaagcagtggaggctcagccactgtaaggaggtaggcaaggccctgcagaaagaggggtgtggaaatctgggggctcccaggaagggccgctgctggagatggggttcttaccaggatgggctctgaagataagcagggaggatttgggagggcagagatgaggcccagagcttctggcagagggcatggcctgcgcaaaggtctgggggccggacagcctgcacgtattctgggaagcgg

SEQ ID NO: 102971 - DNA, 1001 bp, Homo sapiens
ccaaggaccttgcaggccgtagcagcagtggagcagccctctgccttcaggaccctgtgctgataatgggatgaggagatacagacccttcccaccacgtgtggggacacattctgagcgtggggtcccagtggccactgtggctggccatgtgtcctgagtggcaagggacactaggaagctcccggaagggacactaggaagacgagcgctgagtgacagggccacccacctgtgacaggcgctgcccctgttctgctccgttctcctgtgtggacgggtgtgaggggtggtctagctgagtccaccccacctgctgcctcacatgagccccctctgccccagtgaggtgttctgccgggatagaaaggtgcttcgggagggggagagactgaccctgccgcagctggctgacacctacgagacgctggccatcgagggtgcccaggccttctacaacggcagcctcacggcccagattgtgaaggacatccaggcggccggtgagtgggtaacctcaggggcctgggtgaggaactctgcagtggaaaccctgagctgtagcccagagctatggggtcctcctgtcttgcctgagcctgcaggaagttcctggtggaggagggtcagtgactggccatgtgggtccacagctcctgcttatatcaaaaccaagagaggccacacagtccaggagagcaagtccctgttggggtaaatgcaggtgtaggcaagagccagggctagggaagcactagaatacagcctgaagatccaggaggacttcttggaggaggtggcggctgggctgcagataactttgttaggcagagagaggaagggattcctagcagaggaacagctgggctaaggcccagtagagggcgctttgattcaccaagagggttacaagggatgagggtctccttgagagaggcatggggaaggggatttgtggggcaggggcctggagcttggctgtggctttcttcaggtaattt

SEQ ID NO: 102972 - DNA, 1116 bp, Homo sapiens
cagctactggggagggtctgctggaggatcacttgagcccaggagttcaaggctgtgattaagccactgcactccagcctgggtgacagagcaagatcctatctctaaaaaaaaaaaagaaaagaaaacactctgtggccacagatgagagaaggcagacaggaagccagtaagccaagcaggcaaagggcaggtggccccagcccggctgttgggtggtgagcagtgtcagggagacaggagtgccggagctgatgaggttcccaaggaggtgaggttgcctgtggccccctcccagggcacagtcccacccctccagtagtgcactctgtcctccctggtaggtacaggcttttccccaccaccatggtgcagccatgcctgcccccaacaccactgctgcagctccatcctccacgcagtggtgcagccccatcccagcacccatttgagctgctgtcccattgcagggggcattgtgacagctgaggacctgaacaactaccgtgctgagctgatcgagcacccgctgaacatcagcctgggagacgtggtgctgtacatgcccagtgcgccgctcagcgggcccgtgctggccctcatcctcaacatcctcaaaggtgagtggtcgcaccacagccgtgtggtaggacccatgacactgcctctctctccccacgccccacccctcctgcatctctgctcgccccccatgccacgtctttccatcactgagctcccgaggtgtgtccctgcgtcacagttcaccatgtcctgaaggaggcagtgcagagcgacagggctgaagcgggcaatgctcaagggttggaggaggaacaggagtcatcaggagggagagaggtgcaggagctcagggctgcagggccggtccagagggtaccccggtccagtgggtgaccctgccacttggtcattgaatggccagagctgatgcgtgacgtgaggtccaggctcgggagccctcaccttacttcactctcaccacagccttctgaagcagctgctgctattggttattaaacgctccttgaggtgggcaaagtggctcaggcaggtgttaaccctctgagcccctcagagcctctggggctcagc

SEQ ID NO: 102973 - DNA, 1047 bp, Homo sapiens
cgtcacgacagtggagagaaacattgaccaggtgggccgggggttggagaaactgagtcaaggtgtggggccccagggcatcctgggctggaggcctggatcatcacagagtggacaatggttggtgtcctctctctagtgcctgggccatctggagcccctgtgccatgagggccaagccccctgctccagtgagacccagcaggccccaacctgctcttcctgatgacctggcccgaaatggcaccacctgggctgaggcctgtgaccacacagatgtggttcaggtggcatctggagccctgctcaggcttcccctctcctcccacccccaggcagtgactgcagccctggagacccggcaccatcacacccagatcgcgtccaccttcatcgctgtggtgcaagccatcgtccgcacggctggtggctgggcagctgcctcggactccaggaaaggcggggagcctgccggctactgagtgctccaggaggacaaggctgacaagcaatccagggacaagatactcaccaggaccaggaaggggactctgggggaccggcttcccctgtgagcagcagagcagcacaataaatgaggccactgtgccaggctccaggtggcctccctggcctgtctccccactctctgggcctcagtgtattgtgtgtgaaatggagccatctggctggggaggaacagagaggtgggattcggagatcttcacaatgcgggcactggaactagcctcagcatcttcagcatggggagagccaggcacatggctgggggccaggggaaggttcacaccaagctctgccccttcccaccctgatccctcggactttggggccaggccctcccttactggggctgggcagtgacactacctaggatcagccaccagggggtaccacgaccctggcactttcttaggcagagggtggccagctgatgctgggaacccgggtgccttcttagacccgtaggcgtccagctcaccctgccgatgacactggaggtgaagctgaggtccgaggaatggg

SEQ ID NO: 102974 - DNA, 1034 bp, Homo sapiens
gctggaaacaaggtggcctcagcgtgatttcctccagttaaatctgaccagctctatcttggctccttcctggcttcctttaccctccctgccaacccttaattttgttttggttcccagagcgagcagggactggcttcccgttgccataacaactgccattaaaggagccagccatgtgatgccagttgataatggaagcaaagtgactaactgccttgttttcctgcctctgggctgggcctagaaagcctcttaattggaggggagaatgcaggggctggtgggaggcagatgagaccccaggaaggagacagggagatgaggcaggtcctggagtggaagctacatttagctctgcgaccggagctggtggaagggctgtaattggggagccatcatcatagctgctgaacagagcctgtttggagaactgagcctcccagcctctgggttaggggtgatgagatgggagaggcaggcaggacttgctaagaaggttggagaaaaacgagagaagcaattgacgttaccatggggaccctgcagttttactgtgacccagtggttcttaatgaaggggagcagttttgtctcccgtccctaggtttggttgccagataacatccaggtcgcccagttaaatttgactttcagataaacagtgagtaagtttttagtatgagtatgtgttgctaaatctggcaaccctactccaggggacatttggcaatgtctggaaacatttttggttgtcacagttgggggtgctatcagcatctagtgggaagaggccagggatgctgctcacattcctgcaatacacaagacaccccctcagcccaccaccactaggagcacaaagaagtggccagcccagaataactcttgttaaggcaggaaaatctgctccccgctcaccctacccatcctgcacctgctgcgcccttcacttctctaggctaatttgatacgaatgtactgttcttgaacaactcattcttactgcttttagattgtcttgaatgcatatt

SEQ ID NO: 102975 - DNA, 1319 bp, Homo sapiens
ccatttctgcccactatttactatatgaccttgggcatgttacttaatctttccttaatctttctgcccctcggtctcatcatctgagaactaggtatgaaatagaaactgtcctcacagcactgtggagagggcataatgagcgaataatacagatcaaacaaacctagatgccatctgttagctgagtctggcacacgagaagggcttggtcagagggagagatgatgaagatgatgaggatgatgaatatgatggtcatggtggtgccatcagtggatctgttacttcactagggctgcccttacggtacacagaatgggcagcttgaatgacataaactgattttctcacagctctggagatggaaatccaagatcaaggtagctgcaggactagttccctctgagctccatgagggaaggatcagatccaagcctccctccttggctcataggtggccatcttctccctgatcttcacatgatcttccctttgtagctgtgtctaaatttcctcttttttttttttcagacggcgtttcattcttgttgcccaggctggagacagtggcgcgatcttggctcactgcaacctctgcctcctgggttcaagcgattctcctgcctcagcctcccgagtagctgggattacaggcatccaccaccacgcccggctaatttttgtatttttagtagagatggggtttcaccatgttggccaggctggtctggaactcctgacctcaagtgatctaccctcctcggcctcccaaagtgctgggattacaggagtaagccaccatgcctggccaatttcctcttataaggacacttataatcatattggattaggacccaccctaatgacctcattttaacttagtcacctctgtcaagatctaatctccaaagacagcacattctgagatagtagtgttaagatttccacatgtgggccaggcgcggtggctcacacctgtaatcccagcactttgggaggctgaggcaggtggatcacgaggtcaagagatcgagaccatcctggccaacatggtgaaaccccatctctactaaaaatacaaaaatcagctgggcgtggtggccagtgcctgtagtcccagctacttgggaggctgaggcaggagaatcagttgaacccgggaggtggagcttgcagtgagttgagattgtgccactgcactccagcctggcgacagagcgagactccgtctcaaaaaaaaaaaaaagatttccacatatgaaatggaggtgaagggaacacagttaagcccatagcgatgggggaggtgacatttt

SEQ ID NO: 102976 - DNA, 1058 bp, Homo sapiens
cacgaggtcaagagatcaagaccatcctggccaacaaggtgaaaccccgtctctactaaaaaaaaaaaaaaaaaaatacaaaaattagctgggcgtggtggcgcatgcctgtagtcccagctactcaggaggctgaggcaggagaatcatttgaacccgggaggctgcagtgagtcaagattgtgctacagcactccagcctggtgacagagccatactctgtcaagaaagaaaggaaggaaggaaggaagcggaggggggggagggaaagaaaaatagaaacagtcttctcacttttgtatccccagggcctatgtactatctagcacatagtaaggactcaatgaatagttgaaatttatatatgtatgcatgaatgaataaaggaaggagggaaataaggaaagaagtagccttgctccctttgtgtcttcagagcctaaccagtgctaggcatagcatagtaggtgctcagttaatatctgctggatgttaactgcgtgaatgttggatggatcagagccactctcttccacgttggtctggccctccccaggcgcccctttgttgacacctcgggtgacattgcatctgccctggcaggtggacgagcagattcatgcctgctatgcacagaccatggctgagtggctgggctgcgaggcgatcgtgcggcagagggagcgggagtcccatgcggccgccctggccaaatgctcatccggggccagcttggacagccacctgcaccggatgttgcacagggactcaaccatcagcaatgaggtgatgggcggctggcctcggggagcgcgggggctggggaaggtcagggtctgcttcattgggctgttctaagagtggtgaagactgggtgtctggggcctggtgacagtctcacccctggctttttctttaagagtgtgcggtgactttggaatcagacctgaattcaaactctagtcccaccatttagtagttctggggttccctaccagtaccttttcttctgggcctcagttttctgcatctgtaaaatgggaataatcaggtgtaga

SEQ ID NO: 102977 - DNA, 1057 bp, Homo sapiens
ttgcacttctttttttctttcttttttttttttttttttgagatggagtcttgctctgtcgcccaggctggagtgcagtggctcgatctcggctcactgcaagctctgcctcccaggttcacgccattctcctgcctcagcctccagagtagctgggactacaggcacctgcctccatgccctgctaattttttttgtatttttagtagagatggggtttcaccgtgttagtaatttgcacttctaacaagttgccaggtgaggctgatgttgccagcccgtggactatgctctgagaggcactgacatgcactgtgctaagcactataaaatcattagtttacttcatttccatgataattctaataatttattgggactcatataagtgagaaaacctatttcccagataagaaaactgaggcccacagagataagagtatatgctgagtttgtatggcagaaatacaaacctggattccaatccaggtgggctctaaatagctcagtctggagccactaagctttactaactgtttcccaaaaaagtccaaagcaagaatggatgctgggtcatacctggatcaacgatctcatgtttgcaaagtgcgtgtccatggcgcctccgtgggggaagttctggttcatcctcttcatgagctccgtgaagcagctgaaggcaagggcctctgagaaagcatcacagaacagtcagatgccccgctgcccaagtgatatggttcagatgtttgtcctctccaaatctcatgttgaaatatgacctccaatgttgggggtggaccttttttgtatttttagtagagacggggtttcaccgtgttagccaggatggtcttgatctcctgacctcgtgatctgcctgccttggcctcccaaagtactgggattacaggcctgagccactgcacctggccaaaaggctttatttttcagaaaagttttgatttacagaaaaactgagaagacaggaaagacttctcatgcaccccacacgtggtttcctctattaatatctggacattagcatggtacattt

SEQ ID NO: 102978 - DNA, 1132 bp, Homo sapiens
gatgtatttaagtttttgaggaactaccacactgttttccacagcacacaccattttacattctcaggagcagtgtatgggggttccagtttctctgcatcctcgccaacactttttattgtctgtcatttttaattttaactatcctagtgcgtgtgaattggtatcttgttgtggttttgaattgcattttcctaaggattaaggatgctgagcatctttcatatgccgcttggccatttgtgaatcttctttggacaaatgtctattcagatcttttcccattttttaaactgtaactggctgttaaggaccgtatggtgtctggtgtgtggatgtaccaccatttattcagctgtctcctctgctccaaccttttcccaggaggctgatgctgcctttccttccttgacagatcctggactcagagctgtttgagctgatgcatcagaacggggactatactcacttctacttctgctaccgctggttcctgctggatttcaagcgaggtacagactttaaattggggacctgtgtccagactctttgtagcagaactttcaggggaaaagatcccgtggaggtgaggttgaggggttggcaacagaggcagcagaggagagaagcacatgtttatggagtccagactaccgtttcacctgccttatcttgcactgacactctgtagtaggtgctgttaagatcttcatcttaccagtgaggaaaccgaggctgagaagggttaagttcagagctagggagagttaacttcagggctagggtgagtacagccaggacttgaacccatctctttcattctgctgtgctgcttttcagagcccaagaactctaaagcccatgaagcagggactatttcatgcacgtttccaacatgacataaaagtgatgtataacacagtaccttgttgctattgttcagatttggggtgatgttaataattatagtatctgacatgggccgggtgcagtggctcatgcccgtaatcctagtactttaggaggccaaggcggtcagatcatgaggtcaggagattgagacctaacatggtgaaaacctgtctctactaaaaatacaaaaaattggccgggcatggtggcacatgcctat

SEQ ID NO: 102979 - DNA, 1053 bp, Homo sapiens
cctctctctaaacatccacttcctcatctgtgaaatgggctagcagtgtctgctttggagggttgacatgcataggaaaagcaggcccagggcagcaatttgagtaacacgaaaaagacacagcctttgaaatcagacagatgcgaattctgatccaggctcctgggagctgtgtgactttgtccaagtgacttcacgtctctaggcctcggattcttcagggataaaatggtactaacactccctccctcacagggaggtccagaggattacaggagacaacatggttaaatcccagcacgtggtacctggctcataggagggacccaataaacaaaagctattgccactgttatcactatttaaaaatgtttttaatgaaagaaagttctggaaaaaaacaaaagaaaaaagccaactgtgacctcacttttgaaacattattagggttcttaatttaagtaaactttttgggggaataattttgcattttaattgtctactaaaattgtagattgagaactgttttagatttagatgtacagagaatgcacgataccttggcctcgctttgcctactgttagcatttacataaccctggtacatttgccaaaactaagaaattatcattggcacgttaccatctattaaactacaggctttatttggatttcacctggtttttcactagtatcctttttctgttctagggtctaatccaggaaaccacagtcatgtttatttttatgtttttacataatcagaatccacttgtatatgccttttttcacttaatatttcaactattgtctttcatataatctttttttttttttgagacggagtctcactctgttacccgcgctggagtgaagtggcacgatctcagctcactgcaacctccgcctcccaggttcaagtgattctcccgcctcagcctcctgagtagctgggattacagacacgcaccaccacgcccggctaatttttatatttttagtagagacagagttttgccatgttggccaggctagtctagaactcctgacctc

SEQ ID NO: 102980 - DNA, 1001 bp, Homo sapiens
atggcgcgatctcggctcactgcgacctctgcctcccgggttcaagcaattctccggcctcagcctccagagtggctgggattacagatgcccgccactctgcccggctaatttttgtatttttagtagagatagggtttcaccatgttggccaggctgatcccaaactcctaaccttaggtgatcctcctgcctccgcctcccaaagtgctaggattacaggcatgagccactgcgcctggccggggctgttttttattgaaggctgaccttggcaggagaatgaaggagccagttgtctggctctgagcatttctcctcaccaggctacatctctgaccaactcagaaacagagcctcacagggatattttatatgtgcattcattcatttatttatcatttgttccttcaacaaatatttcaagacactgtgtcaaagatgaggctagcagccacatccttaaggggatactttatgccctgaaagtctttgtgaacatatgcatttgtctggaaggggagaactatgatcataggaggaggggctgatgcctttggctataaggagggatgcgggtcagagagtttagttttctcgacagccagtgggaagaggttggtgttatgggctgcagaaatggaatagcttgtgcagaagcctggaggtaggtgagtgcctagggtgttgactggggccaggccagccatgcttagtggtttggactttattcctggagcgtggggcgctgtggatcacagtggaagggtctctgcaggtgaggggcagggtcagatgtgtgttttgggaagcttgccctggctggtgtggggaggctggatgatcggagggtcatgccaggaggctgggggccagtaagcaggctgctagaaaaatccaggtgagaggccaggcgcggtggctcacgcctgtaatcccagcactttgggaggccaaggcaggacgatcacgaggtcaggagatcgagaccatcctggcta

SEQ ID NO: 102981 - DNA, 1049 bp, Homo sapiens
gcactttgggagccaaggcagttggatcacttgaggtcaggagttcgagaccagcctggccaacatggtgaaaccctgtctctgctacaaatacaaaaaaattagccgggcatggtagagggcgcctgtaatcccagctactcaggagactgaggcaggagaatcgcttgaacccagcaggtggaggttgcagtgagccaagatcacgccattgcactccaacctaggcaacaagaacaaaactcccgtctcagaagagaaaaaaaaaaattcagcaagtgcaagtgttacaacctcatcatcttggtagtcagtggtttgctgacacatttcaaaatggggtgtgtctccccactgtgtcacgacaccttaggagggaacttgttttccaagccagtccttctattgtgagtcagtgattctaggaaagagtggtgtcataggttgggttcccccagaagcagagcctaagtcaagggtgcaaaggcaagcagtttatttgggtggcagtgtaccattagggtgagataaggagcaggttaccttggggaacagctggggctcagctgtgctggggacctctgggagcctatagaacatgccattaaattatccgacttgagtgctaggtagctggggtatttatcccccagcaacagaaagttatccactagtgctgagaggatttgggtggagtccaacagtgtttggtatgacagagtaggctcttcccaggcaccctgtggtgcctggggtggcacacctcttgtgaggacctggctggctccagcaggcagagggcgaccgtggctcaggtgaaccagcgcatgaggtcagaggctctgacaaaggagtggcttccctgttcctgcttctgcctgagatccagggctgtttgcagaaaggcgactctttaggcatgtaaggatctctgagcccagagaggtcattttcttggggtccccttttaagaatgaactgtatcatcgtcagagctgttgtatcctgagcacctgctgtatacactttccaggcctctttgcttcctt

SEQ ID NO: 102982 - DNA, 1043 bp, Homo sapiens
tctcaggaggctaagatctcctcaatctaaagcaggggtcagcaaattttgtctgtaaagagctatagtatgtattttaggttttctgggcgatatggcctctgtaacaactactcaactctgtcactaaggcagagtcatggataaaggctcttgaaggaagccatagatagtctgggcaacatggcgaaagcccttttctacaaaaaatttaaaaaattagcaggtcatggtggtgcatgcctgtagtcccaactagttaggaggctgaggtgggaagactgcttgagcccaggagattgagactgcagtgagctgagatcatgcctgggacacacagcaagaccttgtcccttaaaaaaaaaaaaaaaaaaaaaggcagcagcagcagcaaccatagataatatgtaaataaatggctgtgggtgtgttccaataaaactttatttgcaaaaccaggcagtgggctagtttggcctgtggactctagtttgccaattttggatccagagaaaaacacggggggaaacagcagcttaattaatggtttcagtgagtggtcagccagtccaaaaatagcataaattgtaggaaggaacaagccaatgaaagttgaaaaggcggaggttaagcagaggggtaaagataagttgtaacattgtttctccagatcagcagctgcacttggacaagcggcctggggtgaggcagtttggattatgctttagagggcctaaaaggcaaatcagcatattaaaggttctgaaaagtcctgctggaaagacacctgtttattcccattgttgaacccagcatttctcacagtcttttaatataccacagaatgcttctgtgggtaatgggtgtgtcctaccctacatcccatggtccaggggaagtttggggaaggccatctcaagctgttcccctggatcccagagtcagaaacaccagatgtaccgcactctgatggaatttacacaggagtcaagactttgctaattatgtcaattcttacagaaacagtacacactccgtacgaa

SEQ ID NO: 102983 - DNA, 1033 bp, Homo sapiens
gcaaagtgccacccacccctcccgagaagacgtgggtgaggaagcccaggcccttgtccatggacctcacggcccggtttgagaacaaagaggccttgctgaggaaggtggccgatgaaggaagtggacccacagcaggggatatggctgggctagagaggcccagagcagcgtccaagctggacagggactgtttggtcaaggcggaggctcctcttcatgatcctgatttggacttcctggaggtggccaagaaaatccgtgaacggaaggagaagatgctttcgaagccggagatgggcagccccagagccctggtggggggctcatctggggtcacccccagcaatgaccagagtccctgggaagaaaaggccaagctggacccagagccagagaaggctgctgagtccccctcacccaggctgggaaggggcctagaacttgctgaggttaagagcagagtggcggatggggaggccgcggcagggggagagtgggcctccaggaggagtgtcaggaagtgcatcagcctgtttcgggaggacagcaccttggccttggcagtggggtctgaatctcccctggccacccctgcgtccccatcggcggcaccagagccggagaaaggggttgtgagcgttcaggaacggatcagaggctggactgccgagagctcagaggctaagcccgaggtcaggaggaggacgttccaggctcggccgctgtcggcggatttgaccaaattgtaagtaggcacatcccacacccctctctcagccgcccacccacacaccctgaggaagacggaaccaggctccatgctgggcacttgtcaccccccctcagtttacccatagcccaagaggaggtagtggcagtgtccatttctcagatgagaaaggtgaggtgcggagaggcagtgcagctctcctctgggtatggccagccggggggcccggagcccaattttcatggcttttctcagcttcagatgtagtgtgtgagtgaagtgggcggtatgtgcccattt

SEQ ID NO: 102984 - DNA, 2294 bp, Homo sapiens
ggctgggcagggacccaccagacatgacaaaactgaagaaagagaactccagagggtttgacaatcccgagacggagaaattgggaccaaccacccttttgaatggtgaactgagaccgtatcacacgcctctccgggacaaataccctttgtctgaaaaccacaataataacaccttcctcaaacacttggaaaatcctcccacatcgcagagaattgagcccagatatgacattgtgcatgcagtgggagagcgtgtgcacagcgaggccatctcaccggcaccggaggagaaagcggtcacgctccgcagcctcaggtcttggctctcactgaaggacaggcagctgtcccaggaggtcacccctgctgacctggagtgtggtttggaaggtcaggcggggtccgtccaaagggccagtttgatttgggaagctcgaggcatgcctgaggctagtggaccgaagtttgggggcaattgcccgtttcccaaatggacaggcggggcagtggtgagctcgcacaaagccaccgtggcagtcagcgaagagcactgtgctcccggggccacctccgtcagggctatcaaggctgccatctgggaaagccagcatgaggggccagagggggccagaagcaagccaggagtgggagcaaggggcccaccccagggatgccccctcgatcctctttccagggctacgaatgggccttctgactcccaagcacgaacacatccagatgcatttgctgtgcagaaagggcccttcattgtagccgccagggagggtgatccagggccggcccaggtgccacagcctgcagtcagaatgcggaaagccggcgccatggaccagagaatggacagatggcggcggcggactttaccccccaacgtgaaatttgatacattcagttctcttgtcccagaggactctccacatgtggggcacagacgaacagattatgtgagccccacagccagtgccttaagaaaacctcaactatcccactacagggtggagacccaggaggtgaacccaggtgcttcacgggaccagacttccccagcagtgaagcaagggtcacctgtggaacccaaggcgacattttttgcagtcacctatcagattcccaatactcaaaaggcaaagggtgtggttctgtcaggagctgaaagcttgctggaacattctagaaaaatcactccaccctcgtctcctcattctttaacatccactttggtttctcttggtcatgaagaggcattggagatggcaggcagtaaaaactggatgaagggacgagagcatgaaaatgcaagcattttaaaaactctgaagccaacagaccgtccatcatctcttggggcctggagtctggaccctttcaatggaagaatcattgatgtggatgccttatggagtcatcggggatcagaagatggccctcgtcctcaaagcaattggaaggaaagtgcgaacaagatgtcccccagcggcggagctccccaaaccaccccgactctgaggagtcgtccaaaagatcttcctgtgagaaggaagactgatgtgatcagtgacacgttcccaggtaaaatcagagatggctacagatccagcgttcttgacattgacgccctgatggcagagtaccaggagctgtcgctgaaagtccctggggaggctcaggagaggaggagtcccaccgtggagcccagtacgttgcctcgggagaggcctgttcagctgggcggggtggagcagagaaggaggagcctgaaggagatgcccgataccgggggtctctggaaaccggccagttctgccgaaataaatcacagtttcactcctggcttaggcaagcagctggcagagaccttggagacagccatgggcaccaaatctagccctcccttctgggctctgccaccctcggctccttctgaaaggtatccagggggctctcctatacctgcggatcccaggaaaaaaacggggtttgctgaggatgacagaaaggcctttgccagtaaacatcatgttgcaaagtgtcagaattacctggctgagtcaaagccctctggtcgggaggatccaggcagtggggtcagggtgtcacccaaatcgccccccactgaccagaagaaagggaccccaaggaaatccaccgggcggggagaggaggacagtgtggcccagtggggtgaccacccacgtgactgtggacgggtgccgctggatatcaagagggcctactcagagaaggggccccctgccaacatccgagagggc

SEQ ID NO: 102985 - DNA, 1011 bp, Homo sapiens
ctgggtacatagcaaacaataagtgtcatcgtcacataattattactcttgctgttactggtacgactgtccttgttttcaagtctccctctggctcttgcttatctctgtgtccttgtgccctcttccccctcatcctgtttccttacttgtgaaaggaggtgagtacacactgagcaggccccagggacagctgtcccattcagagcttcagtgtgcccacatgggttccagggcttcgccacctccagtgagtttcttttcggactttagttccatgctgtttggagttttgcacttgctcatgaagcccctttccggcccaggtcctatacaggggcatcgaagacagggctcctaaggcagcgacacttctgcccacaaaggcctctttggttgctcagctccacaagcttcagggatacctgggcctggtctcacgttttggagacatatgattttgtgctgaagctccattgagagtccatcccttccagttttatggccacaggcaagaaactttgctttcctgaacctcagtttccacttctgtaaaatgggggtaaagaagataccctggcatggtttgtgctaggagtgatgcagaacagccacaacgtgagcccgactgtggggctgagggagacgggccggggaggaactcagatcccagctaggtgtttactgagcagcccaggaattttcctcgaggatccagatcctagccaaagattcacacacatttgaaacctgcctggattttttgataaacattcccttccattgacttctttctcagctatttctccagtccctctcagatagctctgacttagcttatctgattgtacttgaacttttatgagtgtgtgtgtgaagacaaaggtgatgggagagaagcattttaaacctgtctttttagagtctgcttgctggcatcctccttggccgtcctgctcctcctctttcactctctgtcattgaagagcttttgtccttggagtcctcggg

SEQ ID NO: 102986 - DNA, 1050 bp, Homo sapiens
cacatgcacaaaacacactcgtatgcacacatgcacacatacttgactccacgtaaaagcatgtacacacacactccttcatgcataaacacacacacacacgcgtgcacacattcagttcccgggcatcaccttctctcttcttgccttcttgccgtacaactgaaaaccctaaaaccctccgtgcctacggctcccgggagggtgagggtccaggcagctgggttcagaaggatccacccctggacccgccccactggacgagaagccagagatgccccgggcggggctcataggaccgagtggtggcttctcagttccccaggcagccgtggccattagtggagccgactggctggtcccctggccgtgagccggcttctgaatgatttatgccgccttgaacttgactccagcgtgacaggagtgagaagagccgctcccgctagaggaaagctggaaaccgtactgtgctcaccacataacctctgggtgctggaaatggagtattactactgccccagcctgctgaagctcttgcgctacctctgggtgagtggcggggggcagtgcaggctccaggacggggtcacgtcctttccctctcctcctgcttcctgtcaactttgctttttggctgtgtctggttagcaatgtctctgttttctttaagaaatggtggaggttacaaggaagagagaatgttggggaaaaaggaaacgggcttggtttgggaggtagcacaggtttgtaggaagagctgagactcctgaacaggaatgaagatcctggatccgatgtgggctttcctccagtcctcaagaaaacaggaagaacgagaaccacttcagtgagtttttcagaaagcaacatttatttgatttaaaggactattctttattctgaaattacatccctcttgcctctgtgtgtgtaagaatgtctgtcttctatgggatgaaaataatagattttgctttccttttcctgaacctacacagtgatagaagaagttgggaccccttccccactaacactcacactgtgctg

SEQ ID NO: 102987 - DNA, 1048 bp, Homo sapiens
ggcagtaatgccctcagcctcctaggggcagctttgtggagtgacagagtcacagctcctcacctggctgtgtcccacctctctagtgaccttgggcaagtcttttcctctctgggccttggtttccccatctggaccatgaagaggtaggatgaggcagtttagaaagtctttcctagatgtgataatgagagagattttcatttgtccgctgctttctgtgggtgaccaggtcctgggggagtgaggagccacataggcccaccgctggttttgcaaattacccacaatttctctgtctctctgagtcactgaagacagcctggcacacgtgttaacaagaccgggatcttagattagcccaggtgtctgcacttctaaactggaaactcttgcttgacctctcaaggaagcttgggaatgtggacctggattctgaggaagccccgtggccttgggaagtccatttcagcttcccaaacttcagcttcctcatctgcaaagcgaggccccgctgccttcctgatttgcttcttggggcaattcctttgaattctctagctcatttctgaaacctagaagctgctcccagaatgtcagttcctcctgcttcccaggaggccaccgtcagatttggtgaccagctaaccaggaataattgcagagagccaggtggaggtgctcgctcccctgccactcctgtagcttcgcatagcttgaacatgcgttcatccatcatttcttcagcatgggcccctcctcactgcccctgggccctggtaatgttgcccattcactagggtcttccctggtgaatgacccccttcccttctgcattctttgtcctgttattctacctttttgtttgtctgtttttagagatagggtctcactctgtcacccaggctgcagtgcagtgaatgatcatagctcactgcagccttgtcctcctgagctcaagtgatcctcccacctcagcctccagagtagctgggactacaggtgcgtgccatcatgcccagctaattttttaactttttatagagat

SEQ ID NO: 102988 - DNA, 1030 bp, Homo sapiens
ggccctgacaggaaccaaatgatgctcaccctgtgtgtgtgagctggtgtgtctatgacttccttcagatccaggcctgggattcattcctctgcctccgcacagcctgatagacagtaagtgtccaatatatgttgagtgaagcaaactgataagtggtgaaggaaggaagggaggaagggagggagggagggagggagggaggaagggaggaaggctgttcaagagcagagattctctcgtatgcacatctgtgtccctgacacatagtaggcactcaataaatactcactgcactggaggaatgaaagaatgaatggatgagtgagactctttgcaagcagaaacagcccctatctttgtatccctgtcacgtgacacagtgcctgacatccaggagtttccatcaatgaatgttatgctgaatgaatgaatgaaccactgaagtgaactctatcagtagtggctgtgtcttgtttcatatctatatgcacagtgcttagcagagggctgagtacacagcaagtgctcattaatcatttacagaactgaatgaaagagtgaaagaaaacaatgaatgcgaaaatgaaacttttcatcctcagagagcatgtcttgttcatctctgtctctccacttcctagcttaaggtcttgcacacagcaggtgctcattaaatgttaatctgaatgagcgaatgagtgggtgagtgaaaaagtggttcttgtgggtagggacatgtcttgctcattagtttccccacttcctagaacagggcttggcacacaataggtgctgaataaataaatatgtgttgagctgaacgcaggagtgagtgagtgcataaatgaacttcttgaggagaggaatgtatctcgttcatcttttccctcagatcctaatgcagggccaggcatagagcaggtgcttagcaaatgcttcctgcactgccctgacctttgtaggagcatccatctgtgaatgaattgagaagggaagcccagctgggtggacctcgcccatctccatc

SEQ ID NO: 102989 - DNA, 1059 bp, Homo sapiens
cccaggcagtgtggccaaagataccagcagagctcccctcctctttcccagggtctgattgcccccagaaccaccgggtggcccagggagataagtcaggcaggggaattaggtgggggcctgccgcctgcctttttccattttagagaaggccagggtttgcagccttgtaagaggcctggctcttggaagaggggctgtaattacagattggctttgccatgccaggcagggccacatggcagactctccacagcatggaaaacgctgctttctacttgagctgagggtggggcctgataaagaaaggtgatgagtttctgtctgtttctagaaagatttccttgctagatgatttttattgattgattgattgattgattgctcatcccaaggttaaagacatcttaggtcactaaaatgactatttgaagaagaatgtgataaattaacacaaggaaataatcttgggcttggtttataaataatctgggattgacttgtaaaatcaagtcatttctatttttttttcttttatctgaattcctttccctgttgccttggaaacaagtctcccaagaaggatgtttggagtcctgtgacttgggttcaagcctcagtgattccttcatctcacacagtgggtacgatgagagcctcttcaggatgttgagtgtcaagggtggacaggacacgtccctgccgcccacaggctcgggacctggaggggaagactgatgggtaaaccaaattatggccaggtaaactgtgtgattcggtaggggttacataggcagagtgggaccccagaggtgccccctgcccccatggatataaggaaacgggaggtgtctcagaggcgggagtatctaagctgagctgtggtggactagatgctggccaggtgaggaaggggtggaaaggtgtcttagccagagggaacagcatatgcaaaaggctgaaccagagatgtcatggcacattccaggattaacatctgtccagtttgttcagggtagaaagaagctgggaaacaggtaatatgtgaggttgcagacg

SEQ ID NO: 102990 - DNA, 1046 bp, Homo sapiens
cgccatccagactgatttggtgagggccaggatatatagcttgtcacaggtatgaagttggggggggggggtgccaaactccaccacttaatagctgtgtgaccttgtgttggtcatttcacttctttctgccgtggtttttccatcagtaaaatgtgagtgataaccatattaatagtatcagcctcctttcattgttgggaggagctgatggtgtaatacagtgatgcaatgtaatgcctggcacatagtaagtgctcagttagcagtagtgatggtggtgatggtggtggtggtctttggtcaggttccctagaagcagagactgacatgaggattctggtgcagtgattcattgagggaaagctctcaagcgaaacccataaggaagaaagggcaacaactggggcaggggacaaagctaactacagatgtggtttcagctgagccccagcctcagcccagtcccatggggacccctagagtgtgaattgcatcactgagttggtggtgccttgaggcaaggagacctgagtgttgtgttctgtattggtcagtcattggctgtgggcatctggacatagccttcagtaagggcagttctccagaggagggtagagctctgagcctttcgtaaccagcattcacagcagctgacgtgtgtgtgtgcaccttctagaaaaggggatcttagtcaggggaggtactagctgcatcgatggaaatgatgagtttgatgacttcatctctgaaaaccagagaagtcaagtaacttgttcaccgtcacacagctaataagagctatagctgggtctccaaacccttaatcatgatgctatacttatttagcaaggacggggtgggtctagaataaggcaagtgaggtgctcacatagggcacaaaattgggggacatcaagaaaagtcactgatcactgaataatatttcaattgtttttaaaaaattaaaattaatgcaaaaatttgtgatgagaaaggaatcagaactataaataaaaacaggatgagtattacttatttttttc

SEQ ID NO: 102991 - DNA, 1071 bp, Homo sapiens
cactctggacgtcctgggcctgcgtaatgagggagcagaccatgaagaggacttcatggtgtaggagctcactatgggcaatctgtgtggggaaaatggacaaactttggaggcccactttggatgccagaagtcctgggacctaggaggctgcatgtggtggagggtggagccaggcactcatggaagtgcgacctagccctgtgtatgtttcctgtgtatgtttcctcacctgcatggtggagtaatacttctggatatatcaatgtaaggtatataggctgctgcaagagccccccaccccatctttgccttcaatcttcagttttctcatggaccagttacctacttgcctctgggcacttgtatctctgtgatgtctatgggccaggaatttgggagcagtgtggctgagtgactgtgacttggaatttcttatgacgttgtactcaagatactggccaggtctacggtcagctaagggtttgactagagatggagcatctgcttccatagtggctcactcacatggccagcaactggtgctagctgtttgctgggggcctcagattctctccatgtgggtttctgtgtgtgactgcttgagcatcctcacaacatggcggctggctttccccagtatgacctcagagaagaaggtagaaaccatgatgccttttatgaccaagctttagaagtcctacactatcacttcttttttttttttttagacggagtctcactctgtcacccaggctggagcgcagtggtgtgatctcagctcactgcaacctctgcctctcgggttcaagcgattctcctgcctcagcctcccaagtagctggtattacaggtgcctgccactgtgcccggctaatttttgtagttttagtagagacggggtttcaccatgttggccaggctggtcttgaactcttgaccttgtgatccacccgcctcggcctcccaaagtgctgggattacagacatgagccgccgcacctggcccatcacttcttctttactcagacgtgagccaccgcgcccggcccatcacttctttattctgct

SEQ ID NO: 102992 - DNA, 1062 bp, Homo sapiens
tagttgttagaagggagtgaggtggacacatgggcctggcatagagccagcagccccatcctcttcttcccggcctcttttgcatccacttggcttccctgccccccttgcaagattcttcccatcccatcctgccccaccccacccctaagttgctacttgatgatcaaagcatatttgtgtgtcattaacagccacggctaattaggaaggaagggttaagtaggaggcattcctatacacgcctgggagctgaacagttagagatttttcatatgctatgttggattttcttttcctcttctcatgcataaatacaagtccttttgtgggggagatgaaaaaagaatggaggtcattagagatctgcttagtgagtttcctaatcttttcatgggatgcggagccccgtggattttcaacaacttagtgccattggttgaaaaatggtttctgagctgaattgtggtgaagcggctgctgtggttcagtggtgtctgattgctgggatgggggtggaggaggagacaacaggggtacagatgggcctgagttcaaatcctggcaccacacttctgacatctaggaccttggccaagggcctcaacctctttgagttgtgatatccttgcatttacagagggctaaagatatgaagattgaactcaaacttgggtgggcatcagatatatcttgggtcctggtgccacgaggagagtaccaggcaggtgccttgggggtctgaggaaggacccagaatctgctttgtgtggcaagagctctaggtgagccccaggtagagatggttacgtggacaccgccctttaaggaccaatcccttaatgtttcttcatgttcataaaaataagtaaataaatacatatctgatggatgaatacatgaatgcatggaccagtgcatgaacggatgccaagctcctagctggcttcacaccaggtgttgggtggatgatgagggcccagcagagctgtgctatcttgccaggaacatgatttggagaggctcaagattataattctgaatttcctgttcaacagcaac

SEQ ID NO: 102993 - DNA, 1078 bp, Homo sapiens
atgcattttattatgtaaccagctccattttactgtgactttaaaaattaccatataggtgttggtgctcaatgcatggggtggcagcttggataaaaacccacagcatatattgtatattaaaaaatagcaagaagagagacttttgaaggttctcaccacaaagaagtgataatgtgtgaagtgatggatacactaactaccctgattagatcattatacaacatagatatgtgtcaaaacatcaaactgtacaccataaatatgtacaattgcaatgtgtcaattaaaaaataaagtaattttaaaaatatgtagcatggtgtttggtggtagatgtgctttctaggcagcttttgctcttcttataaacttttattgtttcactctaggactgtcctttcattgtatgtatgacctatgccttccataccccagataaactctgcttcatcctggatctgatgaacggtaagcaaaacttggaaaatctgaatgccttgaaagactttgccatgatgttaaatcttagcatgcattaatctaggcagactggcaatgtgggtctttcaggtaattaggttccccctgaagtttgaggaaaccttttaccctttaatcttcactgaaaattcatttttcaatgttgactgcaacgtccttctgggcctcccagtctcttcccaagaaaagattctagaaaagattatcatgaaatacttacagtgaaacttgattttctggaatgcagctggcctagatctttaattagcttatttcctggccctcaacttttaggaatgaaatacctcataagaatataggccaaagatagaaatgtatttaaaaaccaactttgaaggactgactttgggccaagtacagattttagcccaatcttctgcaccttctaaatctgcactactgtacattgatcttttaaactgtggatgatgactttgaaaatgctggaaaacgttcagctagaaaaggagctttctgatactagaaggtgtcatggtatatatctaaagtatttttagtaacaagaactgaaataaagcatacaattcacaac

SEQ ID NO: 102994 - DNA, 1026 bp, Homo sapiens
tgagggcaggagttggagaccagcctggccaacatggcgaaaccccttctctactaaaaatacaaaaattacctgggtgtggtggtgcatgcctgtaatccctgctactccggtggctgaggcatgagaattggttgaacctaggaggtggaggttgcagtgagccaagatcgtgccactgcactccagcctgggtgacaaagtgactctgtctcaaaggaaaaaaaaaaaaaaaaaaagagataggatctcctcccatgcagatctcacccacacaatccactacacaatttagctatggttcctgcctctgtattactgatttgtttttttgcttctagatcttgtttctgaaggacactatctacttcctattgttaagcatcactttcttcttggtgcttccagtgtggggtccagaagctaaccacacacttagtaggtgttccaatatttactaattgccgagtgaacccatgaaacattcacacatgcaaaagtgagagcttactcttaaaaatggggtggtggtggtggctgtgaatatcaatcaaaagggtttcctgagcacatctgcccttcagggctttgcatttttagaacatagaacaatagcacctcttagaaccttcagaccatagaaatatagaacacagaacgtaggacagaacccagtggctcttggcctggagttcctccagttttctcccatggggtgatttcagcagacagaacaagtgaagtgccataatttctctgatatttagattattttctatctctctataacatatatgaataccctaggatggtgttgtcaaacatggtagccaccagcctcacagggatatttacatttaattgaagtggaataaaatttaaaattcagatcctcggtcacaccagccacacatcaggtgatcaatagctatgtgtggctagtggctaccatattggacagcaggcatgatctcaaacaagcataatccttttgtgcataatccaaatgctttgtgttcccatctt

SEQ ID NO: 102995 - DNA, 1037 bp, Homo sapiens
acacaactgcttttcgtttggctaaaagatggcattacaacttttcctttttgcaggagaaaatttgctttctgtaaacatttgcagccccaaactcttggcttgcagttcttggtttaaaaggaaagatccagaccctaccaccagccctgtttgtttttatttgggataaggctggcttgaataagtaaaaaggtctaaattacacagtattgtctttaaaaaaacagttgcgttactttcaaagaagggcaattactctactacagacaggaagccaaagatgggtcatgtgagggctgcttaaatgatgagataagactcgtttgtaattagttcattaattatggatatgtgaataaatggtacttagctttaaaaaacagctcgttcccaaagtggggtaagcatctgatgctaatcttatttcaatagtacatttatttactggtctcggcattcttagaaatggagctcaggataattttaatccatcctggaaatacttaatgaaagggcctctcatgaatatggttttatgtcttcctaggacataaggagtctttttagttttatcagtattaggaagattagtggaaaagattttgaaactgaatgcacagaaatattaaatgcaaacacattaaccatggaccaaaggcctgagcaagtgaaaacaggtgaagtctgaatgtagacacaggatttatccttaggacccaaatccctctcagacaggtatttataggaaggaaggctgtttcctgtctagaactcgaggtcttggatggtaggtctatggaccttttagaaaatttgaggttcacctaagctgcaagtttgtagaaaactatttggatacatcgttgatggttcagaacattcttttaaaatctgtggttctctgattaagctaaggttttgttacgcaaatttaccattgaaatatatatacaggaaagtggatcttgaggaaattttcaaaaaattgatcatacctaattaatttgtaattactaacaaaatcaagactggac

SEQ ID NO: 102996 - DNA, 1084 bp, Homo sapiens
actccgaggacctagtactatggaaaattacttctgtttttcagcaaactgagggtcagagaaactccaccatggaacagtgccttggtttttatttatcctgacattgacattttggaagagaacagacccattactttatagaatgaccctcaatttgggcatatagacttttgattcttacaaaatgtcagcatgcagcccatattggcctatcacttgcctttctcctttttgggtgtctttgctatgattgaaacaaggcctagaattcccccaagtcaggctgtcttcactggttccctctaccccagtgtctagtaccaagcaagggtgcccctctaccccacttctgggatccctaaccagatgcctgcctccctctccaccccacttctgccacaatgcttccacggcaccaggctggtacccttgctatagtaacgagcctgctctagtcttagtatttgtttatgcatctctctttcccactaggccatgggaaattcagaatctgattcactgattcaaccccaagaagcaaatatttaataaatgtctactttgtgggctctgctgtaggtgctggaacaaaaactaatagtgccagccctcaagaaatgtatactccctgtgatctttcattcatttactggcccaaaacattcattcatttattcaataaatattcattaatattttgtgtgctgggctgcataccccaaagcatgcggatcattcaatgtttgcataatggggtagaaacaatggtctactcctacaataaaagaaaaaaaagtttaggcttattaatctctgatagaggccagctgtggtggctcacgcctgtaatcccagcactttgggaggctaagaaggcaggtggatcacctgaggtcaggagttcgagaccagcctggacaacctggtgaaacctcatttctactaaaaatacaaaaattagccaggcatgaaggcatatggctgtagtcccagctacttgggaggctgaatcaggagaattgcttgaacccaggtggcagaggctgcagggagctgagatcgctccactgcactccagcct

SEQ ID NO: 102997 - DNA, 1049 bp, Homo sapiens
aagaaatagctaaaggctgctttccaggacccaaagccccatttaatgcaagaaccagagaagtgttctaggccattagtggacaatgtcatgtttggagaaagataacaacacaaataatgtaacctttccttaaaaggcagaactcaatccattttatttgatgcttattctaaccctaaccctgggtcacctggaatgaagaactctatgaataatatttgattttacaacgtgttatggttatgtgaaaactaaacatttgccttttataaagactgacaaaatataaatctttattctaaccctatccccaaaactagccaggccacaccccagatgttcttattgactattggaaagatagaaaaggcgttgtgttttttgtttttttgttgttgttgtcattgttgtttttttcagaagaccagtgtctcagttctgtcttagtagtaccacacccgtaaccgtgttttaaaagtttgttttagcctagagacagatcatacgagttcaacaatgtacagtgtgattgaaaagacaggttggtgtctatttttctttttaaaatatctgaatgtgtatttgtaatacgtaaaggtaaaaaaaaatagtgccaaaaatgtgcaaggcatctcattacagctcatgtacgtctgtttttataagatcaatattaaaacccattgggattaaatatttttgaataggatacactcttgagaaactcgagaatggactgagccttcctacaagccactctttgtttttaaaacagtggggaaatacgtttacagagattgtgagcttcagagaatgcatgtgatggtgtgtattacatgctaattcatataagctgtatctgtcagctaccaccctgtgctttaaaaatgcacacactcaaccctctttagcttggagctcagctttttgcttttttttttttttttttgtagaattatttagctaacataagtattctgattgctacctgatggccattcttacttagtttcatagatgtgctttaactatgatcctttgaagct

SEQ ID NO: 102998 - DNA, 1013 bp, Homo sapiens
cttttccaggtgtaaaatttatgctgattttttttttccatcccaggtttggttttcctaaacaaatcctttcacagggaccgacggcacttgataatgtgacaaaaaccagcctcttccaccccactgcagtgacttttgccggaaagtggagcagtgggcacggccaaccttgtcgttcatcaatgccgcccctggcagtatctgaggatcggtggcagccatgcctccccctgccccagccgctccttcccccccacgctaatctgcatggtgtgggcgcccttgggacccccgaggactgattgtctgaccttgcttcacacgcccagtaaggactcccccaagatgtcgctcgagtggctggtggcctggagctggtcgctggatggcctgagggactgcatcgccaccggcatccagtccgtgcgggactgcgacaccaccgctgtcatcactgtggcctgcctcctggtcctcttcgtgtggtactgttatcacgtgggcagggagcagccccggccctacgtctccgtcaactccctcatgcaggctgccgatgccaacgggctgcagaatggctacgtgtactgccagtcccctgagtgcgtgcgctgcacccacaacgagggcctcaaccagaagctgtaccacaacctgcaggagtacgccaagcgctactcctggtccggcatgggccgcatccacaagggcatccgcgagcagggccggtacctcaacagccggccctccatccagaagcccgaggtcttcttcctgcccgacctgcccaccacgccctatttctcccgggacgcacagaaacatgatgtggaagtgctggaacggaacttccagaccatcctgtgtgagtttgagaccctctacaaagctttctcaaactgcagcctcccgcaaggatggaaaatgaacagcacccccagcggggagtggttcaccttttacttggtcaatcagggggtttgtgttcccaggaactgtaggaagtgccc

SEQ ID NO: 102999 - DNA, 2606 bp, Homo sapiens
tgaggcaggagaatcgcttgaacccaggtggcagaggttccagtgagccaggatcgcgccactgcactccagcctgggcgacagagtgagactctgtctcaaacaaaacaaacaaaaaaattagccgggtgaggtggtgggtgcctgtaagctactccagtgcctcccagctactccggaggctgaggtaggagtatcatttgaacctgggaggtggaggttgcggtgagccgagatcacaccactgcattccagcctgggcaacagagagagactccatttcaaaaaaaaaaaaaaaaaaagggaaaagaaaaaaagatgcaaaaggaggtaaagaagctcccttgggcctgttttataaggatgctgctcccattaggaccccaccttcatgatctgatcactttccaaaggccccacctcctaacaccatcaccttggggtcaggtttcaacatgggaatttgcagggacacaagcccacaagccttcagaccatagcacgggctccagaggtgtgaggcaggtcaggtgctttagaagtcaaaaactctcagtaaggcaaatcaccccctatctcctggccttccctgaatcttgcctgccttcactctcctttctctggttttcctacaaggtctgaaaactccaaatggctgtgagctggtggtggggggagagccccagtgctgggcagaagggcgctgccttctctttgatgactctttcctgcatgctgcgttccatgaaggtgagtggctgcctttcccacttcctttttttcaatgaatagacttttatttttttagagaagttttaggtttccagaaaaatcaggcagaaagtaccaaggaggccccttcatatcaccccataacacatatacacacacagtattgatgcgttattattacctaaagttcatggttgacattaaggttcactcttggtgttgtccatccattctgtgggtttcgccaaatggataatgacacggacctaccatgacagtatcatacagaatagtttcactgccgtaaaaattcccacttaaagatccctccatctccccatttccttttgtccaccctgctcagaagcccatgaagccaggtttatgctctcagtgagagaggaggtggtccgatccgagccgagggacaggatggggtccctgccccgaagctgagcacgtagggtccagccctgcctggatcctgggtcctgactccagggtggtttgaacctgtcctctcacccctccttcccccccaggttcagcagaggatggcccacgggtggttttcatggtggatttgtggcatccaaacgtcgcagcggccgaacggcaggctcttgatttcatctttgctccgggacgatgagagtatttcccatgctggagtcggcgagaagggccgaggcggggcctgggcagactgtggtccggtccagtccctaccggtgttgtttccatgctcagaaacctgcctcagcggaaagctcttatttgggattttatatcatgtcgggtccctctttcccttggttattgtaaatggaaacttttcggcttgtatttccttagattttttttttttccttccaatcatttgcttcagagactcctttctggcctaacagcgcattcctttgattggtccttgagtgaccagagacttagtgcccttgtaagtctgtcttctgttgctacttgtttttttcagtgctctgaaatagagtaactaaatggttatttgtctgaatataataatgtaaaacttcttgtggtcatcttaaaaaaaaaaaaaaaaaactaaaaactgcaaaccagagagctagagaacttggcctctgatgctggcacactggggacccttcagccacctgacggcagggggacagtctgcagcccccacacctgactggcttcagtagccaggtggaggggctgccagacacagtcagggtggcacacagtgtccaggcccagggatactgtcaccatcgctcacctcattctaaaccttgtcaggtccctgatggcaaaagcattgggccagtaggactggaggctactctttaaacatggctttcctgcaaagctgaagctggtgtcccccagcaccaagctgcggctcacacagatcagccacggaacgtgtgatccgcttacctcactgcctacagaagccctactgccaaactgggcctggaaaattcccagttttaggtgttttgagtccacagtgatgaacgttaaggccaccaggttggctgataggagctgtagggggataggaccgcgctcacccagcgacatttggggaaagcctttctctggcaaaactggaataatagatctgaccaaagtttctgttttgctttggagttctgttgcctatgtttttttttttttcatttatttgtctgtacataaatgttcaaacactagacttggagatagtggaagagttggccctgtgtctttgtcatggcacaaaggtgtgcactgcgtgacaatgacccaagccagtgtgtgctagtgaggagacagagaagacctacatgcccagaggacccgtggccgttgtgctggttttctgg

SEQ ID NO: 103000 - DNA, 1033 bp, Homo sapiens
acaaaaaccagtgcttccagctttccattatgcttgttgcttatcccagcccagattctcacataccttgctctgtaccttagaaagtacatagagagtgcctaatacagaggaaacactcaataaatgttacttattattgttatttagtattattatctttattcgcagttttgtttaggctcaataaataacagctttagttagcacttaagatcagcatccgaagggccgtcacaaggggagaaattagattaattttgtgtgctcctctcccctagaattagggtcaagaggcagtaatgtcccagagtttacctctgaagagaaagttgctgaccatttggctcagcctgaataaaaagcacctgcgattatttttaagctctcagaggatgccagtgagagtgaatgtgcctaggggtttggaaaactcaaggcatttttcatatcccttgacactgtcacgatctcctcaactgcttcagtattccccaggagctccttgcttctcccaacacccaagtgtggtgcaatcaccatcgctctgagtagagattgagccagcattttacacgcatatctgtgtacgcatttaccagttcataaagcattcctgtgtacatcagaactctctaccctctgtgagaaacgtgcagcagcctctgggccgactttcaattctctgtactcctttctgaaccccataatcactgtctctggctgtggcttgtcagtttaaatccagttcattttaattcactgttgactttcttttgctctgggtctgtaaaaccagttgacttgaataaagaaagcccagacacttggttttgtctctttactttccccttaaaactatttataataacaaataccatttgttgagtacctgctatgtgccagacactgggctaagaatgttaacccattttatgcctctaaactcctccgtgttgggaatgatttttatccccattttagagatgaggaaactaaagctcagaaaggctaattctgagcacttaacaac

SEQ ID NO: 103001 - DNA, 1011 bp, Homo sapiens
cagctaatttttaattttttagaaatggggtttcagtgtgtttcccaggctgatctcaaactgctggactcaagtgatcctcctgccttggcctccagaagtgctgagattacaggcatgagtcactgcgcctggcccaagagtcccctcttgaccacccactcaaaagaagccccctggttactcctaatcccacctctttactgtacttttttcacaacagttcccatggtttgctatgtccttgtttatctgtgtttatttttcttgtatgttatctggtgccccctctagaatggtagctccaggggaacaggaatttccattatctggttaacatcatgtcaaccagacacaatgcttagaataatgcctagaagaagaggagcttaagcaatgtttgttggatggagggatgggtgggtggcgaggtggatgggtggatgactggatgtgttgggaatgactaaattttattttttggccattttcataatagtgatatttctttttctcttccttaggtcttgaaaggggactataaaacaccagccaatctgaaaggatattttcaggttagaaaccccaaggggaattccgaattctgtctttctcagctataccaccatctggctgtatgcccttagatgtgtcacttctccactctggttgatggttttcccattataaaaagggggatgtgagctggctgcctgtaatcccagcactttgggaggccaaggcaggcagatcacgaggtcaggagttcaagaccagcctgaccaaaacggtgaaaccccgtctctactaaaaatacaaaaattatccgggcgtagtggcacacacctgtaatcccagctacttgggaggctgaggcaggagaatcgcttgaccctgggaggcagaggtcgcagtgagctgagatcacgccgttgcactgtagcccgagcgacagagcgagactccatctcaaaaaataaaaataaaaaataaagggctgtggggatgcgt

SEQ ID NO: 103002 - DNA, 1050 bp, Homo sapiens
cgcctgtcggtgcggagggtgctgctggcagccggctgcgccctggtcctggtgctggcggttcagctgggacagcaggtgctagagtgccgggcggtgctggcgggcctgcggagcccccggggggccatgcggcctgagcaggaggagctggtgatggtgggcaccaaccacgtggaataccgctatggcaaggccatgccgctcatcttcgtgggtggcgtgcctcgcagtggcaccacgttgatgcgcgccatgctggacgcgcaccccgaggtgcgctgcggcgaggagacccgcatcatcccgcgcgtgctggccatgcgccaggcctggtccaagtctggccgtgagaagctgcggctggatgaggcgggggtgacggatgaggtgctggacgccgccatgcaggccttcatcctggaggtgattgccaagcacggagagccggcccgcgtgctctgcaacaaggacccatttacgctcaagtcctcggtctacctgtcgcgcctgttccccaactccaagttcctgctgatggtgcgggacggccgggcctccgtgcactccatgatcacgcgcaaagtcaccattgcgggctttgacctcagcagctaccgtgactgcctcaccaagtggaacaaggccatcgaggtgatgtacgcccagtgcatggaggtaggcaaggagaagtgcctgcctgtgtactacgagcagctggtgctgcaccccaggcgctcactcaagctcatcctcgacttcctcggcatcgcctggagcgacgctgtcctccaccatgaagacctcattggcaagcccggtggtgtctccctgtccaagtgagtggagcccctgatgcttccactcagactctggccctggagtcagaggcgccaggcaagaaaatcagcactgcctttcttgagctgtgtggccttgggcaagtcactatatctctctgagcctccgtttcattatcccaaaaaatgacaacaattactcctctcctttctgagagaatctgcaaacttcgtgggctgtttgtttgtt

SEQ ID NO: 103003 - DNA, 1009 bp, Homo sapiens
accaagaaatgcagtcaacaccctgcagccggtttattgccatcatggcacaaataataaaagctgagttttttttttctttttttttttttttgagacgtggtcttgctctgttgcccagactgtagtgcagtgatgcaatcacagctcgctgcagcctcgacctcctgggcttcagcaatcctcccatctaagcctcccaagtagccgggactataggcaggtaccatcacctggataactttttattttttgtagagactgggtctccccatattgcccaggctggtctctaactcctgggctcaagtgatcctcctgcctctgcctcccaaagtgctgggatcacaggcgtgagccaccaccccaggcctggctgagatttaaaaagctgacattttaaagtgttgttaccctggttaaaatctcctgtttacagaataggaaaagtctgagaggagtgatatgtatactcaaggagttggccaactccagagctgcattccaaactacccacctcctgaaacaggactgacaggtgggaggtttagcttcagactcagtatgtgagtctgtaaaatgatttttccttgtgggcctcagttgtcccatctgtaaaatgggggaaggtttgaattggactaaaaatcttccctaccctaaatggtaaggacacagcactgggagatatatactccctgccctaaagctataaggatccccttgattccactttggcctggttctggctacatgccaggactcatcgtggacacagcctcgttcctgtaaccatgggagattaagtgttaggaaggtcttacagatctggatggtgaaactctttccatccattccttgggtaagttgctcttcctcttggtgtcatgctttctcatctgtaaaattgggatcatcacactttccttttattggggtttaaatgacacaggtatttgcgtggtcagcatttggtcagtgttaggtggtgacagtaggatgttgtgtt

SEQ ID NO: 103004 - DNA, 1197 bp, Homo sapiens
actccttcggccttcttcctgttctgctctgcgtatcgcccaaaaatcaaaggagaacatcctggcctgtccattggtgatgttgcgaagaaactgggagagatgtggaataacactgccgcagatgacaagcagccttatgaaaagaaggctgcgaagctgaaggaaaaatacgaaaaggatattgctgcatatcgagctaaaggaaagcctgatgcagcaaaaaagggagttgtcaaggctgaaaaaagcaagaaaaagaaggaagaggaggaagatgaggaagatgaagaggatgaggaggaggaagatgaagaagatgaagatgaagaagatgatgaataagttggttctagcgcagttttttttttcttgtctataaagcatttaacccccctgtacacaactcactccttttaaagaaaaaaattgaaatgtaaggctgtgtaagatttgtttttaaactgtacagtgtctttttttgtatagttaacacactaccgaatgtgtctttagatagccctgtcctgatggtattttcaatagccgctaaccttgcctggtacagtatgggggctgtaaattggcatggaaatttaaagcgggttcttgttggtgcacagcacaaattagttatatatggggatgatagttttttcatcttcagttgtctctgatgcagcttatacgaaataattattctgttaactgaataccactctgtaattgcaaaaagaaaaagttgcagctgttttgttgacattctgaatgcttctaagtaaatacaatttttttattagaaaaaaaagatattgcatgtgaagcacttagttccacacctagcaaacagcaggtgctctaggtcttatcatcattattactattattagtatctggaatctagcatctcacggagagtcctttgtaggacatggaatgctatcccagcaggcacaggaaggaaaatttaggcttaggtactagggagccatggcagatgtttgagcagtgggtgagcagcatgactttgaagctgcatagggctggccgccagtccagtacccacctacagggaacatctttgccaaggtccttcctcgcaggctccaaatccctggcagtcctcccagtgctgctgggcaaagccagagcacaactcccacaggctacaccccgtgacatttccagccttgtttg

SEQ ID NO: 103005 - DNA, 1077 bp, Homo sapiens
caggctcctctgagcagtccagggtctatttacagagagcagcaagttcctgggacagaggagacagaagggaatttccaggttcttcaggacgttcacaaccacactgagaagcatctttgcagataagtatttaaacttaccagcccatagcctaccagcctgccctcttctggtctgtgcaggaaagtgtagtatcctagaatgccaaagtgggaggggaaatgggtgatgtagctcattctcttttctacctctatggaagaaagaaagagcctgtccccattttgtggggtcccagaaagggtgattttcacacttcacatttggcgttagggctagtatttcacaaacattaccgtctggaacttttgaaggctgagttaaatgacttcatcttgtgtacttgtagaactgctattagaaggaggctggggactccctgatgatgtgaaccagcccttctcttctcagtttcagcactttgtgatcatatttataaaccttggacagggctccttggccttagagttaagtgaagagttaacactgtgactttagatgcatttttctcagtgtaagtgtctgagctcatctccagttctggactcgtgcccccactcccgggtgctgacagcaagctctgaagatatgctgagagagctccctgactctcctgactcaggtctgccagttgatgaagacagcacagttgttaccaaaaacaaaacctggcagatggtcctaggtcaggattagtggtcattctctggtcttctccagactggtgacacagggtggtcttaaaagagtcctagtccagcctctggctccccgaatttcctctggtgcatggggcatcaggaaagggcaggggagaaggagggggagcagaaaaataactgaggctgggcagaagggtcccttccatttcccatccattgcttcaaacaatgggtgattaccgtgcaccttgagtgaatgtcaaggcaggaagggttccagggccacccagtgtggcaggagcagagctgggatcagaattctggattcctgactctccgttcagctgctatt

SEQ ID NO: 103006 - DNA, 1015 bp, Homo sapiens
tagtaactcacaatgcttcctggggtatttaaattctactctctcatcagcactgagcacctactttgggccctttcccgtgctagccatttgggggaaatataggtgaagagtggctggggtttgaacctttaggatttcacagccatgctggatgggataaaaccagctcacatggagaatcagagaatgggacagtgccacaaaacagtctactgaggcacaagttctgagtgcctgggaagtggtagagagaccccagagagggctgctgcagtctggaacagcttcctagcaagctgtaccaaacagggccttgaaggatgagaaagatctggctgagatgatacccgaccctctagggaaattcttaaagtaacttctaggaaatgtcattgctccttaaaaaaaaaaaaaaaaaaaaaaaagcaggttctaattcaaattccgctgcactactgaagtagtgcaggacttatcagaacctttaaaatgctaatggcaatttcaaatactcagggacagggcataggatgaagtgttccttgacttttatggccgtagaatctttttctcatggaacatcgtttagaactgtgggagatgctaggctggggtttctatgggaaaagtacagcagtgatagaagatggcataattagggtacacttaggtgctttgtagcattggctgaaaaggaagcagaccgggtgggcgtgggggagtctcaacttggttccaggagccaggccagcttgatgcgttttttttttttctaatggtgggagggcaggccaatagttggagaaactagaggcctgacagtcggtgatggaagagatgtctactaagcacggttgtcagatcttttgcggagagatgcgggtgtgcgtgtgtctgtcagagtgtaacaggatccagccctctgggaaggggctgaccagaaccaggcagggggtttctgtctaggacaagtagggtccattttcaggggagctgaaatatttgcaggggg

SEQ ID NO: 103007 - DNA, 1120 bp, Homo sapiens
ccgtcccattcccggaagctagagggcgttagttgtcgggttgaaaaggggtgtggggaggggaagcagctttaccccgggctcggagtttgcaggagagagaagtggggagcaagaagtgaacctcaggggctcacagggttcccgcagatgctcaggccggccaggaatgcatctctggctctctgttcccacggacgtcactgcctcagccagcctcccccagagcccgccagccgctaagccggggccacacctgggggtgatttcatgcctcacctccagtaggcaccttggtttctttgggctaatctctggctcccttgcgctaactcttgctctcacccagctaatccctgcctcaccctgactgccccaggggctgaccactaacaaccaacctggccctgtctgggggttccaggctcctggcctggccctgaccggttcttaattaacctttccttcaccttgactaactcctgccttcctggtctgttcctttcagcagaaactaatggtttgtggatttttttctgactaacaacaggtctaacattcctcgttactgttaacagcttggatgtcggcatggctgggaaggggctaacacagctttgaacttggctaacacaggtttgaacttggctaacacaggtttgaacttgactaacacagggaaaagcatagctaacaattttgggcgtggtggctgctctgagtcagaacaatcagaagtcggtaaagatggtagttttctaaaggaggtgccagggctctggtgtggaccaggcctgatggagcagtggtacccaccaaggtggggtcagaagtatagccagtcttgcaaggttttggccattgggcatatcttcactcctcatagtctgcatttggtttcagttcttaaaaaaatatagccttatagctacagtagtttgcacaagtagatgcagctcttataaaccttaaaatacctgtctggtgtctacagagcatatgccattttgtatagagtcacccttccccaggccagggcctagagtcttcattttggggactttgtgttttggaagttctaggacataaagctttagatcagagtattcagaagggttat

SEQ ID NO: 103008 - DNA, 1012 bp, Homo sapiens
tatacattcattatctatcctatattttttacttatgaattaatccatttatccatccatgcactcagctattcatccatccatccactctccatctatccacccatctatacatttatccatcactgatccattcacccaccatccacccatctttccattcatccacccattctttcatgcatccatctatccatccaccaacccatccatctacccatctatccacatatccatcatccatccattcacccattcatccaccatccatttgtcatccatctatctatccatccatccatgcatccatccatccatccactcatccatttatccactcatctatccacttatccatcatccattcattcacccatttatccacctatccttccatccacccatctatccacttatccatcatccattcacccatcctgcattcatccattatccattgatatacttttcatttaatccgaacaccctaatgcctttatgttaattaatgaatttattcacttaaccatgtgtctatttattaagtattttaatttattaatttactaagctttcagttctattcagacccccgagtatttacaagtgctactactttgtgccaagtgctatgttaggctctggaattaagaggtgaaggagacagacctggttcctacctgtgtgcggttcaccccactgatttctggaattcaggtgaggagctgttcatgggagatcctgaagtcagcacaaaatttctgctctctagggactcatgatgtgacagagctggatcgtgacacctggtgctggttctaccactggaatccttaacttctggatgggcctcagttttcttttctgggaaatggggacaatgttgggaaaatcttcttcttcttcttcttttttttttttttttttttaacagagtctcactctatcgccaggctggagtggtgcagtggcaagatctcggctcactacagtctccacctccagggttcaa

SEQ ID NO: 103009 - DNA, 1225 bp, Homo sapiens
tctctactaaaaatacaaaaattagctgggtgtggtggcgcatgcctgtaatcccagctacttgggaggctgaggcaggagaatcacttgaacctgcgaggcagaagttgcagtgagccgagatcacgccactgtactctagcttgggcaacagaggaagactctgtcacacacacacacacacacacacacacacatacacacacacacacacacacacacacacaaagaatttcaagacggtaacagcaaaacataaacccagcttggagcctttctgagcgccgggctctgtgcaactgcagagatctcatggccgtaaagttggccctgattcatgcccattctgcagaggagaaagctgaagctcagagaagtgaaatatcctggtattctcactccaattccagaaccccctatattctgcacccccttccaatgcttgctcatgtctaatttttattcaccaatctccagagaagggttcgaagcaattgatggtaaaatgcaggagctgttaacacaggtgcagtggaaggcacaccatgaccctgagggaggacgccggcctgggagctgtgtgaccttggatgggccgtgcaaactctctgtgcccacagtccctctgcagagactggttcagaactcctgtttccccagcccccaagccttgcctcccttcctgacccatattccccttggtgtctgaggcttgaagcggttataaaaaataaaaccacagtcccctgatgtgctttctggcttctcaggccttattttttttggccgctaaggagactaataaatggcttgccacttgacgtaatcattaagggctccactgagctgtgggcagtgttttctctcctccttggccgggcctggggcgcacagccaccgagggtggcagtgatggatggtgtcatcatggggcttgcccgggggaagtgctggtggtggttggccatggctctctctcctgcaggctcctgggctattcattatgcgaaggaggagctgaagcgtgggggtgacggctggcttccagaaggagcatggactggaattccaggcggagtgtgggccagggtgtatataaagattagtgttcgggtgcaaagagtcaattgatgagtggccaataaacagagggaaggaaagcagggtataatccaataatatgcattaaaacattttctgaagttagaaaattggtaaaaacttt

SEQ ID NO: 103010 - DNA, 1035 bp, Homo sapiens
catctgcaatcatacatttctactaaatattaataaaggacaaggatgttttaaggggctgaaagctggcagtgttgaacttgtcatggttttctaccactgggttttctggctgttttgattttaaatagccattgctttctaatatgcaaaatatatttatatattcatatatatatatatatatatatatatatatatatgcaatttttatagattgaagggctttcctcaagtatagctttctttaatataaattcatttagatttcttgtgaggccccttcagaccggaaataaggaactattgaaatgtacttctagtttattgaggtttctaggaaaggagtgagagttagttaatctaatttctctttctagcaaggaaattctatgattcctgatatgattttgtttgcctgacagaggtatttaaatttccacaaagaatcttaataggttttgaaaatgcggctactcttgccaagaagttacttgataccctgtgctgatataaaatatacatttttaataaatagtccggcaggaccaggtgaaattagaggaggaaaattcttcccactgtggaagggccaacttgagtgggtcactgggatttcacaggatctcctaaactcactttatgctggaaaatgtagcagaatcacttgtgacccgtttctctccacctgaatgacaatgacgtcggattgtgttctttgcccagggagtgatcagctttgccgaaagcatttaggagagataaacactcttggtaaggaatactgtatttacctctgtttggttatttttagagattaaaaggctgtagctttatataataggatcaaatgtctggggagtgtgtgggagcaagcaggcctcccaagcacaccgcaacataaaaacaccaaatcctctcatgccagagcggtcctctgtttgtcggagggggtggggggctgcaaccagtggtttcaccttctgtccttttctcactacccgctgcttgttccacccagttctctggtctgga

SEQ ID NO: 103011 - DNA, 1050 bp, Homo sapiens
gtgcacaggctgcgcttgcagcccccctgcgtgcaactccgagtggccgcgcgcgtggaagccgtagggctccatgttcatgcccaagatcgggggttcgcccagcgcgctcatagcaggatccacagggccagggggccccccagtgtggaaagccggggccttaaagtgggtgttcatgctcagtccggtctcgttaaagttcctctcgccctggccagcgttcctgctgttgacctggggctcgaattggtccagcccaaacatacttggcggggggcagagggggatcaatagggcatgacagccggctctccgcggcgcgcctccggccagctactcgttccagcccaggattgggcgctccgggacgctcagcaccgcgggggctcagcgcgcacctccaccccgcctgatgtgagggacggggggcggggtattagctcctctcctgaagctccgattctgcccggggagggcctctcacatcttgcgaggccgcggggcctctaggagccgtgttggggggcccatgccccgggcggttgtcacagccgcgggtgggtctgcggggaggggacgaagccgcggatgaacggagacaaaaagttaagtggggggaatggggagggaagggggttgggagagcagagcgatcaccttctcaagtccgattgggtctgctggggagccctcaggacgccgcccgcagcctcccggagtccgtggcagagctgctaagggcaggggagggagacccttcaaagccgcggctggcgccgggcaccgacagagcggtccctccccccgccccccggagtccccgcgccccgcagcccgagcctccaccgagcacgatccgctcgcacaatccccgtaggctccgggcgagcggctgctgcttcttcagcgggtcggaggactggaggctccgctcggcatcgccggtgccggcccccgagccgaggacgcagaggggctgcgaggcggcaggcgccgggggctggagccgagggtcggggaaaggcgcggctcctctgctcggcagcg

SEQ ID NO: 103012 - DNA, 2482 bp, Homo sapiens
accatttttgtggtcttatttctctaacacattatatgcccatataacaaattttcccagagatgcaaaaaaaaaaaaatcaaaatctccctcacaaattgaaaccagtgtgagtaaacaaaaatcaacagtgtgctgtcatcatttgtttatactgaactataatgtttattataaagagaacgagatgtagcactcccctccctccactgtggttctttgctgccccacatgagctacctgctctttaatttttgaacattgggatgaatgaaatgttcagttgtgagaaaagctagttgtgccaaataagaatgaagtaactcttccaagattccccccaaacacttttaaattccatgttcattaaaaaaaaaaaaatttaagttattgttacttttgttaaactctcctaagtttttgtgatttatttctgcctcgactttattttcccctctgatgagacaatatattgtggcattagtagtaagaccaaaatctttttgaacagatgaaaattgtaagatgcagtagttggggtacattttctgccaaaagttttgatgcatttggagagtgtgtgtgacgagctgctaacatttcctgtctctgtattttaacacattttgcactgtctttcacttttcttacagttacgtaatcaaggtcaagtgaggggaacaagcgcagccagtgatgagtgaagaagaatctgaccagtatcttgcagtgttgacgtttcccagatgtgtgcttgtgatgatacacacacatgcacaggttctcaaccacgtgtgtatatatgtatgtgtgcatatgtctgtagctgtatataaagcgcatgtagagctacagatccagatacacacacttgtgtatatatgtacatacagacatactgaagggattagtacaatttctccaaagtactgtacctatcttcagcaagaatgcaaaagaaaatattttcaatatatatacctggaacagattttaataattatcagagtaataccattaatggacaaattgactgcaatgtaatactagctggtatgtttcataaatgtcaagctgtggaccaacatatatagccttttattatttttctcttcttttaagtcagtctgttataaatttttttttagtcccataagcagtagactcccacagaaaatttcttcaaaattttttggtgttccaatgaatctgggatgtaaactctgaatgtatttataactatttatttctggatggtcattatcttgtagccaaatttgacaatataaagtaaggagcaaagttacaggccagtttttacttgtttgccctgagggaaaaatccttttaaaaaaaatttctggtttttattggatttttgtattttaaatttcaaatatttttctacatcaaacctagcaaaaatggagatgacggtttctgatttataataaatactagacagttttcaggctcctgttagacaaacacattgatgaagaaattagtcttaataggattgtaggctgtgtagaaaagttggaaatatagcacttcatggagtcttgttttgaagatgacagttttctgtaactacagcttggaaactatgcaaatggtctagattcctcagagctcacatgataggatatagttagtgatgacattttgctcttcttgtgggaacacacacttcaaggaggagatagtgactttgagataggaacagtttaagatgcagtgtgagtctggcctgcgtgcggtgaggaggccccgccaagagactggtggacatctgactgtgggatgtgctctcaagtaggacgtcatcaggacagattctgaataggcatcatgagagtgctggtcagaaacggctgccactttttttaatttaattttattttttatttaaaggaaggaacaatagctaggtaagatttttatcagctttctctgtctgaatccagtttttcctctgtcagtcctggaagcttgaatagaattatattgttgaagccttcaggtcacaaactgtcttttgtaacctcctgtccctcctaaaacacgccaacccctgcagtcaaatcacattagtaatctgatttgctgacagtcctgccctgcctgctcctcgttttcccacatgtcctgcatccctcccccactggagtgatttcagtgaatcagacaaggaaggatgtgtaggatcactactgcattgcaataccctgttatcctcagcaacaaaacccacatttcatacatcctttgtgtactcaggataaagactgatgtttactctctgggcactgttgtaagataggttttgtcagagcataatcattgtctgcaaagtgtttggtgcgaggaagattattgctaattttgtgaaataaagagtctagccctctccttttaatgaacttaactctcgctggcatctgtagtatcattgggagcttaggcgcacatggaaatg

SEQ ID NO: 103013 - DNA, 1049 bp, Homo sapiens
aatgcctacccagaaagcacctgcctcctgaagaggcatcccattttagagtcctcttcacacgcagaaatttctttttccttgaggtcctgacccctgacacctgatgatagattttaatgacattataatgctcttaattcacaaatattttaagaattggatttctttcaaatgggttttggccctggagagaactagcatcttgagaggttaggcacacgaggaatgcccctgcctatgatctgcagggaactgccctggagttgaggctcagcagctgaaggaggactttaggtaaacattttacctgtttgttcttaactggcacctccggttccggggtgggggtgaggatgtgttgagttttaacgtatttattgcatttgtttgttttctgttcatttcgttttttgttttctcattgagtggtgtcacttgtctggaggctattgttatgaatgcctgtcctttctaatacatctgtgtgcccttcatggtttgccatacattgtttctgtgcttgccttttctccctttcattctccctccttgccttttctccctttcattctccctcctttcagtaaacttcctttaaaggactccactgagagaccctgttctcagaagcagcaaagaggtgtggcccacaccctcatggcttgcttgtctggcctagggactatgcaaatatggaccagacccttggggtattttctcacattatattggcaaacaatttgtttacccattggctgtttttgataattttttatcagtctgcaggcttttgttttttacagttaaggatagataaaccttttttgtgctaagaaaagccttttgcaagaatgtcttcaaaccaaggttatttgaggggccacagaacttcattcttaatgtggatatggttatgaacatcacttcataatctcttctagatcttttttctccccttgcttactaacccctatttagagtctgatttcagcagctcacaattttattttacgtttagatgcgtaagaggggttccgttcgaggca

SEQ ID NO: 103014 - DNA, 1071 bp, Homo sapiens
ttgaccccaatttctcatactaatattaggactctgagttctggatatagggaatagggtgatgagatggcaagagtggaagatacccccctcattccttatttttagtctagccacaggcaaaacacttaaataggcaagagcagatcatgggcacttcctacctttctttctaggcctctctcccacttctgtgttccctttttcaagagtcaggtgcctttctctgactctaacaagcacccccctggccctcgctaccctatccagttttagtcccatttgccttgtctggtttcactccctccaagtgcccaaggcttcaggaatacctgccagctctgcctttggctcttccaagcagctggtgggtgtccactgaacatgaaacagaagcagcaagagacacccaaacacgctaagcccatgatgcagcactggcatttcctacaaggatttaccaacagctcaaacccttgggaaagagcccttctctcagtttttaatttttatgctgaagaactgtgtgtcacatggggaagagtagttaccattgaccaggtgataagccctatctggtttggactctaaaccctacctatctctggaccccttggacagaacttgactgagatttcttcccccagggaagtgctcttgcttctctaacaagtcctcagcctcacgatacctgaacacagaatggtcccagcctcaacacgctgtgaccctccgctgtggagctggtgactcttgctctcacctatggcagtgggcctgcaggtgcagctgctgctccatgcagatcagttatttgtgagttgggaattgcactcgagaagaaggtgtaagatagacaagtaaaagcccaattccttagtgtcaccattcttatacccacattgctgaaactgattaaccccctcataaagctggtggaaaatctatcattggttcagagtgagggtacatagcagttgctttgtcaaatatctcaaaaacattttaagacaaatttcaccattaagtggtgcatcttaacgttgaatcccatttaagttattttgctgt

SEQ ID NO: 103015 - DNA, 1341 bp, Homo sapiens
catgttgtgtagaaaaattaagggagagtttgtaatgattcttaatttaataaaagaacccaggactcttttctttcaatgcattattgtattccacctcatagtgaatgttaagaatgacaatatatagttttatagcagaagaaatctagttgacctttgctcattgacatttagaaaaaggtaaaaataaatcaggcccagcaggaatgtgttggattaggtcatacacaccgcatttttttagtttctactagatcatgacacctttgcctaggagattatttttcatttcacagggaaagtttttttttgtttgtttaattttgctggacacaatgataattaaatggaattatgatttccacaaatctacagagtagtctttttgaaccaaatgtgtaaatttcatgggttaattggaacatgtaaagttaatgtgtcattaatcttaggtttttgtcatcttatgctacttttttgttgttgttttaaaagcaagaaaaacggatatttacaaacttccatcgccagcttttttgttggattgacaagtggatcgatctcacgatggaagacattaggagaatggaagacgagactcagaaagaactagaaacagtaagactggctgttctatggcaattctctaattttcccttttctaaaactgtatacatgcttggtaaatacagagttagaattaggaagagtgttgttaaaaatcattccctattctacttattctcatcaaaatggagtttcttagacactgctattccttcacatattctgatctctcttttgttgagcatcttgcgtgaaggtagactagagttttctcagtctagaattggttacctgttaaatatctaatggttctgtattctttcttacacactagctttagttctgtaggctggttcctggttcacagtcgttttagacactttgtcagactaagttgcttttggctcagtttgtatcacagcaagcttaacaaatgttaacatgataagtcctagttcgctttttttgtagaaaaggtaaggctaatggtattgttactaattctggaaatgcctcctctgcttcccccaactggcagtgatccttatttcttcctaagctttgggcagattcaggtgatccttgggcaggaggtcagcatgccacagttcagtgttacagcccatcccagctgctccccaccaccagtgggcagggccggcagccagtgggtgtcttctctctcctcgggatggattcttccctggcttcctcttgcatgtgtctggttttgtttttgccctgggccatgcttgtcttcagttggcagta

SEQ ID NO: 103016 - DNA, 1038 bp, Homo sapiens
taaacagtgcagctccacttgccaatatctgaagatacagaagaaggctgaacttccttgtcattttttattgtgcctcaccacatccacagtgggagtgcggtaatggtgttatgagaacccttatgtattaaagacactattggtttgatgtgaatagaatttggtatttaatatgaaatctgaatagtgttatttgaggcagagcaacatacctattaaactttagagctaggaagtaacttggtctgtggaaggagggtttacagcaggggaatactgcggcttttgctaaaatgatttcaaattttcaaatatctgaattaaacacatgagattgtaattttcttcatgtatgtctatgatgtcgttatacaacagtcaattttaatgaaaacataaatatttaagtcataatttctccttttcaatttttctcatctagaaggagctggcaaacagccctgactgtccccagatgtgtgcctataagctggtgaccatcaaattcaagtggtggggactgcaaagcaaagtagaaaacttcattcaaaaggtaaaatctgctcaaaatgtggtgacttagatttaggatgagatcggagctagctattaatgggatatcttctctgttattactttttttcctcctttatgatatgaaaattattgtccctacataattcatttcagcccttctttatacctcaaagcagcaaagacagatggcagcagaggttttaagggactttctttggagacaagcacagcagctttttgttcaaagtgcttaccttatggtttgcccagcgcttctgtagagaaccctttccccatacagcacgtccccaagaggacctggtgttctgatcctgactggagggagagagcgggcccagcctgctgaaggactcccctgccccatctcagctggacccttccccctaccctccatatctctcagaatatgtatgtgtgccttgtgctgtcacaggggatgtcttctttagaggtctttactgaaaaatgggcacactg

SEQ ID NO: 103017 - DNA, 1079 bp, Homo sapiens
tcaactttcttctggtaatgtttatgtttttaggcagcaggctgtttagttgtttgttttttagttgggtacgtgttcttctctgaagggtttttaaaaaaataattacttgtaaattggatggaaaacaaaaatcagattgggactgaatatacattttagatctggaaagatatcttagggaactggttcctttttgtcccgtggcttatagtttctaaaatgaattttatagaacaatgccactttatgaattaccagtattaattgatttgagttgcttgccagagtcactagaaagaatgtgagaaataaacttggttgattgttgaagtcacgtatgtgtactctgttcttggagctcaagtttagtgtaggcatatttgtattacatttagcttactcctttaattagaaccatgcttcatcccactgtttttataaaattgctggagaattctgaagcatcagtgttctaggtacacccaagattttcatttagtagaaagtgtccaatgatttgaagttgtaaaagaaagctttcaggagctcataattaataggaccttctaatgttcaatctggaaagtatcttagagttcatcagcagtttggtggggtactcagtcatagaggaaattcactatgggtgggtgacaggcaggggaatatttcctgaagcccaggcatattacagaataaaacacaaaattgtaggaagttttaggacaagtcattggatgtcaaggatatgtaatgtttaccacctacagccctagaccaatcctggccctcaaggaccttagttcgctcacccctgcttttagtttttcctcagtggagaatgaaaagtcctgatagagtctagttttcctgttacagagggagaaatgaggcccagagagaggttaaggatcctgacctttgttaaacaggaagtttaacaaagtagcactcctagtctagtgctactgtttggcagctatatctcacaattaagtgccatattctacatatacccaagttgtattgcatatgaggattttcagtgacattcattggattaggaagtacttcag

SEQ ID NO: 103018 - DNA, 1326 bp, Homo sapiens
tttcagtttttcatactgtttagctgctcagtcagctttagactcattctagaacagccgtagaggccattctggatccttcatgccagtggagggaaaccatatttctgcattatagagatgttaatttgtttactgccatgctaccaagatttctttctttgtctaccccatgtctgtgaaaagatgttggtacccttggtgtcagtgacctaagataatgaaactgcaaaatttttttggccagggataggaggagtagaagtgagtgatgagggagaagttgaaattcaggtgtggaaatctcttttgagatagagagtggcaggaaagccacccagagactcaagtggcttatgagcagtgttttttacttgttagccgccctagtagaaacactgggaggtgctctcttgtttcttagcctcgacttgtctgtgaggtccagggaggatacgaagcatttgaaaacatgttccctccctgtaatctcacatttgaaaccccatagtgggtggcataaagaggcttagtaattagtttctggttagaccacattttggattatgtataataaagcagaccttcaagcatggctgatttttttttaatatctagtttgatgactacattttttatttgatttttaaaataaatatatagcacatagtatgtactaattatattaactcctacagaagataccaaaaaaaagctgttccatgtctttaagaagctaagtgcccaaagagtgaaactgattaattctaaccttatcttggctatggaatgtctctgttctcagacagagttgaaggattcaggcacagacgaatgaatgtcttattcaggttcaagaagtaatttggcagtgtgagcttcttgcagattcttccagacacttccagaaacaaagttttcttcatgagtttcatttgaaggtgaacttggggttttacttgaaaatagtgtcactcctggagtaatcacccacaagcatgaagcatttaacatagtcctctttagtaaaatgggtgtgagccatacaaaaaattaagtttggaggaacatggaaaatgtgactgattatcctctcacaggcagtaagctttcctgtctggatcttatttcgcctttttgtgaaattagattaacctacaattagttcagtctttttaaactcacatttaatctcatgtttacttcttccatttaatattttccatttaccccaccagatgggacttccccacctttgaatgccactagagtcttgccgatgaccttctcatggctcccagtgtgtcttgggtcagggtggtggtt

SEQ ID NO: 103019 - DNA, 1076 bp, Homo sapiens
gttataatgcttttgtctttcgtctcttggggttgctgagatctataaatgtgcccctgtatttatgatgcgtaattcttatctgtctagtattcagagttcccctcattctagaatgtgttcccctcattctggtatctagggattgttaaacacatccgggttcacgtgtctttacccctcgtggttatatatgtttaatgagtgattttatttggtcatgcataaagcagagagccacacagtttagagaggattcactagcaggggatgatgaggttgctaaggaatatattttcatattttccacatttgttaagagtacagacaatttttttagcctatgatgtgatacatatcttttatttttaaaaaactacaaacccagagatgcaggcctcagttgtatatttattttccctctgaagaaagaatttttaaaatctgagtgcagaaattatatttttgttacttagggttcggcacttgatgaagtgactgtgtgcatagtaataggaaagcgatttataacctgattaagatttttgcttcaaggcagaattgtgcatttctgatggatgttaatgtcttgtttctctatagcactgtgtgcacgtgtgtttgtgtgtgtgtgtgtgtgtacctgtttccatttgtttttagcttttcagtttcccttcctgatttgggtgaggaattgttattttaacagattgaaacactacctttgacgattatggtttcatttttatcccatggcaaggcctcatttcttccttcatttaagccagacacctcttgaagatttaagcttctgtgtctacaaatacatgatagttaataattaggcctctaaaggtctttgtaagaggctttgtcaaagcgtctcttccttatagggcttgatgtgtctcggaagtctcagccagagctctgaactttggaatatataaggggatcaggtcaaataaataagttgatccagaaattatggtggtttttaaattatctttatgtacatgttctttctcatcataaaggcatgccccatttgtcttctgtgttaactctagcct

SEQ ID NO: 103020 - DNA, 1050 bp, Homo sapiens
agacaatgctacattatgtggtgggctttatgtttgggctcagatccttcctataggaactcctgattttataacaggcagcaaaagtagtttgatactatgacttgtactgatttctaactttttaggaacttggaatatataccatgtctggcctgatttgtaactgatattgctttgtcttttattattgactaatgattgaaattctagaataggtttagttcttagaaataatgtgaattttgtatttctgcagattgcagaactgcagtttttttccattttcccccctgtgttaaacagtaacttattaggctgatagggtgctggttgtttctgcccatttgcctgttgattgttcattttatccagatgatggtgtatccagctactcttataaattcagctactgcctgactgaatttctgtgaattactgtgatctcagaaataactagtgcagtcaagaataactgataataattaagccatccacttgctgctgtggagggaaataaagcgtaagaagatagctgataatatggcatacaggaaaataggaacctttggacttgatcttaccagtgtcttctgtaaacatgttcagcaggccctctttgccaattactgtcctggtggaggcactgagggtagcactggggaacgataatagttggaaatttttatacttctgaaatgcaaggaagaaatagggaacaaacatgataattatggctgaaaggaagaagaaatcttattgtggacccacttaaccagggtagtgttgaagaatgttcttatagaagagctgcctggtagttccacagtctctctctcaaaaggcctctgtgaaccatcccacacatacccttcagcagaaacctgccttaccagtacagattccaaagtctattcaaagctaaatgcaaatcctatgatttctttgaaacttttccttacttgtctgatggtggtattttccctctgaattattgcagtatttacttcctgtctgcaccagactgactaggggtaaagaaacttttcc

SEQ ID NO: 103021 - DNA, 1024 bp, Homo sapiens
caagaaactgagatgtccaccacagacccagctgtaggaagaggttgggggtgctgcagaatcgatagttctgattttgttcccagccacagtagttgctctggccagcattaacagtccagtgtcatcatctacctgtagtgtcaaaactgggatgggtatgttttattctttgaatgtgattatccatatatcaaaatgcttaaattatttaaaaaactgttgaaagatttgttattggagacagctgtccagtaaccagtcagaatggattgctagtccaggacttttattatttcttattatgtagttatttagcccaaggtaaaagtttaaagcaaaggaaaccaaactgaaaacagtgtcttaaagaagcatttttctacttttacgcaaaagcacagtgagtctaattgatttctgtcctgtgttttggtagctgcgaagagctattctggcacggttaaagaatattctctggttttcttctctgcctctgactttgttttgctttgcaggactacaaagctgatgaagacccagcattattccagtcagtcaagaccaagagaggccctttgggacccaactggaaggtactggatgctgacctttctgacaggcagagtcttggcaacagaacacttgacaggtcctgagtcttgaagagctggtgacgtttaagtgaaaaatagaaatggcacaaaaatagttttatttgcgataaggacttacagccagttgcagttggccagcaaatctgtgctgcattaacaaacagaacagagccagactgtcactttcagcataatgcagctccaataactcttaaaagagacaagtgatttagtctttggggattctaatgttctcttttgagacctgaagcagtataaaaatccattttaaatgaaggtttatagtttaaatttagtcttattaaaaactgaacaagctcccttcacccaagctcatattcctggacttttaatagttatatttttggaaagcaggacacgagtga

SEQ ID NO: 103022 - DNA, 1713 bp, Homo sapiens
aagttagtaaatgttatttctctttacacctctgttatttgcttttgcaaaatttaatgtaaacttttttttaatgggcttacttactctttggagtctcgcttgaattttgtcagcttgagttagttattcgtttggcattagggtcaacagtgataggatccaggaactcatttaggtgccacaatactggaaaattcagggcagtgctaataaatgatgtttgttatttatcttcatatttaattcagctttattccccatcctgggctttatttttaggatgtgattagaggaaataagccttgctaagttgaactgcaatacccatgcatttaaaacttaatgattatctttgagctattttaatagacacctaattaatcattgtatgctaaaggaaagcattttatataacaggctgcaggatcctaatgtctctctcaagcttttatgtttgcccagtaaaacaccccctctccacaggatagaaaataggggttgatcttttataagcaggtgccaaggagttgctaatgcttgtggtttgggtcctcttttccttagtttacacttagcctcacctctagtaacccatgcatggttatttaagcagtttctggtgtctggagctcatctcaatttttccacaagctgtcaagaaactcctaccagcctgccccccacctcctactcacttccccattcataattaggagttaaatctgggctcagggacatttagtttggctcagcacagacagattttgtactttcatttttgggggcagccactgtactcaaagattcatgaaactaatattctttgtattcgaaatgaatccggtttctattgagagtttctgttgagatctgtagtaacagatgtacacccaagaagtagcacaacttttgtattccagtgacagaaaacagttatttataagaaattaatgagtgtattctgtggctccagtgtggagactcagtaatccatttatttaccatattatattttgttttgttctccgaaggctatcctgcctttttttcttaaataagagttttcaattaaatagagttgtattaacactaatccgaatataccttatgctgatactattgtattttttctttgttcaggcactattattggtggagcaagtagtgtctagggatattacacctaacttgataatgatggttttactaagcccttattctggccaggcctctgggcattatacagataattaaaattgaatcataaaaaattttaaacacagtgcactttagcaataagatttttctacttttaaacatgattttaaaacccattttaaaaatgcatttccttggcctggtgaatttgctctcttttttccccaaggattacagaaagtgcatagcaaattcagccttcagaatacccaggagctgaagactcaagtaggctacagctgtcttcacccacagtattctaaaagaactaatgagatgagaagtctgcagctggtggcaagcacaataaaccatgagccaagggcttctcttcatcagagcctcccctttccccatgggatcccaaaggagacagaatactaacaaagccagcaggctgtctcattccacactattgctcatttgcagctataattggtagctgaggttgcattctgtatgctgaaactgtcatacatgaaggaatatatt

SEQ ID NO: 103023 - DNA, 2470 bp, Homo sapiens
gtttgtactggaatacaaaatcaatttgatgtccttttgataacacctgggttggcaagggatgaggaagcaggcactcccatacattgtctgtgggaatgtaaattagtggaactgttgctagtctagcagaattacaagtgtacatagcctgttgacccagcaaaattctgcttctaggaattaactctacccactgtaaagtgacaggtgtataaacctaggatcagaagtctaagtgtttctttatcaatcgggaactgattaaaatcattgtggcacactcatgtgatggagttcagtgcaatcattaaaagggagtgagctctatttgtactgatggagaatccttttcaagacaacctggagggagaaagacaaagaagtatgtataatatgcttccatttgttatattaaaagggagaaaaatagtttgcttagttatgtatggactatcaagaagaatgcataagatgccattaatagtgatttcccttaggacaggaatgggatggaagagttgaggtctgacagagatgtgtgcagtggatcaggggataaactcctctcaccaactgtatggtttctgttgctgcataagagatcactacatatttagtggctgggtaatgtgacctgattagtttgattaattaagggaatggcctcccattacctttgccacagtctgtggcttagaagcaggttagcggttctgcttgcacttaacgggagggaattacatgagggtgacttatggcagggaggggtttactttaggatgcatctgccataccagcagtcaatgtttagtgcctaaaacttgctctttaaggattggagtgacactagaatcgagagcttagtaactatgaataggccagtaagtgggtgtgggattgagtgggggtggggctgcaccccatggattgggtcgcctgttagacctggggaggtggggtgggtggggatattggagcagaatctccttcctagatttgctgagtctgtcttgttccggggaccagaggacagcttgtggaggctcaggttggatggttgaatggccagatccagatcctaccccttcagtcagccccagctcttaccctgcagctcagctgggagcctgactctcttgctttgtaaacagggaatgatcccctttcacaagaccaccatcatgtctgggcctgtactaggaggctgtagctagaacctgcgtttttctcaacactatttttatgaccaaagggcagcaccttctgaatgggagatcgtgtgactactgggaattcatgttcctctaatgcgcctgtgtttagtggtaacacctcacatgtagaatctggttacctatgcagttgtgaatatccagaagtcaggtaaatcactgtctatagtcttacccaatttaaaatttcatgatttgaccttttctcccttaaatgaatgtgttggtggtgatttggaaaaagaaaattaggaagaccttctgaaggtatagtgatcctcaaagtttgtacttgtggcaccttgactcctggagatttttgtctcagtctgatttaatcagtgatttttcattctgtatttaatgacttctggtttttcttgagtgagctaattaaaaaaaaagttaaatggttgagtttctttcatattacttgcttttaaaaagaaagaaaacagctgcattattaaatttgagtgaagtcctcagagtcaggacaaacatgaaatagttgggagtgcaagaaaccaagaatttgaaactccacctggtgggggctttctgtcactgcaggtgaatgtaatacaaatgcagccccaaatattttaattcagagtgattgttgattactcttaagatttaactctctcagctaggttgtcaggtggcttgtataccactcttgtagatttgctgtctttggtagtgtttatgaactatacttcaccatgcagagaagagatgggatttgactcatggcataactgaatacttgagtggatgctttgacatgtttacataattggagggtgacatcatcacaataactctaggaacaaggatttgttttaaaaatctgtcagtgtgacctagggtcacagagtagtttgctacaaaaatcatatgtatttaaatatatgggtcattaagactttttgttgatgacttgtgggaagtctgtatatgactattgctttagccactgttctctgtaattttctagaagctacatcacttcctgatgaaagaagccaagtagtctgggatttctgcataatgtcctcacttagtatcttttgtcccttcagaatgtacctaccataggaaacggatttcctgtttcaagagaaagtgacattgtagtgaagtgttattaagttgttatatcctttaagagggaagcgtccttctgctggtcatcccagtggtcacagagtacaccatgctccagcagg

SEQ ID NO: 103024 - DNA, 1027 bp, Homo sapiens
taggataatcaaattttggagagattttagaccatacagtgcatcatttgaattctacttgtaatgtcaccttatgtttgtataggactttgttggttacaaaggttacaagtactttgttgtgtatcatttggattaagcataggtctcgtatatttagttacataaatcatctgtgaggactgtcagaagataatattgacaggtttctattcatttggcagcatcctcattctctccttccttattatttggggttataagtggtaataaaagacttttagatcctgcaaaatgtcagacagctaatataatgaaataataatttgggtcttttaattccctataatgtcccctgagagactcaagataaagattatatgtgtaagcataatagaataatctacagtttgttttgtttcttttctctttgtcattggtaggtacatggtttagatccaaacacatggaaaactgttgaaattgtccatatagatattgcagatagaagtcaagttgaaccagcagtaagtattactcaatgacatttaatctgttcccttttacagttaaaaattattttctactatcacatttgggattaagttaaaaaaattatttcctttctttcttgtatggcctacatttctatgccgaagtgagcttggagtgaagtctagtacgtctgtgcagcaaagagaccagagtaagagagaaggcgatttgttttctgtgtagattttggctttgtgcaagtgatccctttaagaaatcccagtatacctgggaaatgtaggttgttttcattgaaaaacaaaaaacacattgtttacaaaataattctccctccagctaggtcccttttacttttcaaatgtgattaagaaagcaaaaatttaatttgcatacaagtatttagtaactcagctacagttgttatttgtggaaaatggttggtgtagagtatctttttaaaaatgttcttttagattccagaagtaggtgtagagtattttaatttaatagt

SEQ ID NO: 103025 - DNA, 1436 bp, Homo sapiens
tttgtgtctcatactttctttatctttaaactttgttttacacagtaattattttcaaccattctttgctaactgcacctcgctgcatggttccttcctgtgtcccaccaaccagccgccacactctaccacatgttcccagtgttcatgggccctttccacccttgtctcaaaatctccctattgattttattttgcttttgttactcccttcaaacgccatatttgtttatcagacctcacagcttctttattagcccgatatgccacgtggcaagtagaattgtttaaattatttaaaagcatgtagcatttggtttgcctgacaagtctataaaaatcggtagccaatgattctttgtcacttgagtatcagtctccttgtagagtcaaagcatggatgcctatactgggaaaagctccctcagacgtgggcaccaaggaacaggtagaagatcactgtcattttcctgttgtgttttctgcagaatgaatatatgaaagatgatttcttcattaaaatcgaaacatggcacaaaccagacttgggaacattagaaaatgtaagtttcaactctgcacttttagtacaaaagtccctggaaacgagaattctatatgtagttcactttgtcatcatcaaagtaatgtcacctgtgtatctgaccgcaccaagctgtgtcaaattgagatgaggcgggcaagcagccagaaaccaaataggctttccctatcagtccgcttgccttgacactttggtaaagttgctgttttgatcagcaactctctttatccgagacaaggagagcatgaataaacaaaattcacagataatccccagcccaattttagccattagttttgctaattagattgcttttatatctgagtgtttgtcagagctgctctgcatagcaggattgattgctttaatttttacctcttgtctgctttgcaagggtatgggctcatgttagagaaatggccaaaaggcaggagggataaagtacttgaataacttacaaaaatgttgaaaagctgttgacttatataagttggttcacatttatctctttaagattcaagaacatctttgagttaggacttaaaaaaatgtaatcattaacttttggtaaggtttgtcgtggaacttgggaagtcctgttgtataggttgatgcccttggtctaggagttctcaaaagtgtggtctttggatgggccagcagcagcacagtatctgaggacttgtttgaaatgcaaatactctgacctcacccaagaactaccgaaccagaatctctaggggtgggactcagcagtttctgttttctgatgcacattcattccaggagagtaggttaatgattgtggcaaattctgtttttactgttctattacggtgctcttacgttattgatgccagttaatagaact

SEQ ID NO: 103026 - DNA, 1081 bp, Homo sapiens
acacggtgaaaccctgtctctactaaaaatacaaaaaaattagccgggcctagtggcgggcgcctgtacccccagctattcgggagcctgaggcaggagaatggcgtgaacccaaagtggagcttgcagtgagccgagatcctgccactgcacttcagcctgggcaacagagtgagactccgtctcaaaaaagaaaaaagaaataagtgaacaaagaattagctcctttcatttttaaggatgtgaagacattaaggaagatttaaatgaagaaaggcatatgaaaatacccagctccgtatcaacttataattaaaaagcagtaactaccattttttgagctcattgtactgtgcaatgtgctaaacacattccagtatttgatttaattctcttaataaccctgcagagcaggtaataggaattccattcaacacatgaggaatttcagagaagccaagtagcaggcctaaggtcacacagcttccaaatggtgatgttgggatttgaattcgatctgtgtgaaaagtctgtgcaagcaaaactactctttacagtaggctccagtcactatatcagtcacttcatttgcatttatttgaagactgttaagactgattttcccatttgtttgttaacaaataacattttctatttgtaatgggcctgtggatgacttttgcccctttatatgttgggattgtttctgattatcatatgcttgcacaagcttctcatatattaatcatgtattgaacctttctcttcctctgaatatacttaaggcagcaagtgacattcatctcccatacctacaaaattttatacttggatatgctttaatttctcattttctgcatgggtcctttacattgtcatttttcttcaggtctgttctataaaatgtattcagacttttattcagagatatctccttattctggggctttttgcattaagaaacagtataatgtcatctaactcttaagaactacattgtattaatgtgcagattgaatagctgttaactcttaggttttacattggggtagtagatcagaagttcttaagaaataattgc

SEQ ID NO: 103027 - DNA, 1048 bp, Homo sapiens
tcttttttgcatgtttgtttttgaaggcctatctcccattttgttaattcagttaataattgttccttttctgaggctctctaagcttccaaaacaggaatctgctacattttactaaagggccttactattgttcattcagttaataattgttcttttcggaggctaagcttccaaatgaggaatctgctgcattttactaaagtgccttgctaagtggtaactgtggtggcaaaatgatgtatatgctctcaattatatatacctggcacacttgaactaccatgttaggaatatattaaggttgccattaataaaaatttctaacctttgaagtagaattgaaatttaattttatttactccatgtgcacattttcctcgtttagtcagttacttagattcattgaggagagatgtatttgataatgttctcacgttaaacataaaaaaaaagtaaatttgaaatctagcttatagatttggactttattaactcagtcaaaacataaaatgaattgctggaattcacatggtgggaaaagtatcttagaaataagatagtaggcatttgggagcgagataaagaaatattaaaattttcatgtagatttggctcatgttggcctttaatgataaatgccaatttccttctatttgagtcagcaaattttagaacattttatgaatattaaggttcttcacatatcaggcactataggaataaatggatagttaaaatatgtgtctgagttaatacagaattgtttctcctgcctttttgttttttctttctttttttttttttattttttattttaaagacagagtcttgctatgtcacccatgctggagtgaaatggcatgatctcagctcactgcaccctccacctcccaggttcaagcaattcagcctcagtgtcccgagtagctgggattgcaggcacccaccaccatgcccggctaattttttgtatttttagtagagatgggttttgccatgttggccaggctggtctcgaactcctgacctcaggtgatccacccac

SEQ ID NO: 103028 - DNA, 1715 bp, Homo sapiens
agtgtgtgtgtgggtgtgtttttaaatttaactaataggcaagatagcatcatatctccatgtgatttgtagatatgaatgtttactgagcttaaactacctgttgttttggtccctcacataaaatgttaattttgaaattacaagttcttagaggtagatttttgtagtttttctttgaaaatatgcttataaagaagaaatacacttcttcaagctgttttcattagaaggaagaaatttagccaaatttgaagtgatggaagatagtgccacagttgggtcactgtaacaaattagaacacgagaactttttccaacatttgttggaactagcgactccagattggcgtagaaaatacagttgacttacaggtattgatggaggcctctgagatttctgattcacgttaaatgaaatagaagctactgtcagcaatttcctaccttttatggtaatatgtatacattcatattactttaaaaacagtttctgtttgttctctttacttgaggactcacaatgaaccatttctgatcttgggcccccaatactgtttctggttagctgaagaaggaccaaattgagtgtatcataaataagtcataagttaaaaatgaccccagaagtctactaagatttggactatctattatgtttctttggatctccaggcttttgttattacagtttacatccctcccctttatcattaagagcaatatgctggttgctcagctttagttggcaaagtgccagttgtatttctgccatacctttcttggaattttgtgaagttaaatgagaaataatagaggtgaaaatgctttgtaaagtacaaatatatattgttcaaaagttaaaccaagtttcgagacattttcttgataaatgggtagtgtaaaggcaccagagtatttgtaactggcaaattttttgaataatgaaagtttataaaatacaggtttttaaaactgtataataatctgtggtttgtcttcctaaacgtattaatttctaatttgagttgtgttttcatattgaacacagttgtgctgaatggtttggatatgcttttctatatcatctatattattaagattttagcatactaaatttctgcagttactactgacttactcagtttctgtattctttgaaatttcagtatcaggttgggcagctttactctgttgcagaagctagtaagaatgagactggtggtggagaaggaattgaagtcttaaagaatgaaccttatgagaaggatggagaaaagggacagtatacgcacaaaatttatcacctaaagaggtaagcggtgttcacatttgacgccttgtaactacctggcttacttatgatgcatgtaactagctaacttaactagtagatgtgaagtacatttttaatttcagtttgataatatattgcattttaattctttggcagaacctcctcctttatttgtaaattagaaaaggattatatctgcttataacaaaaattcagataaaaacttagtccctgctccttgccatcaaatatttgtaacacagagagaaacactagaagcagcttagagtttatctttctagatcattttctgtatatattcaaaggaatttttaaaacatagcgatgtattacttgtatcaattttagttttctacaacaaatggaccatatgaatggttttgcagtttgctttatt

SEQ ID NO: 103029 - DNA, 1025 bp, Homo sapiens
taaacttgaggaataattgaatagtgggggaacagtttctggaagcgtttattcaatgagattcaagacacgtattctgtaagaagcatcataaaaacaaaatgcacagtatataggtggagaatgaaaccatactaaaaatttagtcagggcaacctgaccagacaatctgcaaataatacgttctgtaccctgcaattttcaatgttgagttttctcttttttctttactcacaagaatctctgcagctgctgtttggggtcctgggaacactaaatgcaaatgatcattgagacccaggaatgatagttttagttccccaattatggtgtaggcattgcaaagaccctcttccataaatgacacccttgtatttttttgatttaagagacctgtctctgttatcattggatttaaggtaaaacctcttcagagatctgtgtttaaagctatttcatatgtaatatatatattttttcttttgtctttttagccgtgtggttttgccatgttctgttcaggaggtgagtttttcttgcttctgcatcattttattggtatatgtactgtactttgatatgttactctaaactcacattttcgtagtattgatttaccttttcattccaccttatgtgacaaaattaattatatgaatgataattgcaaagaattgcaaaatgaattaaatgaatgataatgaatttcttgctacactgccttgttttggaagagtctaaagaatgtagtttaacctcctgtctagtgcaggaattctttctccaacatcccagagaaatgaggctccagcctcaacttaagtactttaaggttaagtagcttgctgcttagagaagcagcctactttactgttggacattttaaacatttgtgtttgaaccaaaatctgcttttcctataatgcttgactcttgtttacagtttatcccatttgagcaatgggaaataagcctgttctgtcttgtagtggttaatccttcaggttttctgatggcagctctcc

SEQ ID NO: 103030 - DNA, 1069 bp, Homo sapiens
tacaggcgcacgccaccatgaccggctaaattttttgtatttttagtagagacagggtttcaccctgctggccaggctggtctggaactcatgacctcaggtgatccgcccactaagtgctgggattacaggtgtgagtcaccgcacctggccctctatttatttttttataagaattaaaatgttagaaatgactttcgaggtgggctgtttcccttcaagttattatttaagcagtagatgaagttaccattaatgtaaagtcctggttttaaagaactagttactgattccatttggaaattatttttatgaggattttcagacatttgaacattttcaactggcactgaaagttgaatactgcttttagaataacaacagaaaatcaaagcctgtatgttccttttcccttttacttgttaagcaaatcttgaagaagttacttgactcattgttctgaatgtcttaatcagtcactttaattttttgaaagaatttccttgaaagtgttcttaaataaaaatagggatcttcctgttagtgagtgtaaaattactcagcagtgattctttggttttgtgaaacttaagggaagactaactcttctttctctatcccttccttccattccctctgcagtccatcatcttggttcaggcctttgtgacagttcttgcctagcctcccaaaagatagctttccccacttctcctgcttgtcagtgttttcaaccacctgcagatgacttcttcaggtcagcagtagttgtcacttacctcttggaccaaccttttgggattccttattgcctgatgaatttaatggatttcttaccatagtattccaggtcctgataatctgctcccaacctatagctttctagtcttcctctccctcattttatgctctgggacagtgagcaagttagtgtatactgagaagagaaatgattcggaatttttaggtatagaaggacttacaaaaagtttattcttgatggagagtagaaattagtgaccattgtggatttgagagtgttcattgtttttgaatcaccgttaccaga

SEQ ID NO: 103031 - DNA, 1018 bp, Homo sapiens
gtttagatgtatttattgacggaaagattaggttgctggaaaacatgaaatctatataataaaataatcctacattacatctatttacaggataaaaatggcagaatgaaagaattatgagtggaactagagaataggaaagacatgaaccaacgcccaaaatgagaaagaaggacatataaagaaaaagacaaatacaagtgaaaaaaatagactaatggattaacgtccctgtcgtgtgacattttctggtatgacagctgaagatgttgaaccgtatggtgcagttttgcaaatagtgtatgaagtgggttgtaagttttaccagtaattgtctatagatacaaaaaggagccaacctctttttttttcttttagtgtgatgttccttgttctatcttcgaactctcaaaggtagcctttacacagatgttcaaactaattctaccagtgtcatatgtctaccaatctcattacttcccttgtatgtacttctagagcaaagagctcattacagtaagaatgatggtaaattttactgaggcaaacaaagatttctgaacgcgagcagtgtgtgtgaaatgcttatgcactagctgatagcataactctggtcaaagaaatttggtcacttaaatattataattgaatttagcccctaaagtagctgttcttaacctggaatctgaagaacagcctgttggtggggctcccagggaatttgtgaaccactgaaattatatacataatttcatgtctgtgtaccgtgtacatttatttttcttacttttttttgagatggagtttcgctctgttgcccagcctggagtgcagtggcaccacctcagctcactgcaagctccgcctcctgggttcacaccattctcctgcctcagcctcccgagtagctgggactacaggtgcccgccaccatgcccggctaattttttgtgtttttagtagagacggggtttcaccatgttagccaggatggtctcaatctcctgacctcgtgatc

SEQ ID NO: 103032 - DNA, 1008 bp, Homo sapiens
tttgcttggttacctttagaatcaattttaaatagtcatgtaccacataatgacgttttggtcaacaatgtcatacacaatggtgatcctaagagattacactaccatattatactgtaccttttctatgtttagatacacaaatacttaacattgtgttacagttgcctatggtattcagtacaataacatgctctaaaggtttgtagcctaggagaaataggctggtagcttaggtgtgtagtaggctgtctcagctaggtttgtgcacctgcactctctgatgctcacacagtgatgaaattgcctaatgatgtgtttctcagaacatgttcctgttattaaatggcatgtgactgtatttgccacaagtatattttactttcagaattaaaagaaagtagatgaagttactacactattttttctagcctatggcattttcactaaggacaacacacattgctactaaatattggtacagctaaaaatttcattaagtacttttaataacaactttcatttgtatagtctgccttttacaaagaactttcatgtatgctcttgcctgggtctcaaaacagttctttatagttgggatgactttcttttcgtttttgagacagagccttgctctgtcgcccaggctgaagtacagtggtgccttctcggctcactgcaacttccagctccgcctcctgcattcaagtgattctcctgccttagcctccagagtaactgggatcacaggcatgcaccaccacacccggctaatttttgtatttttagtagagacaaggtttcaccatgttggccaggctggtcttgaactcctgacctcaagtgatctgcctgccttggcctcccaaagtgctgggattacaggcatgagtcactgcacctggctgggatgactctttattggatatatctgtatatgtgagtctgcatgtgtctaattcttaggtaaaacacattcacagaattcaaaaaagaaaaatgtccatt

SEQ ID NO: 103033 - DNA, 1096 bp, Homo sapiens
ttgcactaaagaactattaaaggaattttttcaggtggagggaaaatgataccagaaacttgattctatacaaaggaaagaagggaggccaaaatttaaatatgtagataaatataagtgatatccctcattttttcatgtattttgaagattttatttagaagatgtttgactaggtaacacagcagtgataacagtatattgtggggcttataacatgtttaaaaacaatacattacaataatagctcaaagaataagagggagaaatgaaagtacataccgttgtaagattcttacattatacataaagcagttaatattatttaaaggtagactgtactaatttaaagatgtgtactgtaaaccctagcagtctttctcaactggagttccttatttcaaccatgaaacacagaaaatgatttgagtaactgctgtctcaattctcctaagaatggaatgtaaccagtactattctaggatgcgtgggagaggggttagatcacaacatgcagtggacacgttaggacattattgtttaattctatcatagaatctcagttgaagagggctgtggagagcaaccattgagaaagaaaaagggagagaaaagggtggggagagagcaagagagagagagaatgcaccagcgagcgagagcacatgaacaagaacacaaagtcaatagaggagataaaattagatcctaaaaaatgctcacttgatccagaagaaggcaggataaagaggggaaaaaggaacaaaggagaaatggagttccaggttttagtcagccattactttaatcaggtaattactttgggagaggccattataggttctcaggcaaggaaagattaacctttaggggtttgaggtcctcagcttcattagaatttgcttgtatgtctttatcctatttttcagagttccattccctctatttcttaattagttttctgaaatcttgaacctgtggcttcagaagataaggacatctttcaggacaatcatagagaagctttctggttcctttctctgaacgtacgctggaatttaaagtgttgagataataattttcttttcctcaagtt

SEQ ID NO: 103034 - DNA, 2085 bp, Homo sapiens
gcctggctaatttttgtatttttagtagagacaaagtttcaccatgttggccaggctgctctcgaactcctgatctcaagtgatccacccaccttggcctcccaaagtgctgggattacaggcgtgagccactgtgcccggccccataaattctttatattgcttaatgataccatcatttacctggtcactcagataggaaacctgccctttgatcctggactcctcttctgcagtccctcttctactcagatactaggacttggtgttacctccttaatattttaaatatcacacctagctcctccctatgtggagtaatcttctacctgttcctaccacaatacacagttaagtcatcatttttcatttaacaagtatatattggatactatgtgccaggtactgtgtggttggtgctgaggttacagttgtgactaagacagcaaagttcctgaccccatggagctttaatctgcatgtaggagagagcaaacaaataaatgtgtaatgtataatatgatgttagaaaataagctagtgcattgcagtaacatttcattgtcacctagtggtgatttaggcaatttgcagtctttgtttattggaatgtgaataaaatctctcttgaagattccatctataattaaagttaaataccagaactataactatttatctgagttttatatgtgcaaaaaataaatttacttcaattgatttggaagtctgaacaattgttttcattacattgttgaaatatattccttaaagaatttgattgcatatattgttttatatgattgctttttatttaagctatatttagaaaatgtcccagaagtggaaatatgtagtcaatatatactccccctcaagagtatttataattttcttttcatataatattttgttttcagtccattctctgaaatatctgtgtaacctttctataggtatctttaaaatgatttgagtgtttcaggaaaaaaacaaactatagctactgagttgagtgaatactggagtacttaaatcccatctcagtatttgacaggaaggatgtatatttgggtgtttttttacccattttatgctgttcttttgggcctgctacatttggtaatgaatcagtcaacatgtttctaaaaccagcagctgaaccatgtaattaataactctcactgggggagtggcagaacattgatctgggcttgctgggtgagctaactaccatcacacctgtccccatagtcaagttctgccagaagatggtgccaggtcttttgtggcctttgaacacaaacccgagtctttcccataatatccacatctttaaaagactctggtagtactaatggagatgaacttggcagtctgaaatgagaagaaaaaaggatcctagcgtctaacttattgcaagtaaatggcttctctctggtttcagttgtttcatttagataaatgcttcttggaagatgagacaacaccatttgcatttatgaatttaatcatggtagttacagcttaactatctggcttcagttttgtagaaatatataccatcatctacctcttcccctcctttcttgatcttgcagccattctctgctgagcacatttcagtagttggaatagagaataacaggtgtgtcaggttaaaatgatgattagagagacttcattttttctcacagtgaaatgttaaagctctgtttttgttagggagttatagctgatatttcccactggctatggctactcctggataataggaaaggagctgttgaaaatctgttggaattgccctatcaaatgagttggagcataagatagaaattattccatattggcccagggctgttctggaaaggcagttatagcatgttaccatgtagccatctcctatgcgcaagttatgataccaaataattttgtggctattcctgagtaatgtccccgctatatataatacaacttaatttcctcttctaaaaaaattattagctgaatggagaatgtcttgtagctagttgacatggctaataatcagttgattaagggatctaggataaatgtttgtag

SEQ ID NO: 103035 - DNA, 1035 bp, Homo sapiens
atattatgctttaggacatgtgattgccctgaacaaagcacaagctccactagttcctaataaattattacatctttcacatctgttcccgtcttttctctgaagtgttcatccaagagagcacagcatcaactgaaaatataagaattgtgggaagacattttcctgataaatgcatagacagttgacttgttgtgattagaggaatatcgcaggagcagagggttggagctgaaaactgactttctgcctctactgccagtgtctccttttgtccttttcctcctctccttgcaatttcctctgagagaaatcatgtgaccatgtcaccatagtttttaatgccaaatatctaagtgtctttaaaatgcagcacaacacttttaaaggcaaatagtgaagtagtttcaactgacatttccattatagctgttcttagtggattctaaacatcatacataaatgtggctagccaattctttttaaaaaaaatacaaaccattgagctgtcttttcatatttaatgcttcatccattgaacatgcaacacattttttcatagaaacatacattgatctgaggttatctacaatagtccatactagatttttctagcatttatattttagaaataaagccatttctcatagttttgtaacatacccgagcatttctgggctaacatcagttactctgttatctctagtactctataagtccaaactgaagaaaaatgttaaactgccaccattattgcaattactgtcaaattgttgttttacttagaagtgaaaattgtgttctaatattgtgtatacactatttggtttttcatcttaaaagctttattaaatccatttttattcatttattatttaataaatacctactatggctaggaacagtctatgatgacttggaaacaaagatcaacaaggttcaatctctgcccttgaagagctcatagtccagagaaaaaggtggatgagcgaatggagaaattacaattacagcaataacaaattgcttcaaaag

SEQ ID NO: 103036 - DNA, 1028 bp, Homo sapiens
tcagggaaattgccaagccactgacttcagctgactacagacaagtaagtaagccccatggaacccagctcagatcaaagatgtataagcaaaaataaatgtgtatggctttatgctacccatattttgtggttattttgtcacagagcattattatagcaatataaaactgatacaatgaccattaagcatctgaaaattgtctacttactaaacctataaaaacccagacttcaccagaatgactacatgatggcatctcaatgacaacgtgagttatatgcacaaaaaccactgttctccaggtgtttataaacagtctgattttaatacagagttaaatatggaagctttctaattataccacttttaaactcaaaattagaaggcatcaacaatattgaattgctaggattatattcacttgagaaaactgagtaacagttgatctctaggtgcatgtgggggactagtagtgtattgtactacacactgggccaagtgacctacaatatgtttcctatgaccaatttctgtgatttcttactctatatcttgaaagaagctagttacctaactacacagaaatactggtttctagtgagaagaaagaacagttggatttctattcctatttcctggcaaggtttctccagtaggtttctcaagagtctaatcttggcatatcaatgtggaagaaagtttataagctggtaaatctattccttttaatagtcactcaggacactaaaacagctaggtgccagggcaaatcactctgtagaaaatgggaacaagacaagcctagtatctgtttctggaatttggtgggagaaggaccaaagtcactgccgtcttttgatcctttacctatgtcaattcttttgtaaacaagagaaataaaatgtaacaaaaagtaaatatggatgtctgacagtcataatactgaatatgctaacatgtataaaatattttttagttcttcagaggaagatcatcatataaattaaacctagtactattaatcc

SEQ ID NO: 103037 - DNA, 1064 bp, Homo sapiens
gagcaggtttcctttagaaattgattctaaatgtaccaaaagtcaatctaagagagagaaacaattcacagctgcagatttggctagaacatttatgtttagggcatttggacctctgattctgggttccaaactaaataatggtgttttctaaaatagctcccagtccttttgcatgtgctttcagcatacaatatgacagaaaatagaagtgaaaaatagaagtgtagttttctggagaggtaggaatatttactcccagctgatcaggtaaaacacattgtgacatgaagaatgtgttctttgctgattctcaaggttttattttatttttatttttaatataaactgtcaacaaatagaagcaagaggaaattcacttgaaaatatcagaagataaaagaaatatagcaaattatactgctggtaaaaaatccatttttaggcaccaaacaaacaggcattggctgagaagcttgctgatggcttcttttgtttctctttgatttaaatccttatgcctgtaatctaattaacatcaaactgagttgcaagtatagtggcctgtttggttcaataataatacatttatatgaaaggttaatgaaatgaatttttcctccatccaattcattaaaaattgttctacaatcaacggttgctaatggaatagatattaaatattcatgttcataaattttctgtgtcatttctgattttccttcatttctgcctccatacattgaattttacaagtataagattcttaagacaaaaagctgatttagaggttaattgcacaccattaattcttttatcaaggaagcagtgtggaaagtggagagagaatatgacagtagacttgtctcactttgtagctctgtgatttggggcaagttttgtaaccacctcttttgtgcaatagtcatcataagaacttcttgcagggtattgtgagggttagtgataaactatggaaagcacccagcacagtgtctagtacagagtagctatcccacaaatgacaacttagaaaaagttttggaaaataaaatacctacata

SEQ ID NO: 103038 - DNA, 1911 bp, Homo sapiens
ttttgtaggagaaagaacatagaatgcgggatcaaaaacttgattttatactaccatgtattagctctatgttcttaagtcagtgtttcttagcttttcatgtttgtggcacattttctaatactagaattttggtgacattgctgaaggaaataaaagactcaaaacagcactaacaaatcagtaatggttcagtcgaattacagagtatcacagagtcttgatgtctatcagaagcatccgtggtttgtatactatttacttggtcatcctttcagcactgttttgctgtaagagctgttcactctctgcctgtgctgtctcatgtaattaggatgcaacattatgtatggtttcattaaatacagtctcattctttgtgagcactagctttgtggtgtgttactactcttgcctcttattcatgacaattccgtacagtgaatttgtgttttcacctgttaagtgaggacagtaagaactgccttacctacatcgggactcttgtgaggatcaatgagctttaaaggatacaaaggttttatgaaagttatgaagggctatatagaactctaagggatttttgttagatttttgtttgttcccttgtctctttatcttactagttaatgagattattgagatcagggactggattttttttctttttaactttatcgccagcatgtagctcactgtttgctatataaaagatgttcaataaatattcattaaattgaaaattaaaattattgtttttattcttaatattggattagtttgccacacagccagccttctctgtgtaaagcagtgtcaagctgtggtctggtacatttcattgtgtacagaggaataaggtgagtattggtgcctggtagttttggatggggagcagggacagaaagacaatcatagtcgtaagtgccctcttttgggaagcattctttctaaatgtagtaaagtggattatcacatggttgctgtgtgcaagttgaatgcagcattttgtttagtctggttggagaaattctgagtggttttattattatagtgtctctattggagactcttccacagccttataaatttcattttccttaattgggatggggagggaggaagaaaacagcatttacttggcattcttgccttttagagctgtgggttattgattcagggtcctagaatagtaatgcttggaagtaaaggttcccttgggagcaccaatgttaaagggcaaagggaaaatgattagaatttaaatctccagactccactgaatttgtggcttcattaaaaaggggttggggagggggacagaggaaatgatctgggctgctgctttgggctttgcttaaggcttacatccacaaactgattactcagaattacaacctttacaagttgagctatgtggcccagtatgaacagacagccagtggacagattgcttttactaccagttgtcagattgggcctttcaatactagtgaaatcgctcttattttctaacggagagtgtaacctttggctttggctttctttgaactagtgcaatctcttctgccagttcctggaaaatgtaatcaccaaattacacacatacttcattctttgatgtgtcactctttagaaattctatttccccaaagtcaagtttttcttttagactgtttatctgatgcccagcattactattttaagtagtatctttcctgacctattagcagaggggagcaatgtggaataatgggaagaacattggataataatgataaataagttttgctaccaaatagctatgtgatcttggacaaaccacttaacctctctgagtttattatttgtctgcattagtcatagttgtgaatatttttcacattcttagggcttctatatgaaatttat

SEQ ID NO: 103039 - DNA, 1053 bp, Homo sapiens
ccgccacatagtggaggatgcatggttgcatggtggaggatgaactggaaaggagctgttctggagaagggtagcaggaaggtctgctaagcaacctgaggcagtttgtaatagttgtaaccaagaagtgacaaaggctgtggccatctggcacagcctccattcatcttctaaagaacagatcttcagatatctgaaggcagttttgtgtcctttagcaaggcatatatttggagaacctgtgtaatcccagcttccttcaccaactaaaacaggggataagcctcagtgacgtgtcaacccacttatagaacttgccttactattctttgttcattacttctagtgaccatagtatttttattacattgaaattgtaatactttaaagtatttgaatattttgaaataacattgatgtagggtttttattttaggcaaccagcagggtatagaacttctggagagcaggatcctcgaacctgtatgttatgattctgttggctagatctcagaatggcaacaaggaatttttggttttggttgtttctcatatctcttgtaaggaaaacttgaataattcaggtagtacatttgtttctccttatacactgctaggtatatagtggttggaactattcttcttaaggcactattttcactgcctatgcaaccacagagatcatcaatagtaaaagctattaaactgacattgtaactgttgctgtgaaaccagtactttcctgcaggcattatttcatcctgtgcctttttggaaaggatgtagttctcatttagttgtcagggaacatggtattatcttgtaagcattgctttctgatgaattttttcagatcttctttgcagaacctctttctgagtttctcaggaaggataagaacgttcttctgaatcagaattcttttccaagactacatattaagaatggactcttggaataagctttcttttagatctctagatgtgataaacatggctattctgtgagtaggaatgccttttcataagagttgaacaactctgtagttgcttt

SEQ ID NO: 103040 - DNA, 1023 bp, Homo sapiens
attctaaaagaataagagctgggtgcagtggctcatgtctgtaatctcagcactttgggaggctgaggcgcgtggatcacttgaggctaagagttcgagaccagcctgaccaacatattgaaaccccgtctctactaaaaatacaaaaattagccaggaatagtggtgcatgcttgttaacccagcaactcagctggctgaggcacgagaatcgcttgaacccaggaggcagaggttgcagtgagctgaggtcatgccactgcactccagcctaggtgacagagcgagactctgtctcaaaaaaaaaattaaaagaataagaaataaaataagctttactgatcttctgatatgatttgtcacttgagctttcctttgctgaaaggtcaaagggattcttagtggtgcccactcactgttgaagtcatttgttcactttcagtgtgttgtggcgtattgtagtttacatcataaaatatccaccttaaacaattaattttattcaaaagaagaagatgaaaaagaagactgtagtataggttgtagcatgatggagaggatggactctgaagctagactgcctgggcatgagaattctagtccagcctctcagcagctgtgtagccaagttacttaacttctctgtacttcagagatctcagctatttaatgtgaatggcacctagctcttagtgtgactctgtagttataatgtaaaatgcttacgagagttccttgcatataaaaagtacttaatatgtttttcctcgtagtatgataatactccatagtctagctggacatggctcactaagtttctttcccctttctagagggccttctcctcatgttcttcttaacttgccttccttttgttactggttatactttaagaactaactcagccttctcctccttggtgaatccttctgtaagcagttcttctattgccaggcatagatggccataccctcctttgactatatttttataggccacagttgtagccctgtactgaagctg

SEQ ID NO: 103041 - DNA, 1024 bp, Homo sapiens
ccccatccagtgtcatgattcttttattcatataaccttattggcctggaaaaatatactttcccgtttttacctttagtcaagagactacatcatgcatcacatctttatcttatatttgcagaaatgatagtaattaaaatgctcatctcataggaacatgtttgtttataattctgaagctatttctgctctttaaaatccaaggattagtatcagataacactgtgtaaataagactgcagtcaaaaccttcaggaaagctgctgctgattggattttttcattgctcatctaatgttattttactgttcacacataataaaagaccattaataggaatatgtcgacataagctacattaattatgtcatttgagagtcatatgatatatttatcttgttatacttgtcacattaataaaatgtgaatctggctctcaaatgatttctctgatggagttccatttaaaagccttgtttggaagctcatttgtgaggattatgccctgtagatttgtgtcttagaatagcttattacttttacaaaagaatgtatttcaagtccctatgctttctctatgatggagtactttgtttctgtattataaggctaagtcttaaattttaatatgcctatactaaattacttagttacttgccagaatgctgtgctagttggtattattatattattcattttgggccacaatttatttaatagtataacatcagactttaaaaataagtattgtggacaaaagtagttatacagagaagtcttagaaatttcatgatagtagtctttcttcaaatccattctatactccattcccagatcagtgcaaccaagagacccaggttttggttctggcggatctcttgactcttggccttgggggagtcacttaatctttcacatttgactccccactgttatagttagtgcctcattattatcacttgctggatttattgcaaatgtcatcctaatgaattttctttttctggcctcttttttcccc

SEQ ID NO: 103042 - DNA, 1053 bp, Homo sapiens
tactgtgttttatatcagaactgaaatagaaatcatgtgtgaggtgcatgagaagatattgtgcatttgttttattgctagagaatctaacaaaccctgccttagcatagcctggcgaattgaaaggttttctttgatatctaattgatggcattttgtcctctgaccctgtgtcttttctacttcatcctgaagtcaagaatctcttatatattataatagttctcatcacagagcttctttcagtgagattgattccattcactttggttgagagaactatatattccccacccccacctccaaccccaatacagacagaacgaggaaaactcatagaagaaaccatataattaagcaatttaaacagatgctgcgtattcctaaagtcccccatttcttctatatttgtaattgcatgtttatgagtagttttaagatgtctgcaaactctacattcataaacgtctgctttttctattttacccaatatgcagtaactcatgtggttatgtctgtggaaacccctctgggtactggtattgcttgaaccacggaagtattattcttggcagtcaggtggatttctggactctggaagattctgtttcaagtgttaggattcactctgcagtatttactcactctgtgatgcttaaattgctataccagaaggttgtatttattcactgtattcataatctcatatcatcatgttgtaaagatccagatacaattcttcagagttcataaaagattaaaaaataagctgagccatcaaataccatatgcttatttggtggtagcttgacaacaattcttgtttcttctacattggaaataggagctcccttggaagagattagatatccaactctggtagggcaccagtaagtctttacaaagattaggtttattttcttactcttgccagaatactcacatgatcagatcattgccatggtttctggctcagtctgctaacacatttgtagtgatacagtcacatgccatgtgttttaccaaacggtttcataaaaaccatttacccta

SEQ ID NO: 103043 - DNA, 1049 bp, Homo sapiens
attttaacacataggattgtcattgtattttaagattagactttaaaaattttatctttgtagtggtggtgctaaaatcgttgaggattatatgaaacaacctttgcacctacttttttggcctgggttgaggatattgagaaaagggttatgcactggttgttgatgttttttaaacagttcatggtcatagctgagatatattaggttagtgtaatacatactgttattaagaaaaagattagtttcatcttactcggcctaattagctttgttccatttcattggctcaaatgtatccaaacaagacactgcaagggccgtggtgttctgaatagagtgctgtgagatactgacatattttattttgtcttacaaatgagctacagacaatgataattatagaaatgtattctgtggtcttacttataataaattcatagcatcagtacatgcccataaataaaataaaccattcaactaagactgttttctcaactttttatgccgacattagtttgctagttgtttatttttgttgtctagtatggaagacaagtggtagctcgtgacacatattttaaaaatttatgggccgggtgcggtggcacatgcctgtaatcccagcactttgtgaggccgaggtgggcggatcacgaggtcaagagattgagaccatcctggccaacatcgtgaaaccccgtctctactaaaaatacaaaaattagctgggcatggtggcatgcgcctgtaatcccagctactcaggaggctgaggcaggagaatcgcttgaatcctgggggtggaggttgcagtgagccgagatcatgccactgcactccaaaccggagtcagagtgagacttcgtctcaaagaaaaaaaaaattatgagagaaaaagttttaagtagacagaattatacattaaccttttttgggggaggaattggggaaagctgaccacatacacccttttgaatgaagaaggataataattaagaataatatttgtatattttagttacaattcactttttttgtatttttac

SEQ ID NO: 103044 - DNA, 1186 bp, Homo sapiens
gaaactcttgactgctggaggctgtgattgacccactgagagcttttaggcatgtggatgtgagtcagccaggattgatggagcattgactgctaattagactcctctgggaaggtagaggcgggcaacacataatgccttcgctgtgggagcttcatcaaggggatgattcttggacggacatttttcctccctctttccacaggggcatgctagccctgtcattctaggagtttattatccttcagacacagctacttatgtttttaattccctcacaggatgaagacatgaagagaaagtttcaagatcttctgtctgaggaaaatgaatccacagctctaccccaggttctagcccaggtattcgtattcctgatgatcactaaatgtagtctgggcttaaggagctgataagcaaagatgatgaaattcaagattttcctgagtagcaattgcttaacattgtttcagttataatgtagtagaaactctgttttaacttgattcgctccagcacccttagatttaaaaatgcaggatatgtttaatatctaacacataatagaccgataagcacagctagggattgtcatccaaaaggtcacctgcaaggcaatttcgaaagactctattagaggctcaaatataaatttgttgaacaaattaaaatttgggtcagtagttgattccttgattacaattttattctttaaagttctttgtgagtataagttaattccagtcctgcttttttgttgttgttgttgttgttgaatggtagctgtcctttttcccactgtttcctccccccaattttttttttcttgagacagagtcttggtttgtcactcaggccggagtgcagtggtgcaatctcagctcactgcaacctctgcctcctgggttcaagcagttctcctgcctcagtctcccgagtatctgggattacaggtgtccgccactgtgcccagctaatttttgaatttttaggtgagatggggttttgccatgttggtcaggcttgtctcgaacttttgacctgaagcgacctgcccacctcggctttccaaagtgctgggattacagctgtgagtcaccgcacccagccttcctcccaattttatatatgggaaaacaactaaggcacaaaggttgtcttcccgcaaaagaccaagacttggggc

SEQ ID NO: 103045 - DNA, 1500 bp, Homo sapiens
atgtgctgtggtgggagtttcttcccaaattccatggtgttttctcctgtcaattctgttcttattttctattgttagtttcacaccatttgagaggcactggaaattattaagagcatgcactcaggtcctgggtctgctactacttagctgtgtggccttaggcaagttatttaacctccatctccaatttctttctgtgtaaagggaccctcaataaaccctaccttaaaaggtttttgtgagggttaagtatcatgtacacaagtgcctggtacctattttagtgagcaaaataaatgcacttgtaactttttagttacaaggtttcctttgagtaagcaagcatgtaaaaactagatgtcattagttaccttgtattttataatttatcctggcaactttagttccctgaagagaaagtagaaaattaaatgtcaaataacataacataggtgattgtgttaaatgtcagaatatttaaggaataataatgttgtaatatacaggccagcgtgcatttgttgcttgctggagtagccaagttttatttctgacaagtctgcagttccagggagcctctccctcgctgagtaactgtcacctatccatctgtagatgtcagagagagtttgctgtgcatcccaagtatcttagaattgggtagaagtttagctttaattagtccgaccttgagtctagcaacaagagagggaacaggcagtgaagaggtcgtgactgacgtcccagcagcaggagacagggagtgtcattatcattcctggtcttctcacagtactctgaatacagagagtgaggaagattagggggccctgtctgctgactccgtgatgatctcagaccctctctgctctttctgaatggtggcctgttaattctggcatactcttactgataatatatttatccttttcactgtgatttgcccaattgttgctttagctctggaccttgtcaagaagttgttggtagtggatccaaaggcacgttttacgacagaagaagccttaagacacccgtggcttcaggtgggtgtgggacagtgcctgctagcataaaatacatgggaagccctgctgcctgagagacatgagacagaggacagaaacatgtttactttgttgagtgtttaatctaattgttttagatgtatggggggtatcttggaggatgggttacaacctgttttatttttttttttgagacaggttcttgttctgtcaccctggctggagtgcagtggcacgatctcagctcactgcaacctctggcccccgggttcaagtgattctcctgcctcagcctcccaagtagctgggattacaggtgcatgctgccatgcccagctactttttgtattttttgtagagatggggtttcgccgtgctggccaggctacaacctttttgatattactcatggctgttggatgtacacgctcactttatgtcctgttctggttccacttggctgccccga

SEQ ID NO: 103046 - DNA, 1049 bp, Homo sapiens
ctcatgaggctgaggtgggaggatcacttgagctgaggaggttgaggctgtagtgagctaagatggtgccactgcacttcagcctgggggacagagtgagaccttgtttcaagaaaaaaaaaaaagagaaaagaaaagaaaagaaatatggcatagtatgttggtgtttgttcatttttatatgctatttcagacaatagttttttcaaagacaaagtctttgcattgaggaataggttaactcacataaacagatatatatttgtatcacataaatagatatttacaaatatatatttgtataggttccctttaaaaatattctcaggactgcaataaccaaatatatcattttggtggaatttttgtgtttatttggtatgttctcaaaacattttctgttacccatttgaatttttattgaaattgacaccttacatttctgctgtgtgaagagttgtttattatcttaaagtgaaatgaaaggttaattgttctaagttgcttttttcatttccctgctttttaaagatcttctcaaacaaatttgtaaactttaccccaacagttttctatgattttggagaatatggttgtgtgtatcacggcttacggtttcacccagctgtgagatgtgtgtgttggtaactttgattctacttaagtatctactgcatgaatctgagggtcatgcctgcctttctgtgtagtaccttcatgaaaacggtattatacaccgtgacttaaagccagagaatgttttactgtcatctcaagaagaggactgtcttataaaggtaagaaattggcattctgtatgtggctattcctgtagattcttgttcagaaacttttaattcctcaaataaaaagtgggagcgtaaaaaggatgagaatctgaccctttcactgttaccaattattttagagatcaggtgatactgctcttatccagattcgaatgagcatttattgagctctgttgtgtacaagtgacctttgtgcttagagagagaggaggggtctaaatggacgagtgggctgggtat

SEQ ID NO: 103047 - DNA, 1072 bp, Homo sapiens
acccagctctcaatgttgaaacagaaatagaaattttgaaaaagctaaatcatgtaagtattattatatgactcatacttagatttatctatctcaaaatatgagaagagtataaagcctttcagtataataaagataatattggccaggtgtggtggctgatgcctgtaaccctagcactttgggaggccgaggtgggtgaatcacctgaggtcaggagtttgagaccagcctggccaacatggtgaaaccctgtctactaaaaatacaaaaatttagctgggcatggtggcacatgcctgtaatcccaactacttgggaggctgaggcaggagaagtgcttgaacctgggaggcagagattgcagtgagccaagatcgcgccactgcactccagcctgggcgacagagtgagactgtctcagaaaaaaaaacaagaaaaattaaaagaataaataaagctaatattaacctgggttctttaacttatgtgtacattcacacacatgcctagctgtcatttagctgggaagagttttaccccaaaatgttactgagtgaacaataccgtataaagatttcatgattaaataaacaaatgatatttcttctgagttagttcttgaccaaaacatatagcaattattctatctcatagacacaactggttatattagagaagacagtgttaattttagtaaatttggtttagttatacctgaagttttaccacttttgaataccttttatttggagtaatccaaataaatccaagggtatccattaagtatgacaacatcctgtccttatatctgattaaatggtgtctgtggcctagttcttatctttttgtgcaatgatgactatgtctcaatgaaaaatgtgtctcacttttaaaaagtgagaagaaaaattagagggtgggcttaatcttatcttgcttttttttgtttttttcccgtttcttccttaattcataagtgcccatgaaggcataagctcattaggcaatggcattaaactcaaggcaagatctctctcctgtccagctaatgatgatcttattctggcat

SEQ ID NO: 103048 - DNA, 1137 bp, Homo sapiens
tgtattttgcttttccacaaatgcattatagcatagacttttgcctaatacatcctttttgatgactgagttttcatgtcatcaactttattgtaatttacttaaccatttctctggctgatcatttaggtaatttcttattctttgctgttctgggtaatatggcagtgagtatccctggtttatggattagccatagatttttaaaattttaattaaatcattgaaatagcctttctttatagcagccatttattttactactcttttgtaatcaacatttactgtatgggagagatggccaaatgcattggtctttccacatgtgactcaacaaagtaatgtaaaacacagcctctaatcacattttccctagtggccagctgtttctggctattatactttcacattctttaaagatcaattttttttccccctagacaatgccattctcacatggcaagaggaatttcctttttgtgttcactttgttatagatcttttcccctatgattctaagatttgtttcccattttggggagaagaaaataccaactagattgttaaaaactgggagtaaaattttacgttttgatttcattatttgaatcagattggacctttgtgaccatcctgttatcagagtataccctgacttggtaatgagtttagcggcttacaggaagaggcaggctcttaaaattaaacatctgggtttcttagctgaagttcattttacataaatatgtaattctatctcctctttgcttgtggagggtgtagcccaggaagctgagttacttgattcatccttttggaattgtaacagaacaactttagtaccctgaagcctcctcttgtcagagtctcagtaaatatgcgaggctgctgttgaagttggaacctgtatctgctctattagcagaaatttgacttcacattttctttatatagtttaattgaacaccttcttgttcatgttttttgtttatcattttaatgaataaaaatagttccatagctaataagtagggtttactaattaaaatgaacacagtggaaacacacttgtttctgactgtggagactagggcaagtggcttctgttttctgagccttggttgccccatctgtaag

SEQ ID NO: 103049 - DNA, 1562 bp, Homo sapiens
gtgatacttccatataatggaatattattcagctgtaaaaaggaatgaagtaccacaaatgttatggcattacgctaagtgaaagaatccagacacgaaaggctacatattgtatgattacatcaatatgaaatattcagaataggcaaatcaatatttagagaaagtagattagtggttgccaggggctgggggctgagtgctggggacagggtagagtgaggagtgactgcttaattgcttaacaggtacagggtttccatttgagctaatgagaaagttctggaattagatgctgatggttgtagaacattggcaaatgtacttaatgctactgaattgtacactttaaaatgattacagtggtaaattttgtgttatgtatatttaacacaataaaaaagatgtcttggtaagcccctcaactcaccccttcaaaacccacaatagttataatagtctacttcataatgggtaattgatgccctagtagccattatcttgggctgacccaagctttggaggacagatcctactcaggattaactgtgttctgggtaatggcttggagagcattcctcctccatgagtagtatcccatttaactgcaaatctctgtgagaggttgctgaaagtaggctgattgtgtaatacgtttggtttcttaggtaatctgatttgatttagggtgcaacttatgtcatcaactgcttatgcacttcctttgaagatggagaataagaaggaaagaaatttatccattaaagttattcatttgcagattctgtttaccgttatttgtttgttttgggcacttatttttgaccagggaggactgtttctagttaatgtttttctgacctctcggatacgtagtttctctctcatttttctcttagtatctttctgggaatttcacaatccagggctacagtaagacccatgtttgtattgctgggctcagaaatggaatttggagctgacttagtgtttttggctgttaagcccttgacattttacactggtgaagtttcactgtgtcctctgcaaacagggacaatggaaaggctgttatatggaatgtctgtaaattctaatacttgaagtggacccaggagtggtaggtctcataattaaaaacattcagacaatcactatctttgtttttccctctagtggtgcctgtggagaggtaaagctggctttcgagaggaaaacatgtaagaaagtagccataaagatcatcagcaaaaggaagtttgctattggttcagcaagagaggcagtaagtaccaataaaaggctgatcaccttttattaacacgtcttcataacttcccaaaataatcttagattgatgatttttaaactcaggaataaccccctgcttagatggatgaatttgtgagtatcaaagaacatggaaaattttggggcatctttgattaatctagaaacttttacttatagataatttggttccaaaagtatttaattgtacataataatgagcatagtgggaagtttttttttttcttcttccaagttcaaagtcgttacaa

SEQ ID NO: 103050 - DNA, 1008 bp, Homo sapiens
taaaagaattggacaaatgtaagcttttatgagccccccagctcaattttattgctttttacttatttgtaaccttcagataatttgtttttccctgtagtttatggctgtcagataaaaaactgatctggtgacaatgatctggtgaaaagctcagcccagaagaactataggtctgggctgttaggacttttaatttttggagagcatgtttgccctgtttttttttttttcttttcttttgctgttgtaataggcccatcatttactttttaattttaagtcttgtgccttgaaactcacctttgttgttggacactttctttttgaggtcgtgatgtctcgggagtcggatgttgaggctcagcagtctcatggcagcagtgcctgttcacagccccatggcagcgttacccagtcccaaggctcctcctcacagtcccagggcatatccagctcctctaccagcacgatgccaaactccagccagtcctctcactccagctctgggacactgagctccttagagacagtgtccactcaggaactctattctattcctgaggaccaagaacctgaggaccaagaacctgaggagcctacccctgccccctgggctcgattatgggcccttcaggatggatttgccaatcttggtaagaccctttgttgtatagtatcacgttttgttcagaaaaacacttacagaaagttgtattaccaggtggaaggttctgattggagttgtccaggtttttggcacgttgaacaaataattgaacatcatgcatgaacaagcaatgaaagcatagatttattgaagtggaaggcaatagaagctaaagtacatgtcacaggatgggagcaggcctgagcaagtggctgcagagcccttgtagcaaagtcttctggggttcaagtaccctctagaggtctcccactgtttacatcctatgtaaatgaagtgctggctcacagcccattagaggccaaagtgaattggagctc

SEQ ID NO: 103051 - DNA, 1033 bp, Homo sapiens
acctggagccgcacactctccgcagcctcagccagcagagtggcgctaaacctgcagatacaaactccaccctcagccaatcaaaaccccctcccctgccgccggaccaatgaggagcagcagatgtggccgtcaggcgccgcctcaatgcctcctgggagttgtagtttagaagggagagcggaacttagaacccgggttcccctcgggtgatcccgccccctcgactccccagccaatcagcaacattagtctggttagacgctctctttgcttttccccacgagtgaccacggctagataggccgccggccagatgtggcgggggagagccggggctttgctccgggtgtgggggttttggccgacaggggttcccagaaggagaccgctaagctgcgatgctgcgtcgcaggcgggaagcaattatccccgctgttggaactgcggcggcccatggggccccgggcgggaggacaggttcttctgcccacagtgccgagcgctgcaggcacctgaccccactcgagactacttcagccttatggactggtacgagcgacggtttcgggaaacgggcccgggcgagagacacgtcgaggtctggcctgcgagaggggaggacggatctggctggcggaagagaaggcgggactgatgggggggcggaggtctagagagcaggcgtgagagaagtgtcttgatttctcaggaggaaattgagaggcggggactgagggaagcaacgttgaggtgtggagaagggagacgaacgggactggaggggcgggcgctgaagttagaggaaataggggggccgaggctagaggggagggagatttgaggggcggtacctacgggaaagggaaggagaagtcgaggggcggaacttgaggaaagggtacttgaggggcagggcctgggagactggaagacttgaatgaatagggtgagtaaggtttaaagttgggttgatgtatttaagaaaggactgcagaagtgtgatccgagattagggagtaaagcatgaaaa

SEQ ID NO: 103052 - DNA, 1083 bp, Homo sapiens
gctggtattacaggtgtgagccaccacacctagccaacttttggtttctttacttcccacttgacctttccagagccaaataagcaggaatgactttaaggtcccacattgaacacttactgtctgaacaggcagaatcttacaggtgcatctttatttggcaaagagcagtagaagaaaacagtttagtgtggctgtgagaatagcaggaaaaatacgcagtattttccatcttgttactacacacttgtcaaaaaagctagttttttaaatacaaaaacttgattggagataggaatgataaacatttcatttatattagttgggattttcattgaattttttttctttttttcagttgtccagtaagaaagaaaaggataactgaagcagagctctgtgctggtcctaatgactggattctttgtgcacatcaggatgtagaggggcatggagtaaatcccagtgttagtggcctttccatacctgggatattagatgttatttgtgaagaaatggatcagacaactggagaaccacagtgtgaagttgcccgaaggaagcttcaggagattgaggacaggtaaatgggcagtgtatatagctggttttttgctgttctcttgtaataactctgctcatataagctagttctgtttatcatttggtgataccttgatccttagcctctcagaaagactaagtcagataattcaaagtgtattcgtttttgtttttttgttttgtttttttttttttttttttttttttttttttttgagacggagtctcgctctgtcgcccaggctggagtgcagtggcgggatctcggctcactgcaagctccgcctcccgggttcacgccattctcctgcctcagcctcccaagtagctgggactacaggcgcccgccactacgcccggctaatttttttgtatttttagtagagacggggtttcaccgttttagccgggatggtctcgatctcttgacctcgtgatccgcccgcctcggcctcccaaagtgctgggattacaggcgtgagccaccgcacccggcctgttttgttttttagatggagt

SEQ ID NO: 103053 - DNA, 1027 bp, Homo sapiens
ttcgttaaatgaaatgttgaacaaccctctgagtatagtttttttttgttttgagacggagtcttgctctgttgcccacgctggtgtgcaatggcacgatcttggttcactgcaacctccgcctcccgggttcaagtgattctcctgcctcagcctcctgagtagccggattacaggcatgtgtcaccacacccgacaaatttttctatttttagtagagatagggtttcaccatgttggccaggctcttctcgaactcctaacctcaggtgatctgcccgcctcggcctcccaaagtgctgggattacaggtgtgagccaccacacccggcctgagtataccttttatactcaggtatagcctcattttttgcttgttctattgctgtattacttactgcttttatccttttttatttttaaaattttgtccaaatactagaatatataatagcttgactaaatattttttctttcttctgctgccttaattgatttaggataattgatgaagatgaagaagttgaagctgacagaaatgttaaccatctccccagtcttgtcctttctgataccatgaaaacaggtttgaagagggaatttgatgaagtttttacaaagaaaatgattgagtctatgtaagttttggtacctgatttctatttaattatgatcttggagggaagacccaatgtctagattctgcccaccctgtcctcattagctctttttatctcctgatccccaggcaattggagattggctttttcctagttcattaggggtgagcaaagtgctttacaagcaggagtttgaagtatggggaagtggctgccttgcctacttactctttggttcctttgaagacctgaaatggactgcagtctgctatttggaaatgagatgactggcaagagagcccactctcaagttcctgtgatacaggaaccacattttaaaggctcttgtttacctggctttctaagtgacccaggaacaacactgcggcctaggaaaaaaaataaag

SEQ ID NO: 103054 - DNA, 1013 bp, Homo sapiens
caggcgtgagccaccgcgcccagccaagggtatctcattattttatgttttatttttgcttcgtctttgggcccatacaccatccctgccacagtgtgtgtgtaacatagtcattttgccttaaccatgaagcttgttttgttttgttttgttttgtgttttgagacagggtctcactctgtcacccaggctggagtgtagtggcatgatcacagctcaccacagccttgacctcctgggctcaggtgatactcccacctcagcctcccgagtagctgggactacagtcacctgctaccacacccagctaatttttgtattttttgtagagacggggttcaccacattgcccgggctggttgcaaactcctgggctcaaaccatctgcctggcttggcctcccaaagtgctaggattacaggcatgagccactgtgcctggcccataaagcattatactttgtacctatactaaaaggcatctgagatactttcagcatgtttgtccagtgtttccttttcatttataatgatttagtatgagctagctgcctacatgtaatattaaccacaacttaaaaaaatttccaacaatcaagggctctgcgttttcatattggatttttaaatacttccaatcacagcatcattacaaccacttgatttggttaaatatacatgttgaagtgtgcaatgttatgtatttgaggggcctttctaaagatcagttggagccaggcatggtggtatgtgcctgtagtcctaattactgggaaggctgaagtgggtagattgcttgaccccaggagttaaaggctgcggtgagctatgactgtaccactgtactccactgtggacaacacagcaagaccccatctcttaaaaaaaaaaaaaaaaagaaagtaaagatcagtttgtgtgttctaaatctcctgttttgctatcatcagtccttaagatactaggtaatgttggcttttcaacctacagcttttgttttcatgtcctaaaatt

SEQ ID NO: 103055 - DNA, 1013 bp, Homo sapiens
ttgcgtaattgataagcccagttattcagtaatgtttacaaattaattgactttgatagttaaaagattatgaggtaacccatctgcaatttgcctgtgggagaagcatcctttagttcatcttaaggaagtgctttatcagctaaacccaacattgataactttggtaatttttttaaaaagttatacttgtattagcaagtttttttttttttcccccaccgcaacctccatctcccgggttcaagcaattctcctgcctcaccctcccaagtagctgggattacaggtgcccacctccacgcccagctaatttttgtatttttaatagagaccggttttgccatgttggccaggctggtctcgaactcctgacctcaggtgatctgcccaccccagcctcccaaaatgctgggattacaggcgtgagccacggcacgcagccagcaagttgtttttaaatgttaatatagaaaacagtgaaggattagctgaaaatatatgagcaggtgacattgaggtttactgaaatagccaatttgactggtgcttagactattgtgcagtaaacctaaaaggtagtggagaattgcttcctgctagcaggaagccttcatcttcttgagtacccaaaccaggcttcaggtgtcctttgaggatagccaggtttgaaatttttagtttctcaggaagagctcttctatgtggcaggggctgatagggcaaaataaaatgacaatttctttattgctacagagtatcctctataagttattaaacgagtgtaatggtataatgcccttccatcacacaacaggacaccaccccagttttgttttctgggtttcttccccctttgtaggaatcagataccttttgtagaaaaaaatggcttatgccacgtaaaggtgaatttttagaaaccaccttctaggcgtttttggaacccttactgaaatccctccccttgttacagatggcgtagaagtcacaagtctgttaattggactgtt

SEQ ID NO: 103056 - DNA, 1067 bp, Homo sapiens
tctatttttttttttcttttttaaatggagtttcgctcttgttgcccaggctggagtgcaatggcacgatctcggctcgctgcatcctctgcctcccgggttcaagtgattctgccgcctcagcctcctgagtagctgggattacaggcatatgcgccaccacacccagctaattttgtatttttactagagatggggtttcactatgttggtcaggctggccatgaactcctgacctcaggtgatccgcccacctcagcctcccaaagtgttgggattacaagcgtgagccactacacctggcctacaccaaaggtattctataatccactttgccttgctgcttgggattctctgaatcctgccttttttctactcattcactttgacctccccagagttagtctttgtaagttgggaacatagcatttaaatgctaaattggcatagaatgatttcatctactggcataggtgaaatttttataaataagtaaagtcctgtaaaaccttgtaagatttccaaggaaaagatgctatgaaggatgaggaggttatcaagtctttgggagttgtattaatatcactaggattttttcttgaagaggtttatttatttatttatttatttatttatttattttttgagacagagtctcgctctgttgcccaggctggagtgcagtggcgcgatctcccctcaccgcaagctccgcctcccgggttcacgccattctcctgcctcagcctcccaagtagctgggattacaggcgcccaccaccacgcctggctaattttttgtaattttagtagagacagggtttccccatgttaggcaggatggtctcgatctcctgacctcgtgatccacccgcctcagcctcccaaagtgctgggattacaggcatgagccaccgcgcctggccgaggtttattctttgatgaaacaaattcttgagtaaatataattctggaagagattaaaacccttccaaagtggattaggagataataactaactaactttccagtgtttaggatggtgcctagcatatactaaatgctta

SEQ ID NO: 103057 - DNA, 2997 bp, Homo sapiens
ctctgtgaaggtaatgttcaggacaaatttcaagaaaactagaaaaccattctttacagctgaaatctttccctaaccattgttatttccacttttaagtcctcaagagatgagaaaagggaggtaaggcttccttatacatttcctgcacaatgaaacatttttcctcctccaggcaaagattcaagcagaactggcaaatatcttatcttgctcttctcaataataataatgttgttagataataaagttctatagcaatttaaccctagaatctttttgaaaagtaattctttaaagttgagaatcacagctgtctagcaagcatttccttgggcacttgaagctgtttattcactttggtctttcctcccaggggaatgaagtgaggccagtggccgggtctgctgagtccgcagcactcagactacgtgcacctctgcagcaggtgcaggcccagttgtcacccctccagaacatctccccatggattctggcggtattgactcttcagattcagaggtagggatcattctgacttattaaagagctatataaccagttaattccatctgtttgatgcttgacatccctaactagacagatgagggttgaagttagtttttggtggggttggaggtgaacatcaactaccttcctagttccaggtaatatagaacatggagtgaagtgtagataaatgggtctggtgggtcccgaggtcatcttatcacataatgactaatttacattatggaacccagtacaaagtgttccagttagattttccattgtattctgacagttgtacttcatttaatttttgcctcttacagtctgatatcctgttgggcattctggacaacttggacccagtcatgttcttcaaatgcccttccccagagcctgccagcctggaggagctcccagaggtctacccagaaggacccagttccttaccagcctccctttctctgtcagtggggacgtcatcagccaagctggaagccattaatgaactaattcgttttgaccacatatataccaagcccctagtcttagagataccctctgagacagagagccaagctaatgtggtagtgaaaatcgaggaagcacctctcagcccctcagagaatgatcaccctgaattcattgtctcagtgaaggaagaacctgtagaagatgacctcgttccggagctgggtatctcaaatctgctttcatccagccactgcccaaagccatcttcctgcctactggatgcttacagtgactgtggatacgggggttccctttccccattcagtgacatgtcctctctgcttggtgtaaaccattcttgggaggacacttttgccaatgaactctttccccagctgattagtgtctaaggaatgatccaatactgttgcccttttccttgactattacactgcctggaggatagcagagaagcctgtctgtacttcattcaaaaagccaaaatagagagtatacagtcctagagaattcctctatttgttcagatctcatagatgacccccaggtattgtcttttgacatccagcagtccaaggtattgagacatattactggaagtaagaaatattactataattgagaactacagcttttaagattgtacttttatcttaaaagggtggtagttttccctaaaatacttattatgtaagggtcattagacaaatgtcttgaagtagacatggaatttatgaatggttctttatcatttctcttccccctttttggcatcctggcttgcctccagttttaggtcctttagtttgcttctgtaagcaacgggaacacctgctgagggggctctttccctcatgtatacttcaagtaagatcaagaatcttttgtgaaattatagaaatttactatgtaaatgcttgatggaattttttcctgctagtgtagcttctgaaaggtgctttctccatttatttaaaactacccatgcaattaaaaggtacaatgcagcatccttgtttgatttcttctagggccgtaagtcttgttttctctccagatgtttatctgtgtgctgtggtaggaattaatccaactgaagtgagcctaacgctttttaaagtgactgaaggcttttccaccttaattactgcctgctttaattctggactgccataagtgatataagctataatttgagcagttactgtctttctgagacagattcttgagcctaactgaccaatatcacagctagtaagtggaagagctagaaccctaaccactatttgctacaccatcttataaatgttaaacaaggacacaccatcacatatcgagattctcttgcccttattatgggaattaagagcattttctagactgaaactccctattttcaactctgccactggtaagctgggtaacccaggggttatatataatcacttatttcctcatctgtaaagttggataatggtatctctaaaggttaagattcaaagagacgatgcattataagcatttagtatatgctaggcaccatcctaaacactggaaagttagttagttattatctcctaatccactttggaagggttttaatctcttccagaattatatttactcaagaatttgtttcatcaaagaataaacctcggccaggcgcggtggctcatgcctgtaatcccagcactttgggaggctgaggcgggtggatcacgaggtcaggagatcgagaccatcctgcctaacatggggaaaccctgtctctactaaaattacaaaaaattagccaggcgtggtggtgggcgcctgtaatcccagctacttgggaggctgaggcaggagaatggcgtgaacccgggaggcggagcttgcggtgaggggagatcgcgccactgcactccagcctgggcaacagagcgagactctgtctcaaaaaataaataaataaataaataaataaataaataaacctcttcaagaaaaaatcct

SEQ ID NO: 103058 - DNA, 1011 bp, Homo sapiens
tctttaaaggaaattgtttcttagtttatcactctgtgataagcgtcttgaatataggagtcaaagttcagaacttggttctatttctgacttcaccactaatttgccataggctctggtgaatccctttccctctaccgaccttgccttcctctactgtgaaataaagtgttgtgatttgaattaagatctttgagatcaactctttgcagctggaaaatgttacgacttgcctagtgtgttgttcctgtttctagcactagggggcaatacaagcagcaccttgcaacacattctgctgttaaaattcctgcagtcaggttagagttgatgcagaaagatgattgctctccgctttggttctcccacctcttctgaaactgtaagctcacaaatttgagccttctcccagactagtgagagacagaaactttcatcaaagggaacaggactggctggcccatgaaatcttggctccatcacttttgagtctgttgtggactatgtatgtggttagggagatggcatgtggctaatacattgtctgtgagtgacaaatggacaccccaaaggaggaaaactgaggtgtagacttagattttgttcagaagagaaaaacaatttagtaacaccatcttgctatgatgttggactgagatcagtatgtggttggaaggtccatggaggctgtgcatagacagcaggatccatggccatgaaccctaggagacctgcattgaagtcccagcttgtccaataaagtgctgtgtgaccctgggcaagttacttcccatatgagaatcaaccttctacctacacaagtaggagggacctatacatagccaacacataccccgtatacattcctaccttgaaataagttacattctaaaagaggaaagacttatgtgcattttgttgtgtgttttatagcatgtactatgttggatcattacttcttttaaggaaatttttttttttttgagatggagtctcgctaattcacgccat

SEQ ID NO: 103059 - DNA, 1067 bp, Homo sapiens
gagcggaagctctgggtggtccaaatgtggtaatagagatctgtggatttttttcaagtgtgttttctgttgcacgttaaattttttttttcagctttaaaatgtaaccttggtaagttgtttactcaagaaaattcttaatgagttttctttctttctttttgtctttttaacattttgggtgtggtagcaagtagaagcagattcatcctaaccaaatatttgcaaatatctgaacaaagctattctggccagggaaggaagactccacggaggaagtgggaattggatctggcttttgaaggaggggttcaattctcagaggactagatgaggaaggaaaaggcatgttccaaaaaggggcagggaattaaaagtttattttctgggtgactgggaacctctgagcccttgagcacgtgccttagatatgttagtttggcagccagcagtctgtgcatagagggtgataatggtgttggactcctctggcctgcacgtggcgagactcaaagtttccagacttcttttgggggcggtgtctgaattacagtctccggggctgcagaaagatgaactccatcagaagatcctcaaggtcttccccactccttcagtgcagacttcatacagagaaactgtctaggcgacacctgtgcaagaactggacacgacccaagctgcaaactgcccctgaccatcccggccttccccgttcgatcctggaggtgggggtgggaatggagcgcccagagcgggcgatcaagcttcctgggaactgtgaattggggcgggggaagcaggaaggacgaggcctttccagaccaaatggccctaactcctgcaccggaccaggacgcgtggcgcctccagagaggacgcccatcgcccggagcaggttgcggtcccggttcccgccgaactctagcaaccgcgaggagaaatgtctgccgtagggggcggagcgcagcgggggcggagcgcggacgaaggggcggagcgaggacgaaggggcggagtagaaacgacgggcggggggcggagcgagaataatggggtggagcaag

SEQ ID NO: 103060 - DNA, 1937 bp, Homo sapiens
aggctttgcttttccatccatgcatgttctttttgggtgcggccaggtttgtctgaagggctgcacaacgtcgggttcttccccggaacctgccgtccgcctcacctgggcgccggtgacccttctgcggggctctggacaagcagcagcaggcaggggaggaggcggagctggtcgaggagtggggatcgggggttccctggagtggcgatggaaggcagccctcgctgcatgcttcacattacagagggtgggagggataccgcctgcccgtccctcggccaaagactgatgcgaaggacctgcaaatggggagatggcgtatctcactgacaggacctccaccttggaccaaatgaaagagatctacattccaaaggaaactggctagggagacctttaagccgtgcctactctttggaggagggactctcaactgaagcttctgcggatggttagctgggtggatgtcttcccgcttccttggccgtgattttatcaacttgttactagacagccagcgcactaataatggcagttaatatgcgcgcctcggatgggggcgattcgtaaaggttggcttgtctttgaatctttggggtgatcggatgtctgcagggcctaagctttgtgggccttctgtgctttactcttgggtgagttatgaatgaaaagaaggggactccatggaatgattgcatagcagcccgcagcgtagacagcctgttccgtggtgtccttttccttccttgggtgcagactcaaagccctgccttcataggacagggagagctgtgcagcttgactccgtagaggtgtgcccttacaaagctggaggaggtacccaggcccatgcgattaatcagcagcattgccttaccgggctcttatccccatccgaaaacttctgtagggtaaatagaagaggaaactccttcattgagccctttgactatctatgttaatgcttttggacttaaaaaaagttgtaattatgatctttataagttttagagatgatgctttgctgaagattcctaaacatttaagtcttgctccttggcaacttcttgtctttctttgaggctttcattgtgtcctgatggttttagaaatgtttgatttacagccttctaaaaaaaaaaaaaaaaaaaaaaaagacgctctagcgtggcacttgactttttgaaggagacttttgaagtttgcagtttttatctgcaatgttttaacgtgtcactctttctcaacagtagtttgtctggtgagcgagctatccattatgaggagtgttatgctttggagataatcttgggttcaccatttaatacaaaattagcagtttaaacaccatttgtaactattttatccttgtgagtagagagataatatgtgaatttggcagaaggaatctattctcttctgaaactttttgaagtgcttatctaactcttttgtagtccattagcctagccaaaaaaaaaaaaaagtcaatagttgctaagtaaagtgacttaaatggtatttaataagtttacttgttaagcaatcactaataggtgtccttaattcccttatagctgcagtaatgttggtgagtttatctgagctgtctgaatagtcatttcatggtgcacctcgtatctttagtaactttattgtggtagctgacttgttgaacctccctgtttctgcggacagagtgcagtgtggctttcagggatgtgtgtgtacaaaggctagcatgcttttatgagttctgcaaatactgtttgattgaaggaattggtgtggaccttgtctggcagccctgaaaaagttttttgtaaggaaggctgatgatgttttagggccgctgagagggaatataacattttcttttggtgagaaatgagaaagcagaaggaataaattgctgtccagctttggattaatca

SEQ ID NO: 103061 - DNA, 2441 bp, Homo sapiens
tggtggtgtgcacctgtagtcccagctatttgggaggctgaggtgggaggattgcttgagcctgggaggctgaggttgcagtgagccatgattacaccactgtactccagcctggacaacagagcgagacactctctcaaaaacaaacaaacaaacaaaaactgtgatttgctgcttagtgttttatcgtctcagagcagagttcattttcctataactaaagctaaatagtagcactatagcattgcttttgttatttccactggggttctgtagcagttttatttattcatggtttaggggagaaaaaacctgtttaggagtgtcacctttaagaattctaagataaggaattcgtttgtattactgatttttaacccccctccttattatatgccaacgaagagagagagagagagtgtgtgtgtgtgtgtgtgtgtgtgtgtgtgtgtgtatacatatatttgtatagtagataccttatcatagtctggtttgcctagataattctaactagagtacctgttcagtcatttccatgggttagggtaggggaagcctagttaagaattgtgtcagtttgtcagtgtcagagagagagagagagtgcaagagggagggaggtagtaattcaaaccttaggattcgtcatcaggaatcttggttcttctcctttgcgttttaggcttaaataactatcccaaggtcaccaatgtaatctgaatgaagaattttttttttaatgtctccatctgtgaaagttgtggtgaaaacaatttgtgggtatgaaatgctattagttacttttattatcttatgtatttatgcagtattaaagcctgtttgcttgtaagagtgtcaggcatacagtttgaatgctggagaaattaattacacttctcctgtagttctgaagtgtgggactttaaagggttcttagatatattgatacatatttcatctttgaaccaatttgttgctgttaatgagatcattatctgaaactttcagacttggctgtgcaactcacatggttggtgatgttaaataaaggcccgattaaacaccggctagtggtatgtggattggttaaacaaagaaaatttgcattgctagagatgaaagattgttttaaagtcgaaatgcattttttttttgcttgaagtcaaatatttagaaaagcttgagaaattcatttgtagaaggaatctgaatgacaggttctgtgtaactttaaattcagcctttctgggtcctaggttaaatgctgaatggacttgaaaacagagagaagctgaggacatttaagaactaagtcagttcctttagctattaggggtgggtagagagctgggtggtgggttaaaagggctgatcaaggtccttaaatatccgatgttaagtaaaggtatcacagagagtaattttaggaaactaattcctctgctttgtttccctgtcagtgtgcttctgcagtttagcatttgatcaaacactttcttttcatctccattttaagttaacttaacaggcctgcctctaaaaattgacttggtctaatagaacaattgtgtgctgacagctgacctggatttagacagaaagggattgcctactgtcttctcagatgggccttcataggttaaaaccaagcatttgattcagggggaaaactggggctgtattttgtgatgttatacattcttagagccccttattttctattttgttccctgagatctcatgggagttactagtacaattctgaataggaatgaaattggagttcagtgtagagctgtagattaaagggaaagtagtgatggtttcctcttatttatacagagcactgccaagcatgtcatgttttggttcttctcatcctgacactaacatgcaattagcaactattgttaatccattttacagaggagaaaaactgaggctgagagaagcaagttgagttctctaacttcacatggctagcagatgacaaacctggattgaaacccaggtctggccgggcgcggtggctcacgcctgtaatcccagcactttgggaggtcgaggcgggtggatcacaaggtcaggagttcgagaccagcctggccaatatggtgaaaccatacaaaaaaaatacaaaaaaaattagccaggtgtggtggcacatgcctgtaatcccagctactcaggaggctgaggcaggagaattgcttgaatccgggaggcggaggttgcagtgagctgagatcacaccactgcactccggcttgggtgacagagcgagaccccgtctcaaaaaaaaaagaaacccaggtctgcctgggttgcttgttcttgtttttgccaagtgaacagaacttggctggttaggattttgacattaattcaagtctaattttgaacaacatataatataggggttcttaacctgagggtca

SEQ ID NO: 103062 - DNA, 1447 bp, Homo sapiens
gaacggttaccttacagtacagtggggcatgtcctatctggtaggaaacagcctataggatactgaagaacacctgggggagggaatcgggccctggtgctaagtttagacctgtctgtcactgtatgagcattctggccttttccaactcatttttacctacctttgaggttaaagctgataacctctttgaagagaggtgcctttatacctttctaacggaataggaaggaggtagagagtagaggttctttgttctatttgtagcttgaatgagatgttttaaaatctgactttcagtggctctgtttactcatgatagtgtcaaaagaataaggtcagctggcccattgtggttcaaaggagagcactttatttttattgcccttaagatgtgttgtaagacttgatattaatttcctcctctccccagcagccagtgtaatatagttgtttagaaactcagtatagagtttgattctgtgaaaacgaagtttgatcctagaattttgatgggaaaacgtatgttagaatggggacttctggcctcctggtgcagaagtgcctgcatttaaaaaataaaagagccggcgcggtggctcatgcctgtaatcccagcactttgggaggctgaggcgggcagatcacgaggtcaggagatcgagaccaccctgactaacacagtgaaaccccgtctctactaaagatacaaaaaattagccaggcgtggtggcgggcgcctgtagtcccagctactcgggaggctgaggcaggagaatggtgtgaacccggcaggtggagcttgcagtgagccgagatcacaccactgcactccagcctgagcgactgagcgagactctgtctcaaaaaaaataaaaaaataaaaaataaaattaagagtggggtagtactcaattaggtgtgtgtaagttcccatccagcactgtaagaattttattataacttaattttctacttgagttaatttggctttgctatcttgtcagcaaacatttattgaatgtttactgtagataccgtatagagaagaaacatcggttttatgcacccgtggtataatttgtgcttttcaaatgttatttttctgatttattcgagagtttgaggctgcagtgagccttgcagctaccagtgtgagccaccgtgccagcattggtaattttctttctttctttttcttttttttttttttcgagacaagttctggctctatcgcccaggctggagtgcagtggcgtgatcttggctccctgcaacctctgcctcctgggctcaagccatcctcccacctcagtctcccgagtagctgggactacaggtgcacatcaccacatccagctaatgtttgtattttctgtagagatggggtttccccatgttgctcaggctggtcttgaacttgggagctcaagcaattcacccgcct

SEQ ID NO: 103063 - DNA, 2125 bp, Homo sapiens
cagggctcaagtgatccacccaccttggtctcccaaagtgctgagactataggcgtgagccactgtgacccactgtatgtttctcaaaaatacaaaatgtcgtaaaagtgaaagtctatatattcctatcatttagtaaatagtaaaatactggctttttttttttttttgtctgccataaggatctgaattatgactaatgtctgcactgaagggaaggtacctggcgtggcatctgggtgcctcccttgtaggtgtatcagagcatgattcaggagcagcaggttgcccttgtattctgggcaggaacacggcgtctgtccaggcagatggccatgctcagaggcctcacggtggggaccgctgtgctgtcgtcacaccctgtggcagcagattgttgcccaggagggtgctgcttcagttgctggtttctgcccttcctctttcctgtcgagcaggctttctgcttctgaacaggctggattcagaaaggccgaatgaatctgtccttgaattcatagtgacactgtcagttggtggtgggcagagatgcaagttgagcccaagcaccagactctcaggggtgcatttaagcagcaagcatataggctgaaaacagcttccaggtattttgttcgatcgctgttaaaaatctagaaagtgtacataaaaatgggctcttctaaaaaaaaaattaaaagatctggcatcagtgggtccacagtcccatgaggcaatagcctgccatagtggagtggcagctgccccccttcagcaggtacacaggccctccagtcacaagtccttatcgcattgcccagcttacttccctcactgacagttccatttacagatgcctggccctgtagacactgtagctggccatcctttctgtctctggaagttccaaagttgaaagcttttaacttgtgcttggcaagtctcttttctctccttccccaaccaacctgagtgtgagatgtccatcagtggaccccatgagtctcaagttatgctactgaggaaggcccagctacccttgatgtgaccagagggctctttttgctttggtgtaggtgttgaaggctgaagtctggagccattggcctgtgccttcaggatctttgctccttctctctttttggctccatggtttctcaactctgagacttaattgtttgtgctgaagggcaccttgaaaatgctgtgactccggccgggcacggtggctcacgcctgtaatcccagcactttgggaggctgaggcgggtggatcacgaggtcaggagatcgagaccacgatgaaaccccgtctctactaaaaatacaaaaaattagccaggcgcagtggcgggtgcctgtagtcccagctactcgggaggctgaggcaggagaatggcatgaacctgggtggcggagcttacagtgagccgagattgcgccactgcactccagcctgggcgacagagcgagactccgtctcaaaaaaaaagaaaatgctgtgacttagctctccttttgcagtgagggaactgtgggcaagggcatctagcctttggtcttaagagctgggattagaactcagaacttggggttctcgggggaggggtggtctttctagaatggcattctgctgcgatggttgaattccagaaaatcttccatgtgcctgttgctttagggttcctggtgtactttcacttacagtatcttagttcatcctctcatttgggagtgccttttctggattctgccccagaaggctgtctgctgttcaggtggtctgaggcggagtcttgctctgtcggccaggctggagtgcagtggagtgatcttggctcactgcaacctccccatcctgggttcaagcgattctcctgcttcagcctcccgagtaggtgggattacaggcgtccaccatcacgcccggctaatttttatttttatttatttttatttttatctttttgagacggagtctcgctctgtcggccaggctggagtgcagtggcgcgatcttggctcactgcaacctccgcctcccgggttcaagcgattctcctgcctcagcctcccgagtagctgggactacaggcgtgtgccaccacgcctggctaatttttgt

SEQ ID NO: 103064 - DNA, 5303 bp, Homo sapiens
atttgacattgtgtgtttagcacctttatgggatttctggaatatcgctgggtacctggagacttggcatcttttcagaaagtacatcagtcttggagtaggtggtgagcagacagctaatggcatgtaaagaatgttgcaagcttgacttgcaaagctatttcaaaatttaaataaaggtagcttgtggctgagttgaagggaaatggtggtatcttcaagacaatgcttggcttgctctgcctcttgctgacttccctcttcaggcctgatgctgcccaagctgtttccctgtctctcattctctctcttttggtttttctttttctttgtttttaaaagagaccaagtctcactatgttgcctagactggacttgaactcttgggctcaagcgatccttccgtctcagccttccgagtagctgggactatgcaggcatgtgccactgcagtcggctctcacattctctttcttcccatcagttcttcccttcccttcagattcatccttctaaagtagtgtttggtcacatcagtctcttgatcaaaatctttcgtggcgtcctgttgcttactactgagctgtgtgaagaggtgacctagctgccccagtctctcattgttgcctccgggcgtgggcctgtgtgttgctgtccttgttcctgagtgggtcctgggctttcctctctcagtgcttttctttcttttttagggggatcggggagacagaatctcactctgtcacccacccaggctggagtacagtgacgtgatctccgttcactgcaaactctgcctcacgggcttaagcagccctcctgccttagcctcttgagtagctgggaccacagaaatgcgccaccacgccctgctaatttttgtatttttagtagagacatggtttcaccatgttgcccaggctagtcttgaactcctgagctcaagcaatccacctgcctcaactcccaaagtgctgggattactggcgtgagccaccgcacctggcctgtgcctttccttttggattgcctgctgtaatacgtgtcttcacctccacattttcaactcccgtctttgctttccactgtctttttcctgtcctagctcctcccatctgcagccaaactttcagtccttcccatgaagctttttcctgggttccaccagtgtgttcctttgaatcagagcactccatctccctattgtcttggatgtaaaacatgtaaattatttaccgaaccggaattctcctagatcacactactttgggatagcatagtgagagggatgtgaaaggggtgttaatgtggcctgcagaaaaaaaggcttggctttttttctctttttttaggtggggtctcactctgtcacccaggttggagtgcagtggcacgatctcatctcactgcaacctccgcctcctagtctcaaacgatcctcccacctgagcctcctgagtagctggctgggaccacaggcacacaccaccacgcctggctaattttttgtatttttcgtagagagggggttttgctgtgttacccaggctgctcttggactcctaagctcgggtgatctatgcacctcggcctcccaaagtgctgggattacaggcgtgagccactgtgcccagccaagacttgtttttttgagggagaattttctgtgattgtcgcaactatttgcaagcagctttcagacatggtgtgtcctgattattccaaatagttgggatagtccagactctcaaaataatttcaccttgcctgtgcttcctggaggtctggagaaaggagacagtaggaggtgacaccctctggctccttccagtctggcgtgtgcctgccctgggaacattgttcagaacatgctggagaagagaatatcacagcctgactgtagacttttggggatgtgttttatttaaatatgtaaaatataatattttggtgtcacttaaaacaccgggacttttggaggcgtagtagaagttctatgtagcttcagaatgacccatcagaaacaaatgtatatgagtctttacttacatttgtgccatattgcttccccctatatttttttccctttggaagctctggcatgggccttgatcctgtgtttaagcgctgtgtgggaagcagaatttaaaaggactgtagtagtatttctaaagagacttaacaggctacatgtgagagaattttagatttcaatttagcaaacgtttgattttctagtctttatggggctgactgtaagcatttgggaaattattgaattattgcttagttctgtataagttgacatgctgaggttttttttttttttttttttttttaactgtttttgtgggacagtggtgattacatgggcattgggactttcaggaatattccagaatctatgatatgttgtatttcacttgtgctagagggttttcaggctgccttttcatggcatgttcactccagaaatgctctaatgcccatcaataaatgtcaccctcatcctaggaattagatgaagagattatagttttgaagttttggtgttattaggcttaaatctctaggacacatataaacacacttgtggtattaaatgtgccgggtgggtgatttcaagttccagtggcagtggtaatttttgcatttcctgactcttgtgtttaaatttgcagtctcaacattgcatcactgtaagttttcacatttaatgaatatttatgttgagccaagttctatacgaatgtggtggtttctgacttgattatagcttgctgtgtactgtggccaggagtgccctacagacaacagagttggcacacgtctcagcatgccaagccccggcggatgtggttagggaccacggtgactggggcattggttgccataccaaccttgtttttggaagggaaagctctgaaacagcaatgggatgggggcagaatagttttgaatattccaagtaaacttattccctatatgttccctgcaagaagatgctatagaaaactataattcttactatgtgctcagatagcatgagttaattttctttcttttcttctttctttctttcttttttttttttttttaagacagtctcattctgtcacccaggctaaagtgcagtggtatgatcttggctcactttagcctcgacctcctaggctcaaacgatcctcccacctcagcctcccaagtagctgggaccacaggcgtgcaccaccatgcccagctaattttgtttatgttttctagagatgaagtctcagtgtgttgcccaggctagtctcgaactcttgggctcaagcaatagttagtttacttttgcaaggctgttttaattgtccttttgcaaaggtgtggaagttatatggtgggcctttcatgtgtgaatttcttccctacttgttggagggtaaacaggggatcttctatctcttcctattacagaccttcttctctcaactcctgccaacctcccttgccctctggtaactaacctagtgatgactgattgggggagggagaagggaaagaaaaacaggaaggataaatgggggactcctcctcccccagctccttatttatattcctcactttcccttataccaagatggggtttccttgctcctccctattgtatataagcaaagatcacagtcgaaggtgccatcacccataagtgggatgttagggtgccctgctcacgagcttcggcagacagaactgggatgagaggaaggaaacatccctggcatctcacactggaatgctgttacctctttgcaaatggtgccttgcatgattaattctatggtacttggtattgtgcagtaaaatgtctggaagggaattgatcaagtctggtaagccagatcagagcccagaatggcagagtgggatgtgacttgcaggtggcatctgctgttctagtgcctctttacagaagatgatccaagtctctggaagctgccacctgtccaggttcaacagctcaggcagtctgttgttgtggagggcttgtcctcaagcctcatcacacaaaaaaagtaaaaaccccacccctttgaaaagaaacttactgtttcagaagagggaggcagtccaatgatttaatctttgcttgctgacttggagccaactccccattagattgtaacctccttccgggcagggttggtgtttcaatctatttaacatttttcagctgggtgcggtggcttacacctataataccagctttaggaggctgaggtgggatgatcgcttgaggccaggagtttaagaccagcttgggcgacatagcgagactgttcctacaacaaattttttttaaaaaaattagccaggtatggtggtgcacatctgtagtcttagccacttgggaggctgaggtgataggatcacttgagccctggaggttgaggctgcagtgagctgtggtagtgccactgcattccagcctgggtgacacagcgagacctgtctctacaaaaataaataaataaataaataatttttttttaaatgcagaaaacatttcccagttcaactcaaagagcctctttgtttgaatttggaagagctgtcccttcctgaagatacctgaattctattttctgctcatcggtcataatgtgaatctaggatgagcacagatgtgaacggcacctcctagagttgtgcggtgcataaggccaacgcccagaaggcactcttccatctccctgttggctgacgtggcacctgagttgttcccccttctctaatgcttctccttcagcaattgtgatttgctgcttctgatttctgtagtcctaggaaaccagggaaccatgtttgttagaattatgtgtaaagttaggggacagagacatcaagggggtgtgtaagtagtttagtatgtggctgctttggctgcttttctgctttttgctggctcctctttagagatcagctgactggcgcatggagtcctcaaattttgggggcatgtaataaatgatggatggacctttttttttttttttttttttgagacagagtcttgctctctcactcagactagagtgtgtagtggcacgatctcggctcactgcaacctctgcctcctgggttcaagcgattctcctgcttcagtctcctgagtagccacgattacacgtgcgcaataccacgcctggctaattttttgtatttttagtagagatggggttttgccatgttgcccaggctagtggctaggcgttttatggtgcagaaatggcaccactattttgtgagtattcctaatc

SEQ ID NO: 103065 - DNA, 1026 bp, Homo sapiens
gagatggggttttaccatgttggccaggctggtcttgaactcctgacctcaggtgatccacctgccttggcctcccaaagtgctgggattacaggtgtgagccaccgcgcttggcaagttaactttcattcacctggtttgggtataagttctctttagttcttcaaactacaacttttagctgactgtatttaagaggagttgggaggacagagcagtagttttccactttgctacgcagacacccagcatttgccaggccttttttttttctttttttgagatgggatctcactctgttgcccaggcaggagtgcagtggtgtgatcttggttcgctacgaactccctgtcctgcgctcaaatgatcctcccaccttagcctcctgagtagctgggactacaggcgccctgctgatttttgtatttttcaccaggttctttaagcatgttgtaaactttgcagaacaaattggttctgggtttcctttgatgggagaggctgcagagtgctgagtctggagccagacagcttgggtttgaatcctggctttggcagttacctgctgtggaaagatggctttgcctctctggatctcagtttctgcatctgtaaaatggagataaacttttcctagcgttgttatgaggattacatgagttactcacagcatgcaatttatatttagtggggatgaggttgaagaaaatacataatttcatgctgctcctcacatatacctaacgtttatgttgcagttcccaagtggttgcaaattcttattctaaaatggtagcttatcaaagttaaaggaatccaaaaatgccatttactgagaagagaagtggtcataacataggaatttttttttttaacatgcttagtgcctttctacttgcacctatgtcccttctcccctagtgtgggggtctgtgggctccccagggtagtgcttaagcactttgcaagaggtgcaggctgctcatttctccgattcccagttccctctgtttcctgggagggacg

SEQ ID NO: 103066 - DNA, 3563 bp, Homo sapiens
gggtgctgattgctcctctggatccagccggacgcatggaatgctgcaacatactaagcctgtgctctgggggcctaattacgtgggacttggggcaagcacaagtgacttcagcgcttggtttgatccagcgtgtgatttttgccaaagcaaatactttattaatcttaaccccccaaattagacacattgactttttctaaaaatgggaatgattggagagcagaatttttttttaaatcccctccccatcctgaacccctcctccagcaagactgggctctgcattcctctccttgaatggagaaggtgagttccatcactgcctacctcctcctctaacattcctgaaactaggtgctaggaaattgcccctttctgaaggtgtgttttttgtgtgttttccgcaagaggttccactccttcctacgtcaaggccaaagaaaggatttgccgtcctgatggaactttcctaactgggaacttgtcctggatttcttgggattctgatccagaatgtgtatagggaaaactgttgggtgacttcccatggtgaccttgagtgtgtctgagaggctcagccagaatttcttgtgtggcctgtgagtgagctagcaagccagcgaggtcagtgggccttcccgctcaacaccctgtctctctcctcaaagtgtcttgggtaaagggcatactcacagggtggaattaatctggcgttagagagtgagcttgttcttatctagtctaaactggaaaaaaaaaatgcatttaaataagcaacctaacctcaccccagaaaacaactcctagttaaccttggctcctcttcactcggcctctgtctttaagtctgagtgacctggtgggattgatcagctttgaagtcctaaggtgctattttaatactgttcttttacgttgcaggcttcgagactgatttaactagattctggagggagcttactttacagcattcttaagagctcgaacaatcttgaaagagttaaactctaattagctcattcctaaggtatttaatgcccttattaaaactcaactgctcgttcacttttttctttagtgaatcagatttcttgaggagctgagccttcgctcctcagatcacaggctcacatgttgaagctggcagtgctagaggctagttcctatctgtgtgacagcatttttaatttaacaggaccgcctttgatgttcccaaatatttataggcagctttagatcatttcagtgtgtgctttctttttcttctctctctctctctctcttttaactggagcaaaagttcttcctcatgcaacagccttccttttatcctgtttagtttatttttgtttcctttgcagctttggcgaaggctgtctggctgcattcacacacacacatgagattgacccttctttttgcttctttggtaaaggctacctctctgtatcctcctgcctgcttgagattgcttaaggcacttctgttcatcccttgactttcttcaggctgagttttttcctaatctggctcaggaatctgttctttggctgacctgagagctttcagactatcatgcagacctgggcattgtgtgaaagtgtctttttttttttttttctgagacagggtctcactctgtcacccagactggaagtgctgtggaatgatcatagctcactgtcaccttgatctcctcaagtgatccttctgcctcaacctcccgagtagctggtactacaggcacctgataccactcccagctaattttttcacttttttatagagatgaggtcttgctttgttgcccaggttgatctcgaattcctgggctcgagcaatcctcctgcctcggcctcccaaagtgctgagattataggtatgagccacctcacctggccttgaatgtgtctctttatggatgaccaggctgtaatatcctactctgcttgcctgcattgacactgatggggcctcagcaagttatgatttacagtgtatgttttgcagatactgttttagctggggcaggaaattcagatagacagaattctgtcctgatcatttcaggcttgctctgtttggctctgttagacttcttggctgaaaataacagagaatcaaagattttggtctcagggatgggaaaaacagggctgcaacatagatttgttaagccattaagaaaaagaaaaaggaaactttgtaccaatcaaaacaaatgatagaacagaggatagtgcttcctccagcttggcctctgggtaaacattctgcttgtgaaacaatccaaattactgaattctcagctgctgttacttacctgggcctggcagacagaagaccagaagatatcatggcttcttccatcattgctggctgtgcctcctattaggtggaagccttttagtgctgaaggtctcataggtggttgatgaaatgtgtgaatgaatgaatacactattcttgggaccttatactgtttttctcactagatccttaagaggattctgagcgataagatatttcatatctgtttttttagatgaggacactaaagtgcagagaggtttatacagctggtgagtgaatggagaagctggcctggagctcaggactgtgtcttatagcctcaccatgaggtaattggaggcaggtaaatccaatggcagtctgctaacctcttagagctaaaaaagcctgttgaggctaagcatggtggctcacgcctataatcccagcactttaggaggctgaggcaagtgaattgcttgagcctaggagtttgagaccagcctgggcaacgtggtgaaacctcatctttacaaaaagaatttaaaaattaactgagtgtagtggtgcacgtctgtagtcccaactactcaggagattgaggcaggtggattgcttgagcctgggaggcagaggctgcagtgagctgagatggcaccattgcactccagcctaggtgacagtgatctgtctccaaaacaaaacagaaacctctcaaggctaaaatctactgtatgttgcattgtgagagttcagagctgaccagattcttgccatgtaaggggcatagtggtggagagtacatccctgagaccagataggcctgtgttttgcatctcagccctgctactgacagctctgtgaccttggccaggtcatccaacctctctgaacctctgcttcttcatctataacatgggacagatagcttgtacgaccaaaagactatgaaaattagatgatatatgtaaggtgtacattaagtgcttaacacatgttcggttggtgtctgttgctacaaaattgtgactctcaaagggttcatagtcctgcaagaaagcatcaggtaaaccacctattagaagacgacttggcagctacaatagagagacgtgctggtgctgagtaggaacccagggcagaaaccactggcttggatttttattttctttcattcagcagatatgtattgagtgcttaccctgcgctggcagagccactggatcacactgattgctgccagctccccctcacctcccaattttctc

SEQ ID NO: 103067 - DNA, 1262 bp, Homo sapiens
ccatctcagctcactgcaacctccgcctcccgggttcaagcaattctcctgcctcagcctcccgagtagctgggactacaggcacacgccgccacgcccgtccagttttttttttttttttgtattttagtaaagacagggtttcaccatgttgcccaggctggtctcgaactcctgagctcaggcaatctgcccaccttggcctcccaaagtgctaggattacaggcatgagccaccgtgcctggccacatggagtcattttcacataaaatgccaaggtgccaaatggcacagccacactgcatttgaccatgtatcttacatggccttgtgctgtccttcaactctcattttaatcttatctaattttctccaatttctctggtctcttctacatgaaaactttatggtccttgagaatgtacaagcgactcaccaagggagcaggtggtggccgcatggttccccacagtgcccagatggtgtccgtgcctttcatggtctggttccatggggatttgttgataagattttgctttcatttggttttccaacccagcagcatatttagatttgattactggtactagcttttttctctgcagagtttcattgtctgagtcactggctgtcttgaaacataagtcccattctccacacccctgtacccctttgcaatcagtggggatggttatgtggtagaactttttccctgcccacagcgcatggtgcagagtggtgtcagcacactttcacttgctgagttgattggtaacatattgaatctagaacaaaagatacaattgaaaagcatttgtggttgtctttgtatagttacaagcctctaaaatagatttgaggtcatttctatgtctttccttttgaattagcaagcaagctttcagagggaagtgggcgttttctaaatgcactattgatttgaagctaacatgatgctctacttttggatcatgaaaataatgttaattttttatttggctgtttggagggaccactggagtaggtcatttatattcaactcttattcatgctttctttaaatagcatgtttaatttcacattaaaactagcttctgttcagctaaaacaaaaactgaaaagatggtttggaagaaagcaaaatgacagagaaaatgcagcatgcaatggaaattggctgcaagtcatctccataaggtgattgagaatgaagtgaagctcagctttctttccaaagaaccctcaacaaccctctatgtta

SEQ ID NO: 103068 - DNA, 2738 bp, Homo sapiens
tagatttgtctgggtggagagcaaagatgaagctattggtctagtagagaccattggtccccagatgagggcctggtgtctccgttgggtgttttgtttgtttgtttgtttgtttttgagatggggtcttgctctgttgccaggctggcgtgtagtggcacgatctcgactcactgcaacctctgcctcctgagttaagcaattcttctgcctcagcctcctgagtagctgggattacacgtgcacgctgccacacccagctaattttttttgtgtgtgtgtattttagtagagacagggtttcagcatgttgcccaggctggtctcgaactcctgagtctgcctgcctcagcctcccaaagtgctaggattacaggcgtgagccaccgcgcccagcctctgttgggttttttaggcacacttgtctgaagaaagtcttttgattttgagccactttttagagctttgaagctcttcctgattttaactattgctacctatggaagagttgctctttgggaatggacagcaacttggggctaacagcttttaagcatggacctctcctgggggcgtgttgggcctgtttactaaccttactgtggactccgccttcagatcaggatgattttcatggtatttttttttttctcagaaaataatcaaaccaaaactttcccttgctgatacagagtgactatgcaaatcaggtctgcatgcttatcttcctagaaatgtagttcagtgaaaagaaaacagcgccttcctttagcccacatactttcctcattcataaaatgaatcagatgaaacttgatttcacccaggctggagtgcgggggcgtgatctcagctcactgaagcctccaccacccaggctcaagggatcctcctgcctcagcctcctgagtagctgggactataggcgcatgccaccatgcctggctaattttttttttttttttttttttggtggtagggaaagggttctaccatgttgctcaggctagttgcaaactcctgggctcaagggatccattcacctcggccttccaaagtgctggaattacaggtgtgagccaccatggctggtcacgcccagctaatttaattttttttttctagagacaggggtcttactatgtttcccaggctggtcttgaacttctggcctcaaatgatcttcctgccactgcacctggcctgatttgtatttgggagcctcactttctccattaactttttttttttttggagacagagttttgctcttgttgcccaggctgagatgcagtggtgcaatctcagctcactgcaacctctgcctcctgggttcaagcgattctcctgcctcagcctcctgagtagttgtgattacaggtgcccaccaccacaaccggctaattttttgtgtgtgtttttagtagagacggggtttcaccatgttgaccagattggtctcgaactcctgacctcaagtgatctgcccacctgggcctctcaaagtgctgggattacaggcatgagccaccatgcccagcctctccatcagactttggatctggaagatagtaagaaaaaaagcaaagtaacttagttctgtcctttcctagaggacgtaagcagtcttggcctcttcatgatggtccactttgttaccgaattattgggtacaaaagtgaggtctgcaacaggctttggatgtttcaaggtgtgtctggctgtggtttgctttctgagtgccagctttaatgtcctcttattttctggcaagggttgatggatgtggcactgaatattttctgaatagtgttcacagaatcaccgagtgaatgctggcctcctcctgcatgtctgttgagggagggcttatggaccagtgggaaagtcagatgtgtccctgagatggtgacagtataacatgcataggctgagtgccaaatgcttggggcccagagaaagtgcctagaaatcagagaaaggtcttgggggtggacctccagctggactcttaaggaagattggtgcttggatttgctcctgctggctcttgctatggggaaggcatttcttgctgagacccaggctaggctggcaactagtggagctttttctagcttgtgtagacctggaggctgcctggcatagaatgtgcccatggcagggcggggagaaagaagaggccaagtgaggtgcggctgggagacaacagatctgctatgctctctggtctgtcatttaagtgggatctattggattcagcctttctgagcctcagtctccacatctgcaaactgggtgtggggctagatgagattcctggggggaattgggggatctgcagctgtgcctctgaaggatgtctggggacagaagtgtaagtggggaagaagcacactaactggggaattggggagggaaagaactttggagggcaagttaggggagggataagaggggctttgaatgccagaaaagggtatgtgacttttatcatggagaccagtgggtcccatagtcagaatataggtgatgtctatgtgcatgaccgtgtttttggtgacacaactcccgcctgccctgtgtcctccagcagcatggtatgtaattgcagccctcactgcacagcagtcggcaggcttattcaggggcagttttccagcagtcactcctctcttgagaacagtctggaatgtaagggagtaagtgatgttctagtgacaaccttgaattcactt

SEQ ID NO: 103069 - DNA, 1855 bp, Homo sapiens
gagacggagttttgctcttgttgcccaggctggagtgcaatggttcaatctcagctcactgcaacctccgcctcccgggttcaagtgattctcctgcctcagcctcccaagtagctggaattacaggcgcccaccaccacacccagctaattttttgtatttttagtagagatggggtgtcaccatgttggccaggctggtcttgaactcctgacctcaggtgatccacccatctcggcctcccaaagtgctgagattacaggcgtaagccaccgcacccggcagggacacagttttcgaatccttgccgatttgagtctttactgagcggcttgatttatcttggcttgggaagttgtggatttttagaacattgggtacacttgtattaaaatagatgtatactttcttaagccaattgcacatttttctggagtatgcccaagatgagcttttctcaaggcatcgcctgaagaacagcagtcctgcacaatgttctgtggtgaaagggttctatgaggatctatgctatgcattaatggtggggctcagtatttgagaaatactgttgatcctagttttctcttagagatatattctgcacagtagtgaattaatggctctgagaaattctgttgaagagcggtctttcactttatttaatctggtacttcccaaatgtacttgatcacagaactttttctcaaaggactcaaggtgctaggggatatggagtggcgggtagccagtattaggttagtttagggtctgcactggttcagttggtgtcctgttagattatgaggatggaaggccaacaccaagttaactaccagctttccacagggccctgggatagagtcatcaccacctagaatgaatggcctgaacacctttgaactgtggtaggactatttcttccatttcagcttagatttgtggtcttctctataattgggtgatggggtatagggagttgtagtataaaagaaccaagaaacagtgcttctctttgaagaatttaatttctactggaatgggaagattcatgaaggagttaaacagtaccaccgtccaagtaggtatgaaataatgtcaagtagcctgtcttgtaggcattttgtagcctgtcttgtaggcaggtgggggccacaggaagcaggggcagcctttattgtgacttgacttaccaaactttgggtactgtgatggcgggcagataagatagaggagtccccccgacccctgcagccctaaatgcctcttcgtttgccccgcctctgtgtgtaatgtactatgtgtgaaagtctcttagactccccgcaaggtagacattttagagttggatgaaatgcatgataagaactccttctggtactttccagatgtatttgatcccagaactcctttttctcaaaggacccaaagtactggggaacatttggttccttctggaaggagaactccctctggctgatctgcaggcccccactgctgggttggcatcctggatttcgaggtggccaccttctgtgactcttaggccttgagcttggctatctggttttggagacctggtgccttggaagtgctgggctgagttgaatggaagtgcattttccgggttagtctaccttggttaatgcagggaagagtaaataggctctgctgactctagctgcccataggaaggatgtgtgtgacataagcggggctgagatatcccccattgagatgctaagaggaaactgagatgaggagtttaaattcttctccaaatatgtgtcatatttcatagactgttgacatagagcttttttttttttttttttttaaactttaaaagttggaggcc

SEQ ID NO: 103070 - DNA, 1358 bp, Homo sapiens
cctttggttgctataacaaagtaccactggctaggtggcttaaatgacagacatatttactcatgattctgaaggctagaagtccagaatcaaggtgatcagggttgatttattctgaggcctgtctccttggcttataaagtgatggttttcctatgttttcacgtggccttccatctgtaactgtctgtgtccaaattttctcttcttataaggacaccactcatattgtattagggcccacctatatgacctgctttaacttggtcacctctttatagaccctctctctaggtagtcacattttgaggtactgggggttaggaccttaacatatcaatttttgagagacagaactctgcccataacacagagccattaagacatgatgaccctccagatttctgaaggtgattttcttgtcacttgtcttttccttgctgagaacccccagttctttccgttctttatatgagatggttttgaagtccctcaccatcttggaatcttctggacttgccttagttttggaaggacaaagtggaatactttggactacccgtgatattatagatagaattcattctaatgtctgcccaagcaaacaattttgatgatttccgaaaaagattaaaaggctaaaaatcagactgtacagtttcagtaacagctttaagatatttgtctttaattttgcctgagtaggtctgaccactgacacacacacgggcaccgcccccatatcccaccccatgcatccagtgctaactttatgtcttcttttgacttaagcatttacgttagagttagtaagtgctcaaggtctaagtttgttcaccacccttcctcccttccttcatacttttttagttttaggaaacctagttgggagggttatttcaaaagaataaatgaatgtagagatttttattttttaaatttaaattacatttaatttttttgagatggggtcttgctctgttgcccaggccagagtacaatggtgccatcacagctcactgcagcctccccctcctgggctcaagcaattcttccaccttagcctcccgagtagctgggactacaggcaggtgccactgtgcccggctaattttgtttatttttttgtagaggcgaggtctcactaggttgcccaggttggtcttgaactcttagactcaagggatcagactcagcctcccaaagtgctgggattataggcatgagccaccatgcctggctgagatttttattttttaaatgtaattgctgtctggagagggtagaaataactcagttactggagtataactcattttaggttcataatgtcatgccaacctgtagtgtagttagat

SEQ ID NO: 103071 - DNA, 2598 bp, Homo sapiens
aattgtggagctccccacaaagagaccctcagtgctgttcactcttctgctaaattgtggtttgtaagtcctgactgatagttttgacaggctttttctccttaccgtagtctctttagatggagtgtgacgctcttggagttcctttctttgaagatgctttgactataccgcccaggatttccaaattgtagcctttagatgcctggaaccctggccccacacagctgttaggccccctctattctggaggcccgacaacattaaaaataccaactatttatagcatacttttcagtgtcagtaaattataggatgcccttgccagtggatggggtgaacgctcatctgcctgccactgtgtgattgcctagaagcgtcggccaggtggcaggagctcagccccacctgaatgctcccaggtcctcacctggcactcccacaggaaactaaggactgccaggatgtcttggggttccagtagagtccatgtcctttgcgatggagtggttggggataaaacacacacacacacacacacacacacacacacacacgacactaggtatgtgtgctcttgagagaagcccattctgatctaactgccaactcctcaggaggctgtgttgtcagccatctgtgcacagaagtttgctgcatcactggtgagctggggagtgtcctgtgtggtgtccacttaatcttactaggaaggatcccctcatttcaacaaggtaactgaagaatgttaaatctaaatttgggtaagatatactctctgtaggctgaagaatttgaagagtatataaaagctcttatagctgggtgcctatagtcccagctacttgtaaggctgatgcgggaggatcctttgagcccaggagtttgaatccagcctgggcaatagtgagactccctctctttaaaaagaaaaaaagcttttaaaaaggccaaaaggacatagggtctttatcttccctcagctgccccttggaaaggatctcctggcttgccattcagagtacacagtgaggggaggccccctccacagggtaccatttagaacaggctcagtcgttagaacactgcagagggcgtgctgtcccctggccaccaagccaagttgggcttttggggacaggttttgtggtggtagcttttgggttcttcatttctttgcctggactgaacagtgagcagtgctcaagaggcctgttctgttagctggagtttccattgaagtgctaactgctggatcctttgaacctctagcctgggagggtatttataactagctgtttgcgtgcttagaggaactgaagtcctgcctttctgtagtggtttaagagctgtgcccttggtgtgggctgaaaggcaggcctggcgaagtgtggggactcaaatgcccaactccccacgaccttgtttgccttccccctgccctgccagcccagcggcccttttagggttaacttctctgctttggaagcagctggccagtttacactcctccctgggctgtacaaaaatacttcctttgaagtgttaggagaagcggtgaagggtaaaacctggtgaagaataaaacctggagtggggcttgaatgcatttctcttccagggagtttgctgggtgactgagccccacagccttcctcgtaacctatagagctgagtggttctcctcacatagttacagcttggagcctagttgcagctggcatgtgcatgtgtgggtgcgtgcgtgtgtgtgtatgcacacgtgtgtgtatgtgtatctgcatgtgtgcgtgtgtgtgtgtgtgtgtgtgtgtgtgtgtgtgtgtgtgtgtgtaaagtctcctcaaaaggagtatttcttttcaagagagatagttagaatacagccaccaagcttgcctggtggctggaatccctttgaaggcacttttccctagggcgggtctgagtcagggtggtatcctggggtatgtgcgaagctacaatgtttccacttcgtcctaaagtggccagccctgttcttgctccctactggggtaggaaagctgccactgatcccatctctgattcaggtcaaagcacagcagcctaaaagaacgctgggcatgaagtcagtggtgctgacttctcttaaccttgggtttcccatcaataaagttgggctggtggaaataccggattgggggcaccttgagaaagtgcaagacacttctctactgtaaagcctgcagttgagcagaaatggcatttaggataaagaggccaaagagaagaatgccagagcagaaatgagacggaacaaagcttgaatgtcttcttaatccttgagtatttgcagccaaggaggggttggggcaagatgggaggagaggcagctgttattttctagagaagaatgccaacctgtttctccccacagaggggaccacacaagttatttctgaactggagtttgcagtcccttctttcctggaaaatgccttcatatggatttcttacatcttattacactacttcctatctcccttagacaaggagtgtcccttagacagatctaaaataataccatagagctaacatttattgttggcttttgcc

SEQ ID NO: 103072 - DNA, 3807 bp, Homo sapiens
attgaatagatgaggaaagggaggctggaaaaagtgagatgacttatccaaggtcctcttacctactgatgcaggtatggaaatacagacccggttagacttttagcctctttacttttttttttttttttgagacggagtcttactctgtcacccaggctggagtgcagtggtgcgatcttggctcactgcacctcagcctcccgagtagctgggattacaggcgcgtgccaccatgcctggctaatttttgtatttttagtagaggtggggtttcaccatgttggccaagctggtctcgaactcctaacctcaggtgattcgcttgcctcagcctcccaaagtgctgggcttacaggcatgagccaccacacctggccccctttactcttaagagatgtaagttacaataagcgatgagggggtgaaatttaattctgtgccccaaacctgatcagaagctgtttttaaggaaagaggtggaacattgaactctgttcattctggctgttttgactcatgttatattcatcagtggacttttattttattttttgagatggagttttgctcttgttgcccaggctggagtgcaatggtgcaattttggctcactgcaacctctgcacctaccctggattcaagcaattctcgtgcctcagcctcccgagtagctgggattacaggcatccgccactatgcccagctattttttttttggtagaaacggggtttcaccatgttggccaggctgatctcgaactcctgaccttgggggatccacccacctccccctcccaaagtgttgggtttacaggtgtgagccaccgtgcctggcctattttattttattttttgttttgagacagagtctcgctctgttgcccaggctgtagtgcagtggggcaatcttggctcactgcaacctctgcctcccgggttcaaacgattctcgtgcctcagtctcctgagtggctgggattacacgtgcccaccaccacgcccagctaatttttgtatttttagtagaaatggggtttcaccatgttggccaggcttgtctcgaactcctgacctcaagtgatccacccacctcggcctcccagagtactgggattacaggcgtgagccacagcacctggccagcagactcttattgatcagttatatttcaatacacatgagtgcgttttgccttgcggttactgaaaagaaacttttcttatttctcattctctgtgttgactttacaatagctatgcttttttccctctcattagaaagggttgggaagatggctgctctgtaactgcagctttgttacggttgaaggtcttggtgtcagggattgacgggtagcctgtaccccttggaatccttagctgtaggctttggtctttccccagcctagaaccagacttggcacttacttcaaggggcttgagatcctgtgcttgaccctccttagctcatgggggaaaccaaggcctgggaaagtttgagtgatttgcccccagtcacacacggggctagacccagggccaggctggcaggttcccagcccactggccacatgcttctccttttcacctgaatttcaaacaggagggaagatgaaagggatagaaatgaccagtcagaggagtaggagggctgtcatttgcaaacagtttcttttgatctttgccccattgtttaaaaaacccccaccaaaccacaactggtagcatcagcacatggttccctccggttcattgaggggcagtcatttctcttttaagtgggaagccccccccacccctagtagtctgtttcacttagggctccatacctcctctccccttctgctactcggctgccagatgtgctccccttcacaaacctttcagagctttttactgcttataggatggagtctaaccccgccttcccctaatattctaaagcccttgacattttgtgcccagtctgtctttgcattttggcatccaaccacagagccccttgcctctagtcaaagggctcctccgaatgagctttggcctttatttgcatctttgcccacattctgcccatctttcaatgctgctgcctccaggaagctctgttggactaatgcagcacccagttgcctctgctgcctccgaacctgaaacaatctggtctggcaactcatttgacacttaatattgttttgtgttgtttaacttgtagatgtgtctgtctccctaactagattgtaagttcactgaggtcaacagcatgccttctgaactgcttcgtattcccctctgaactgtttcatattcccccacagcattccacagggcctaggttgtatgctgtgcaaagatctgggactgaaatgctattatctttctaactgttaataggaatggaagaaattagtttccccaaaaaggaataaaatgattaactagagagatttttaataggatctgtgctacgttaggattaatatataggttgagtatcccttatcctaaatgcttgggaccagaagtgtttcggattttggaatatttgcatatacataatgagatgtctggggggtgagactcaagtctaaacatgaaattcatttgtttcatatacaccttattcacatagcctgaaggtaattttatacagtatttttaataattttgtgcatgaaacaaagttcctcttaagtacttatgtgtggaatttccacttgtggtgtcatgttggtgctcagaaagcttcagatttggaagccttttggattttgcgtttttcagttaaggatgtttaacctttactttaaatcgggttacttgaatgaatcagggaattttagtttgttgtaattatttttttgtttgtgtaattttgctggcaaacagtctatagtgaaaattttgacctagaccccttcaagatgaaagtaaataaatgcatgttatttaaaatttgctgttgttgctatttagcaccctagatgcctgtttacttttttactttgttgttcttataactttttctctaagtaatttcttggatccgtattcgcactgttacaattgtgttcttgaacatacttctaatcttttttagccattatgataatatattttgttttcttgaccctttctgtagtttgttaggttgatggcttccactggaattttaggtttgacctcccaaaggtggatccacctgtatgggaaagatttgttttcccttctccatcccctcccagtccctctgcgttctggccttgggtgtatgaaattctggccttgaacacacctagcagtcctggcccatgtccgtttcccagttaactcttttgtgcccgatctatatgtggcatgttccgccacagctgtgggtggaatcatgcttgtgcccccatataaccttttccttcttagcatttttttcttttcttactcctgagttaaacgtgtagcagaagaggtgtaaagacacagggccagcatgaatagtgctccctttttaaaatgtggaaaccggcttggagaagttaagtgacttatccaaggctgtacatccagtaaggagaaaaactggccttgtgacatagccccagggatgtgctgtgccccgtgatggccccatatgttggtgttgggagttcagtggctcatcaagtgcctgtagctcttaaaggaaaggagttgataaaatgaagcaacctggggcgcttactccaggggccatttctaatctgatttctgtaagtagtggatttttgagagtgggttcttgtatttcctcctggtctgctgtgttcatggg

SEQ ID NO: 103073 - DNA, 1063 bp, Homo sapiens
taaaaagtaggcaagagggctgactttggtcagtcattccttgggtctagaaaggaagctcatctgtcccttccctagagtatgtgagaggcttgcccaaggctggtagtcagatcccatcctgttggaaggagagaggggtctccaagaatatggctgagtgccaggatcaccaccacccctagcctgaatattctcccagtctctgtaaaaatcatagacatgtggctgatttttctggggtattcccagttaagatggtatccctgcctttagtagttgatcagtacacaaatcagtgaaaccctgtaccatacatacctccatgagtgaaatcgtggtcatattctgttttcttgcttagcaaatcttgctgacagatagatgaagaagcctgccaaacggagtcagcttgttggatgctgaggtccttcccaagatcttccctacatcagaattcagggtcagtggggtctgaggcactactcaacttaagtcatagtgactaaagtccacttcagcatcttacagatgtcccaaccaaacccagcatgtgtaaaaccagatttctcttctctccacaaacctgtttctgttaggttcttttgttactccagctaaaaagctggtgtcattctaagctgtttatcctcaatgaggtgtccccttctctaaccccatgatgcctctacccatgcacattgaattgtctgtaagttactggaaggcaagactggaagggtttttccttcccttttaaactacaaaccaggtttcccccatcttctgtaaaagcaccccccaatattgtgaatttcaagcatgcaggaaaagtgagagttttgcagtcgacacccatatacccactatctatattccaccgttaacatttcactgtatttgctttcttacattttttatctatctgtgcatgtgatggggttttttgagacaaggtttgcccaggctggagttcagtggagcaatcatgaatcactacagcctcaacttcctgaactcaggtgattctcctacctcgtgatgggtttttgatatttgaaaa

SEQ ID NO: 103074 - DNA, 1008 bp, Homo sapiens
atgtgtatacaaagtgagtgacatcgtgaagattgtgccaccctggaggaaaagaagtagtcatttcagtgcaacactttagggtcttctggaaagtaagaaattatatttatttttgccagtatgcctcttttgttcttccagtgattcgtcagcaggttgactaaaattagagccgtctgctagtcttgtcccatctaatggttagataaatcttgcactgatgttcataccttgaaggacccttttttgtggaacttcatgtgttagagaaactgaacctgtgtaaaatggagcagatccaattgctctttgtaaccttgctccctgggcccccaaagaagctagaatctcccagttttggccccgtaggtgaagatgttactttgggagtacttgtgtaacctgaagaagactgaaagtatatagcagttctcatgagggaaaccctgggattattggcctaagtctctcttcagtgcagcagaaattctgctgttagaccggcattactgtcttgacaaaaggggaaacaaagaggctactacattgttagggagccccatccatctgtccacccatctgtccatctgtccacacacccatctgtccacctacccatccgtctgtccatctgtgcaacaatgcaaggtactgggaatattgcagtggaaaagacaaaaacccctgccctgtggagccaacattgtactaggcaaaccagatcctagcacattgtcaccctagaatcaggaggactcttcctgcccagttccactgggctagacatgtaaagagaatatgtgagtaatagctaaactttggtcttactcagctaaactttggtcaaatggcaaaatacaggtgaggttcctatggacagagaaggcagatggcataatggggatatgctgagctcagtgatgcatcactgtagacagcttgagaactctaggcatgggccagcttgggacagaggccatggaagagacaggtgtagtgcgtggc

SEQ ID NO: 103075 - DNA, 1625 bp, Homo sapiens
atcttccaaagtacatcatctgacattttagaatacagacttccctttcatagcaaacctgtattttaatagcttgtggttttaaaaatatcatctaaactcatgaactaacgcattcttctcaattatatcccaactctaccatcatcttctctttcttctccttaacttctctggaaattattggaatctgcttttaaacactggggggattgtatattatagttgtttaaaaatgaatcaatttaagtttgagcaatgtggtaattcaaagcagttttaggtgttattgggattttttataaagagcattcctgagcctgaatgaagcagtcagttttcctgatgagccatgagcccattgcattaatgtttgagtctcctggtgctcatgataacgattaaggagttaatgttacctctgccatgtttaaacattaaccaaagggcttcctctgctattatctgttatcaacaattacttggaacattttctggcagtggagctttgtttttcctccgaggagatgctagaacaggatgagaatagacattaggccacatcaaaggaagattcttgattatgtccaaagaaactctggccttgtgggtacagagagtttgcctccttaatattttgtaaactcctatcacacccccacccccaccccaccccccccacacacacacacacacactcactctctctctctctctctctctctctcccctccctcctccctcctccccctccccctcatctgggtctgaggaagagggctgcagtgattatttcattgtatcatggtgagtggtacctcttttcttatttgggatactcattagagttgctcggtggagatggaatgatggtggggtgcagttaaacatggctgagtgctttctgcttaaggacctgatgtattaatgctctccaggtcattcatatttgggggaaggaacaaagagggtactgctctactgcagatgtgttcatttgcttattaacaaaaggctgggtgacccagaaacttaaaccctgagaacaaaagtactttccagcttccaaatgggaagatcttggagactcttgagtggctcctctggagtgctttctttaccacctagctgtttggagctgtcgtgcctaatagcttctcagcctagagggccccataaaattttagtctgtttctgtatagagtgctttggagtggccgtttctctctgcctcttatttactctcaaataccctttggaaaaagagctgatgaggtgcattgagacttggcatcaaaagccattcattgatagccatcgctcaactctcttggacttaaattttgttaaacaacaatcacaaaaagtcttaaagaattacccctgtttcccctgaatgttgaagtaagaaagaaaagaattactcctgtaatgcaagaagacatactcattaaaatctaaacagcgaaaaagtatatcgattaggttgggcgcggtggctcattcctgtaatcccagcattttgggaggctgaggcaggcagatcacttggggtcaggagttcgagaccagcctggccaacgtggtgaaaccccgtctctactaaaagtacaaatattagccag

SEQ ID NO: 103076 - DNA, 1156 bp, Homo sapiens
gtagtctgagctactccagaggctgaagcacaagaatctcttgaacctgggagatggaggctgcagtgagccgagatagtgccactgcactctagcctgggtgacagagcaagactctgtctcaaaaaaaaaaaaaaaaaaaaagtatattgattaaaaaggggaaaccctcccatcctgttcttcctgtagatatcactgggaccagctgggtttccagtttttttttctgtgcatttctctatactcacacatggttttgcataaatgggattatcctatacacctgttacttgacttgctggcccaggacttctctgaatgtagggtatgctagatgcacgataacacagccccatcatggcttgtaattcaggcatttagcgtaagctgctgggtttcacttttcttctggaagcttcaggcattgccctgctttctggatgtgctatggttctggattcttcctttctttttctcttaatagggcttgtctaggatggaatttcaaaataacttgattctttccatctgagacacaagcacacaaaccctttagcagaaggtttttaaggttgcctgtgtacctgccctttgcccctagaggtcccactgtgagtgccccagtcacatgatccactctggccttatgggggcagcccaccctggcgcccgtgtggtgaagcctactcgttgtcaggtttccagtcattcctctctgcccttagccctgttgttctgtggctttgctttctgggtgctctgcccatgtcctcagttcatttctctcattccgggttctttgcctgaaatatcctcactaggctccactctttggggtcaagactgctgtctttgtgcacttggaggctagcctgtctctgttgaagtaatgtgtgggtagggtgcccacaccaacatccctgacacagatctggccagccaccttggatcagcctgctgccttctcccatctcctcttagatttgttcagttccaccctttattggctgcagaaaatgattctctacaattctttcactgtggtttatgatagaatccattttcttaaatctgatgtaggatcactttccccagcagcaaggtaattctcttagggtcttcaaaatggctcccctacccgaattcccgacca

SEQ ID NO: 103077 - DNA, 1035 bp, Homo sapiens
atagttttagatttgtggaaaagttgcaaagatagaacagagggctcctgtatacccagcacccagtttctcttactgttaatatcttacactattatggaacatttgtcagaacaaaggagccaacattgatacattactgttaactccacattgttactgcttttattgaaaatacatgaatgtattttcataggattcaaatatcagaaatacataatgacagagtgcctcttcactcctaccatcccacttcctatatatttcagagtattttttatatatttatatacacatgtaattatgcacacacacccatccatcttattttaagacatgcttttttcatttaaatatgtcttgaaagcttttttttttcagtatacctagatctgcaccattatttttaatggacaacacattgttttacacccttttaaatatatcttatctattttaatctagcagattaaaggtgaggtctggcacacctcccttttatcttaaagtggaggttagagattatttgccctcctttgtggagtacttagcgtattctaggcactgccaagcacttagcgtgtattatctaacctagttatcaaaacagtcttactcataggtatcattatccctgttaacagatgaggaaactgagggtcagggaggttaagtgagcaaaaacttttgacgactttctagctgaagcaggctgtctctggtactttgggtgacatgagctgttcagcttagggtgaacattgcttggtttatggagtcttcctgagtgccacacctagtgccagaatatgaaggtgaagggtatgcttagggaactcacagtcttatagctgaggggagatgtatatataaaacaaatgattatgtgataagtattacattagagtttgtaagatgtaagatgggtttcggataccttaaaaaatccactagaagtaaggcatgtgcttggaaccatggcagaacagatggaagtatagcatcagatttggcaatcagacccgagttctaatt

SEQ ID NO: 103078 - DNA, 1204 bp, Homo sapiens
ggcaggagtgagtctgattctttggatagggggttgggttggatcttttaaaattaatttctgggtgtgaactgtaaaagagacgaaccagtagggatttactctcctccgtaatttactattgcagccagaagcctgatggtttcagcacccccacccagaaaaaaatttataaaatgaccaaaatgttacagaaatttatttcatggaggttgttcattttatggacagttgttccattttaagcactttgatcaccctcctgattccctttttttttcctccccctttttggacgtcagttctctggcatgtttagtgacagaagcaaaagggctgtaggaaatctttcttcatgtaaataagtacctatgtctctcctcatacttttattttcctctggcattaaaatgagaagagtagggtaggggacttggaaatcctatcactgcaaaaatggttggcttagatgccggtggtggtggtggcagccagggagggaaatcaagagtcctttgcatgtgcctgggtgcacctgcttgtttattagatgcgtggctgtaagtcatctggagtagtgcaaatttgtatttttattgatttgaattcagagaaggtttttggtcttaatttaactaatttatttatttttcattttagaaattcaatttcagcttcaccctaattgtcactactaaaatcctacatatgcaattctaagcttaccaaactgataaaataagatgactttattacttttattttttaaaatttctcgttttccttttctcttttccacttggctgaggacaaatatagataaaatcttggcctattgaagagccagtaaaatgttgttttatttttgtttctaacctgggatgttttatatctgcaaaatgtggtgaagacagacccattcattaaaaacagactgctcaactgggcaccatggctcacacctgtaatccgagcactttgggaggctgaggcgggtgggtcacttgaggcccaaagtcctcaagtgaccagcatggtgaaagcctgtctctactaaaaatacaaaaattagctgggcgtggtggcgcatgcctgtaatcccagctactcgggaggctgaggtgggagaatctcttgaacccgggaggtggaaggggaggctgaggtgggagaatctcttgaacccgggaggcggaggtcgcag

SEQ ID NO: 103079 - DNA, 1041 bp, Homo sapiens
ttttgggatgtagacattttggactaaggatttagagatttttttaccgagacaggattgtatgcgtactaagatgtccttaaagctggtactttccccttttatcactaatggctgctatttccagagctgtgggctttatctgaccatcttgcaggtatgttgaaagatttgactagcacttaaaaggtatgttcagaaaatgctattttaagtgtttcttctttaccctatttcccccttgttgaacagtgcaaaactaccaggttttatgttccactgggcagctgctgctggtctgatgtttttctctctgtccctcctcctccttctgtctcccctcccccgggggtcctcccccagtgcctccccctgccccattcttgctccggtctgaagggagctgtacctttgtggttcttctgcagctgctggactttgatggggacatgcttgctgcctctacacttgcttcccttagcaaccgatcctttgacgatgacctcttgctgtttgcctgttgtctctcatgttggattatagatgagagatttaccaggctgggggtagaggcctgctgttagcacatttcttttagggttcccagcgtccctcagcctgtgttttctctctctaaaatatgaggtttggagagggtgcatgtgtgtttatgtgtggcggggatattagtgccgaatcaaacagttttaagttcatagggttgtcctagttgtgagctaattttgaagtagatgctgtggtggttactgaagctacttgatttacttctcatttttattataatgtgattaacacacatggggggggaggggtgccatttgttcctctttacactttccaagtgtttgtgtgttggcactaaacttgtttcctggtgtaatctgagctctgagaattgccaaattacctaaatctccacacattttaacacatttattttctcccaaagcattaagtttttgttttatttaaagtagcagtattcctggacatgtggctcttattttgcatggacagctt

SEQ ID NO: 103080 - DNA, 1022 bp, Homo sapiens
agggatgctcaactggtccgtataatgcaaatatttgaggatctggtcccaagcatttcggataagggacaccccagcctgtagttttataagttgagaaaacttttgttttaattgactcttcaccccccgaaaattattttgagaatattttgtctaaagctaaggacttaatagatgaaccaagacaatgacttttctctgtgtttcttcttgttgttgttagaatgtgtttgtgggtttgtgctttttaaaattaaagcccccttttttctttgtgtgagagatggctttggggtttttaagttgcagtgttatctgaaggaagttatatcgcttagcaggaactcagtacaataatgtgtcatccttctgtaatcatgtaatgatgcctgacttcaaaatgacttactagtatttgggaattggtgtttggactggttgtttatgagaaagtccaggtagaccgtccatttactaaatacggacgaatggcaagggacttgggagctttctgtttgatggtggttgaaatcactagttatggatgccatctttatttggaaatgtttgtaatttgggaagaatgagaagtgttagcagatgatggttctatgaacagtttgtctaggagcatcagagtgggaggagggtgttctggggactggggagtgggtttcatttgtgtttggcagtagctggtgatggctgttgatagttgaaagatctatggtctctgttgaggagtacttgaccatgaggttggttgagtgaggaggtgagtagctatgagatcacaacctgacaggccttacgcttcctcagccttcactgtcaacaattgcttgggaaacctgtaagaatggggagaagagaaatatagcagccatatcttgggcaggtattgagagggtagttcaaaatgttggaatatgggtaaaactagaatgctgcacttctattgggctcatcatttgggagagactagtgagggtagagttggttctcttaagttggtttag

SEQ ID NO: 103081 - DNA, 1448 bp, Homo sapiens
caaatgtgctgtttcccttatttcatgttttgagttttaaaaagacagtggctctttagggccttcctccatatctctgtttctgaggatactccttatacttagaacgcttgactgatgtctagttcaggcccaggccagtggctggcaatgacctcattcttgccatgtaaatccttactgaatggcatgagactccaacttagcagttcatggaattgtaaggtgagcccagtttcccagccaattatgactccatctaaagccgtagctgggccattaatgtattttgcgccttgtcctcttttatatcttgccaaactctgagagtctactgtatagctactggcaacaggcctctgccaaaacagtctatgaatgtatcattttacacctcatttttccttgtttccccctgtgatggcaccttgcctgtgtttctctctcccacatctttctacccacttaaaaaaattattcatttaacttattcctttattgtggtattatagacttttggcttctgtagttatttagtgtgaaagagatactgaagaatgaaaatgctaatatcttcttatagcgcccttcctttttcaaccactagtggttctcctaagggccctcttctgggttgaattgtgtccccccaaatttatatgttgaaaccctaactcccagcacctcagaatgcgaccttttttggagattgagtctttacggaggtaatcaagttcaattaaggtcgtcagggtgggccctaatccaatatgactggtgtccttattaaaaggggaaatctggacatatgcacacacaccaggaacgtgccaagtgaagatggaggcagtgattggggtgatgattccacaagccaagaaacaccaaagactgccagcagcccaccagaagctaggggagaggtgtggaacagattccctcatagcccccataaggaatcaaccctgtcgacatcttgattttggacttctagtctcaactgcaagatgacaaatttcttttttacccagtttatggtagttcgttaaggcagccctgggaaatgaataccaactcaaagctgactgctgtctcccatggccctgtggttctcttgctcaccttggacctttgttctacaggtcacaccacggctggtctcccagggtgacctgtgcgcctgccatgtaaggttcctcctcagagcagtgctctgtgactgctcacgctaatgaagaatgcaaggttgaggactgtgttttctggaaagatggatagagatggtttagggactcagagataggcgactccatgtacctgctcccatcccgtttgcatgtacctcttcccctgtgttgatgagaggtattaaaatcctgctggcctccacttgctcctcttccccgtggagcaaggagcactgagccagcatgggtatatctggcttt

SEQ ID NO: 103082 - DNA, 1697 bp, Homo sapiens
tggtgtttttttttttttgttttttttttttgagacaaggtcttgttctgtcgcccaggctggagtacagtggtgcaatcatggctcactgcagctttgacctcctgggctcaaatgatcctcctgcctcaccctctggagtagctgggtctacaggcacgtgccaccacacccagctaattttttaaaatgttttgtagcgatggagtcttggtgtgttgcccaggctggccttgaactcctgggatcactcaagtgatcctccttcaccagccttccaaaatgctgggattatggggatgagccaccatgctgagcccctttaaaatggtagttttttaaaggaaatattatcaagagtttgtgctagttatgtttttccaacccatgttaaaatgaataaatgtctgttgttttaaaaagtcctcctgtgtaccaccttgcagcctctgtggatcagcagtggactcctggcctaccctctgggaaacatgaatgtggtgtatagtttttggatcatgttttgtggagcagcatcctcactcagcatagctgtgctttggttggtctcacgcactgaagtgttacttaaggtttggattatgggaaggacttttactactaaagacgttggaaaaccatatgttttgggaggctgaggtgggaggatcacctgagcccaggagttcaagaccaacctgggcaacatagcgagaccctgtctctattaaaaaaaaaaaaaagagccaggcatggtggctcgtgcctgtggttccagctacttgggaggcctaggtgggatgatcacttgaacccaggaggtccgggctgcagtgagccaggttcacatcactgtactctggcctagatgacagagtgagaccttgtctcaaaagaaaaccacatcagtaagccatcttctcgtttgcctcactaacatcctgttgaggtgtcccacaaaccaaacaggatgtgggggtgcggaggattatcccctctaggagcaagttgccccatctggttgagggagaggtggttctgtcaccagtagagcatgttgagtgctgcagagatggctggcgacggggatgtctggcctggcagatgtcaccttcaaggagggagtgtgctcattgcaggctgctttctgggatgggagtaggctagtaatgtgatgtgtggggccttccctgaaatagaaggcactggacaggcatgtagtatggataaggtagagagggtgatggatagttttggctttccttgtgaggtgggcatgctggtggcatgttttagattttccgaatggcctttgtttccatttccttttttttttttttttttttttttaaagctgcatccttttgcatcgaatgaaaccccatcaagggcatctcctaactcttcttccattctcttgtccagggctggtgttttttgtgtgtttgtgactgacaatgcagcatggagaatttggagaagctagttttgccttttctcctacaggaagagggactcgtctgcaaagaaaggggtctgcctttcagtcctttgaagccacctggtctgacaaagacagtttccctgtccctttttggaccttgagctgagcaaaaaattacttagttgctgaaagcaggtcagtgtagaggacttcctctactcctgctttgacttcatctgcaagagagctgaga

SEQ ID NO: 103083 - DNA, 1034 bp, Homo sapiens
tggataaaagcaccactagccctagtttcagttttgccctttcagacatgtggaaagtgcaccagtatatctcaaggattttgtactgaaagcttcttaaagagctggtcttggtttcaaagtttggcttgatgtaccatactcaagggaacatagttctttttctccagatatttaaccttgtctgacatcgtcttttggcttcgaagttcccctagcttctttgtccattaacaaaacatgaaaccacatgaaaccatgatagtcagtctcactgggctctgaggaagttgaagaaagttcatcttcatatttaaacataaaaccagttgtttgatacctggtaccagagatggccaggtatatgcattgcttgttggtagcattttgccttagtaactattcagaaatgcaagtggaatgttgagttcctcttctagaggttatatctgtatctgggagaaaattggagcttctcagaacaatcaccctggttattgtgtctgccgtctctgtaacacccaaatctatatcacactctgatgccacctgggagctatttttggttgcgaagggtggtgaaagctgctggttctttctcttaccgtgtgtccctgagtcatccccagcccacgtcctggatggctcccagaacagccgtctcagacgaagtctcccttcagatgtccactcctcagtgcagggggcctgtggggtctctcttggtcctgatgaaatccttctctgccttttccagtgagaaggacccatagaatctgctggaacacttggagaaagggacttatttccagcagtgcataaaatttttgattaaaataattcacgtgtctgtttataaaaagacaaagcgtacatcatggtttataataaaaaagagcattatcttgtttcaccttcaccacccctgattgctattcccagaggcaaccattttcaattctttagtggcttcttttgtcttcatctctgtgattctttctaaatttctgtaactcttatagtcaattgcagaa

SEQ ID NO: 103084 - DNA, 1052 bp, Homo sapiens
gcctgagctgttgacataattggctcatccctcttgctcatcctttttctagttggaggtctcagcatttcagactactcattgtttaataactgtagaacattctagagtgggctgaatcctgcacgggcaccctggaggaaaggttgccccacccatggcaccgcagaacctccattggcccttcaggcaaattccatgagcctgaaagtttgtgcaaagttagatcccagggccctctatctcatatcttggaattcccaaggggtgggatatctctcacccactataaagacagctgctggccgccctgtgctcagcagtggtgacctctcacctgccttatgagcttgtgcaacccctttcctgttgtttcattgaattgtcaaggaactctcatttttggcctgcaccctttgccctccactcgttgctgtctctggagtccaagaataccactgctccaagaggttacctgcctgcctaaaataacttctttcagtgcacaatcttctgcctaaggacctgtaatgctgtcttggtgtccagactccatcctggtttttgagcccttctctttccttctcagtgtagacagtgacccttcctactcatcagactggatgcatccttttctcccctctatatcatctcttagcaactcctccccgggcttggaactgacctctctctctcgttttgccctgatcagtctaactcttccttctaagctcactcgaggctcagcagctgcgcaaagcctccccaaacattctagcaactcttgctgcctgcaccaaactcatgttacgcttgaataccacaggatttagagctggaaactttttttctaaggattttatctcttagtctttccctgtcagatggtcagctctcagaggaagggaagataaagtaagcaagtggtggagtgggaaggcactggattgtgaatccaagggcctggtcacctctgggtgtgccacatactggctgtgtcttggaaaagccacttatcttggatttctgttctcatctgtaaaacaagtagg

SEQ ID NO: 103085 - DNA, 1027 bp, Homo sapiens
gagatttggggggtttagaaaggcattaaggggtatagattttatattaagtaacctccaagagacatggggaggcactcagtaaccaaacacattcacatttgtatagcaaaccatagagatcttcacattaagtgggataactaaaatctaaatagcctcgtgttagttcacggcagctttgcctccagatgagttcaggtccattaagttttgctgccaagtaagttatgggaaaatgtttcggttttagagctttttttggtttcagaatggcagacagcaattatggtcctgtattagaacttacctcataggtggttaggaggtgagatgagatgcaaacgcctcacacaagagtaagccctcaataaacgtttgctgccattggctaccatcactccatttagaagtactaaaaaagactttttagccaagagggtcagcattactttgactgcagtataagatagaaataaatttactttggaaagccactcatcaacaatcttaaaatatgacaggtaacaacctgttttaaactggattttgtttagactgcatcattttgttaaaaggagaggttcagagaaggtgatttgaattttggctgggagaaaggtagtctgtcctaaggatagtggtactgactggatatcttttatattctcaaaagctgccattctaggtaccatggggagagagctggggcaaaaaactgtcctggttcctaacctcttgaggctctcttgagaaatccaggagagacaaggggtggttttgaagcagggtgctagagagggaagactttccagacttaaagtagcccctgccagtgtctcctgaaagacctttggctccaggtaccctcacaggtctaatctttttgtggtttttgcatccctcttgtcttctgaataacttcaagtcacttgtcaagttctcctgccctttagttggaaaaaataaccccacaggaattattagctgtttgctttacagttcacaaagttgaatcgaggtgttt

SEQ ID NO: 103086 - DNA, 1864 bp, Homo sapiens
gaagtcactcagagaacccaactatttcctcctctgcctggaacaaccatgtagtggttttacttggagagttttgtatgatttggcctgctagcctgtgatgccagggggaataaaaaaccctaggcatatattgaatcattaagtgcttcttaagtttattcactcaccaaatatttattggatgcaggggcccagaagctgagcatgtggttctacctgcttgcaagcagcagcccccacgtttctctggagaggctggtggcgggcagcatttgcacatggttagtcattgcagtttggctttgagtttacacctgaataaaatcattagcacagaagcttgggccaaagaaagacagttttgcatttgtttaaagcctgggccagtgtaggaggtgcgatgagtcaagatctctctctcttcctccctctctctcctgccgcccctctttctctcatcatcttcttaaagtgtggttgttctcagtctcaatttcattaactttgacaactgcgttttcttgttttatgagccccccgggggctggtagcaaaaaaataggttaaaggaaggcaaagttatccccttgggcagcttagtccctgcagaattcatgattttccatccatttcttggctctgaagaagcaggcagtggacagaggcagaaaaggcataggaggaaaacagccaagctagcttgggggtgggagctccttcctgtggatgttgaaacttgttgaaaacccacgaagggaggactctgtccgctgcaggcgggccaggcattcggaaaagcctgtgggagaagaggggtggcctagacacaggctaaccccctccccaccacccaccctcttcacctacccgcgtacttacagacaatgccacagggtgaaaccttgaaataagagaggatgtcctaaattaaaacacgtaaatgcctctccaagagttcaaataaaatttcattttaaaagcaaaaggcataaacttgtcacctcagtttattactgagtgcttttgaacttctcagaaaagaactctataaactcatgagagaaatatgatttatgatcccctccttctcttcttttccattctgtgggaggaggtacagtcaggatcagctagggaggcagcgttgggatgagggcaagaccccacaggggagcagcaggccagggcgccaggccaggcccagcctcagaccaggcatgggcgcatctctccagctttctgagcctctctcctgtacttaatgtggagaggctgttgtgggttccttgttcttctaatattttgagcttctgtatcatatttaaaatctttctttgatattctagttcggagagattctagttacagcattgaaaaacaggctctgttacctgtggcagtttaagtcctaagaagttaaaatagaataaaattgacatttcttagagtttgctattaagtaagggtcttggccaggcacggtggctcacacttgtaatcccagcactttgggaggccgtgccgggcagatcacttgaggccaggagtttgaaaccagcctggccaatatggcgaaatcccatctctactaaaaatacaaaattagctgggagtggtggcatgcacctgtagttccatctgcttgggagtctgaggcaggagaattgctggaggtggaggttggagtgtgctgtgatcgcaccactgtactctaggctgggcgacagaggaagaccctgtctccagtcaatcaatcagtcaatcagtcaatcaatgtaagggtcttaaaccatccccaaagcaaaggagtctatgtttatgtcccgggcatcttaaccctccaattcaatcagtgtttatt

SEQ ID NO: 103087 - DNA, 1062 bp, Homo sapiens
aaacagcatgggccaggcgtggtggctcacgcctgtaatcctagtactgtgggaggctgaggcgcgccgattgcatgagctcagggatttgagaccagcctgggcaacatggcaaaacaccatctctacaaaaaacacaaaaattagccagtcatggtggtgcatgcctgtggtttcagctactcgggaggctgaggtgggaggattgcttgagcccaggaggtcaaggctgcagcgagctgagattgtgccactgccctccagcctggccaacagagagaccctctctcaaaaaaaaaaaaaaaaaaaaaaaaaaaaaaaagaagaacagtatggtcaataggcatggccttagctctctccaaggcttaatagtacaatgtggggaaattgagaaaaagataagaaagggagtttcatgtcacagagacccagccttggctgactgacctcagaaagggtacttcattcagttctcggtgcattctcctctgtgcagcagggctaatgctgcctgtgtcattgtagtgggggctctgtgagatatttgtagagcacttagctcagagcctggcttatgggaaatgttggatgaccatgtagaagtcagccatcacatgttgggtgctcgccgagtgctgagagctttacctatagcgtctcctttaattaatgctaatttgacatcctatccagattcccattttaccataagcaaatcgagtcctagagagttctctacataacctgaaattgaacagcttacaagagccaagatctgaaataagacccttctgcttcatcaatgttggtttcttctctttgcctccttttgtcttcgccagtttttctagataaaaatcagatgctcacctgggcacggtggctcacacctataatctcaacactttgagaggctgagtcaggagagctgcttgaggccagaagttcaagaccagtttgggcaacatagtgagacctcctgtccacaaaagaataaaaaaaaaaaaataataagctgggcatggtggcacgagcctgtagtactagctactcgggagg

SEQ ID NO: 103088 - DNA, 1026 bp, Homo sapiens
aatcaaactaattgaaatccaaggctgggcggggtggctcacgcctgtaatcccagcactttgggaggctgaggcgggtggatcacgaggtcaggagagccagaccatcctggctaacacggtgaaaccccatctctactaaaaatacaaaaaaattagcctggtgtggtggcgggcgcctgtaatcccagctactcaggaggctgaggcaggagaatggcgtgagcccaggagcttgcagtgagccgagatcacgctactgcactccaaactgggcgacagagcgagaatccatctcaaaaaaaaaagaagaaatccaaagatgtttgaatttcttcactaaatattagccagaacctgatatgtaccacagtgatggagtgtggttggtacttaaaggaaaaagaactcaggaagaatccaggaagggggcagtcaccttatgatgatgaatgggttttgccaaacctctcagaatttgggcttttgttttctgaccattgtctcactgagttctctgatgaaagtcaaagctcgtaaaattacagtgtaggtgttaatctagcacagcagttctcaaagtgtggctgggggctggtagggattctcaaggtcttttctaggagcacccacaggatcaaaactgccttttttttttttttccaagacaggatctcactctgtcacccaggctagagtgcagtgacactatcttggctcactgcaacctctgtgccccaggctcaggtgatcctcccacctcagccacccgagtaactgtgactataggcacatgccatgatgcccagctaatttttctatttttaatagagatgtggttttgccatgttgcccaggctggtcttgaactccagggctcaagcaatccaccttccttggcctcccaaagtgctgggattacaggcgtgagccactgtgcctggccaaaactgttttcatgtaatattattttgaaattatttttattttttcgaggcagggtcttactatgttgcccaggctggt

SEQ ID NO: 103089 - DNA, 1034 bp, Homo sapiens
ctataatcacacaactgagagtgagaccctggctctttaaaaaaaaaaaaaaaaaaaaaaaagtatgacccaggcacggtggctcacgcctgtaatcctagcactttgggaggctgaggcgagcggatcacctgaggtcaggagtccgagacagcctggccaacatggtgaaatctcgtctctagtaaaaatacataaattagccgggcatggtggcgggcacctgtaatcccagctactcgggaggctgaggcaggagaatcgctggaatcagagaggcaaaggttgcagtgagccaagatcgcaccactgcattccagcctgggcgacagagcgagactccgtcaaaaaaaaaaaagtatgtaaagttcttggaatatgtgaatactcaacaaatatcactatcaatttctaaacatactgctaccaagcagatggaagtcccttttctaaggtgagcaagatgggtttcttgttgaggaggaagtttggaaagctcttcatatttattttaaggagcacttgggtagctatctcctacatttgattaaaaccggatgcaagcaagaaacttagtaaaggaaatcagatcagaaagaaaagattggcatgatgtaagtggaaaaactcagggaatacaagttttcttctaaggtcatatgtatgatttgaaagtcacaaaattttaatttgatgcttttcatctacaccacctaaatcttccatgaacctcttggttaaaaggctatattaagcacaatacttttaaaaaactagatcagagacatttttagctataaaaggctaactgaaaccattatttgagatccactgggaggcttaagagagttttgaagatagagtgagttaacagaacaaataatgtgtctgtcaagccaaggagcacaggcggctggccacctcccaggactgggggaagcctagctctagacactcctccctgccactgtccccatccattgaaccaggctcttgatgcaacaagggtcacaaatgaggctaaatcagagaac

SEQ ID NO: 103090 - DNA, 1027 bp, Homo sapiens
tcccagctactcaggaggcaggagaatggcttgaacccgggaggtggagcttgcagtgagccgagatcgcgccactgcactccagtctgggtgacagagcaagactccgactcaaaaaaaaaaaaaaagaatccatttgatgtgcacgcatctcttaagaagtgactgaaggctcgtgcctgtaatcccaacactttgggaagtcaaggcaggaggattgcttgagctcaagagttggagaccagcctcggcaacatagtgagaccctgtctctacaaaacattaaaaaattagccagatgtggtggtgcatgcctgtggtcccagctactcgggaggctggagcgggaggcttgagcctgggaggtggaggctacagtgggtggtgatcctgctactccaacctgggtgacagagcaagaccctgtctcaaaaaaaaagaagtgactgaattacataaagctggatctcttaccagccccctgcataccccaatccctctgtctttgcttaggttgggctttcttttatgaataatagaaaataagaaaattgcctgttttgggcaatccaggtgtgtttcagagatttggagttaaaaagtcaagtaaatattttggcaacccaacaaaggtaagaaaagaagcatgcacctaacgggcttctcgaattacaggcttgtccaaacactgccttcctcaagagacgctggtcagggacaaagcctgccctgctgtcaacagcaaggcccggctgagaagtgggcttgcttctcttgctggtcctggccctgagccagataggacgccatttgactttgattcagtctgacccaagagaaaatataccatcagcaagtggaggatctttcctccttaacagactttagtcatattgcttcttcttccttgctgaaaaaaagcccaggtagatttttctctcccgttaaattggaaccctgaagttaggaggcacagtatctcagatactgtcagataacaagagccaccttttcagtctctgtaact

SEQ ID NO: 103091 - DNA, 1029 bp, Homo sapiens
tcagacctttgtgtgtgttttgtgtttgaatcacggctgctctccctggttctcaggctgggaacccactgcgcctgtttccatggtcactgggaagctcttagcgccatgtgcttcaaagggaacctttcccctcccagcactcgctgctgcctgccccagccaggctcacaataagcggctcctccaagccaggcctctgaccctcacttgccaggaggaaaaccttgcctttgccaagcaaggctgtgcagcctcacagaaatattcctcagcagagcatgtggatgcacacacacttgtggcacatcagtcctcacgtgcctacttgtagatttttatgagatatagagcttatagattggtgagagagtgttaactttcctcacatccctctgtttaggaacctttctgaaattgaagaaaagagcaaagcctaagccccttgtaggaaaagagatgagcttgtttggggtaggaggaaaggaggaagaagacccatgtcttttgggtcagcagagaatggaattgaagaacttagctctgggcttcctctccctgcagctggggtggtgagggtggtacctgttcactcttccagggccaaggatgcctgagcagttgcccaccaggcttgaaatttggctttgcttatttgttgaataatgcaggggaatgaagcctctcacatctgactggagagagtcagtggtctagtgatcttggagggctgctacatgatgacactggaattaaaaggtgactgtcaggccaggcgaggtgggcggatcacctgaggtcgggagttcaagaccagcctgaccaacatggagaaaccccgtctctactaacaatacaaaattagctgggcgtggtggtgcatgcctataatctcagctatcgggaggctgaggcaggagaatcgcttgaaccctggaggcagaggttgcagtgagctgagattgcgccattgcactccagcctgggcaacaagagtgaaactctgtctcaaaaaaaaaaaaagactgt

SEQ ID NO: 103092 - DNA, 1383 bp, Homo sapiens
ctcggccgcccaaagtgctgggattacagacatgagccaccgcacccagcccctcttcttaaactgaaactccatacctattaaacccaggctcctcacttctgcctccccacagcccctggcaaccaccattccactttctgtctctaggaatttgaccactccaggtcttttgtgagtggagtcgtgtatttgtccttttgtgactggcttctttcacgtggcataatgccttcaaggttcgctcttgttgtagcatgtatcagaattttattcctttttatgatggaattatatatatcccattgtatctacataccacgttttggttattcattcatctatctatggacacttaggttgtttccaccttttgattactgtaaataatgctaccatatatattctgtatattgatcccttacctgatatacatgaaatagtctttctcatcctgtggcttgccttttcatcctattgatagtatcctttgatacacaaaagttttttctcatttttgtttgtttgtttgagacagagtctcactctgcacccaggctggagtgcaatgctaccatctcaactcactgcaacctccgcctcccaggttcaagcagttcttgtgcttcaacctcccaagtagctgggattacaggtgtccaccaccatgcccaactaatttttctatttttagtagagatgggtttcatcctgttggccaggctgatctccaactgctgacctcaagtgatccacccgcctcagcctcccagagtgctgggattacaggcatgagccaccatgcctggccaaaagttttgactcttaatgaagcccactttatccattttttctttcgtcacctgtgctttcggtgtctcttctctttttttgtgcttgctctttaattcatcttcatctaccttttttttgttttaaacacatagaaggttacacaaacatatcttcctactcagccttggtttataatttactgttgccctaagaatttcagaaaggaaaagaattcttgcttccctggctaggctcttggggtcttgatgtgcaagaagaaatgctgttgtgaatacaaagaatgatgaggaagtatacaaaaggtgccctaggctggctgcgggggtccagcaggctggctacattattctgtggtcaacctcttacaaatggggtgctcctgtccgtctccgtggccagctgccaccagccctatggtgtgaatggcaaggaagtggggactggcggctggccgaactccaggatgcagccttggctggcagagaaccaaaggcagagggggaaaaacactcttgagtatgagagaaataatgctagctccgaaacctataattcgcaagtttaaaa

SEQ ID NO: 103093 - DNA, 1901 bp, Homo sapiens
gtgatgatatggagtaaattgaataatactggatttttggcattgctgcttcattagcatgaggcactggatggggcaggcgtggaggcctggttaggctgggcgcaatgctctaacataagcaaccatgggcctcacagaatattggtggtagcctttcccaggatggtcttgcattgctaataatgctaaaaatgtctgtgttcagagaaaaacattatgaaagtcttaatagtctcaatattatcccctaaatagcttttccctggatttttttcatctgtcctggtcgtttctgtgtcattgctgtaaagtcacacagccaaagtcacacagccattccgagtattgcagtgacaacagcaaggatcccagccaaaatcttgtcctcaggaagagctgagacatgttactctaattatcactgatggttttattgctttggggtcatgtctcaccccttaccccctcacttagtggcatatttgatgttgttcagtcatctgaagtcactcatttatcccctgaatgtccccactggttcccccagtggcagcagtcccccggcctgcaggagttgtagtgcaggcttgggtgatgtgattcctgatgtaggtgagacccctgaaccaagagcagttcagcagctgcagctgctcagaagctaggcttacacaccatctccctgccgctccgtgtttgacagaaagcagagatgcttcagcctcctagctgcacttaaaggtagcctggatgcagtgagcttgactaagtatctcccttttgtagctcagtgtaaaatacagactctgtttttggaattcattcatatgtttattaagcactgcctgtatcccaggcagtgtgctagacgctgcagatacagtacttattaaagtagacaagttcactgcccccatggggctcctggtcagtagaggagacacagagacaactagcagcaagtaaacacaaagacaacaaacagggcaactgcagattgtgatgcagctgcaaggccaacaaactgggtgagtggggcttttctctgcataggctgcctcgagccaagagctcagagtcaaggttcctgaaagaagagagggaaagattcccacagcccactccccacatcagagcttgcctgcctccgctccgtcatctgttctttgacacatctgcaacctggggtgtgctctgatgcttcctgtcattctgtcactttctaacccatcaaacagcactttgctaccatataagtattagtatctgcctcctgtctgctaagaaataaaatgaaggcactcaagtcttacagaaagttagctcctttattttaggtatctcgttaaatattctctacttgattattatgtgacagttgcttttaaatcctctgaaagttgcataatatgctatgtgatacgaaaggatgtatatataaaacctttatttttctaataattgcctataacttaccagtttgaattgttttaacgcttattgtagcctaagaagtccaaagtttaattgaaatccagttttgttttttggctttgggttaatattcttccttccaggctgggcacggtggctcatgcctataatcccaacactttgggaggccaaggtgggcagatcacctgaggtcaggagttcaagaccagcctggccaacatggcgaaaccctgtctctactaaaaatacaaaaattacccaggcatggtggtgcacgcctgtagtcccagctactcaggaggctgaggtgggaggatcacttgaacctgggaggcagaggttccagtgagctgagactgcaccactgcactcccgcctgggtgacagagtgagattctgtttaaaaaaaaaaaaaaaaaaatccttccagacttctttccctc

SEQ ID NO: 103094 - DNA, 1054 bp, Homo sapiens
aacaaaaaaactgaaactggcttggctgatgaaagttgtatcttatactgtgaactgaataatgttgcaagagattaagtgatcattactaaatgatgcccctggtactagtgaaggttgttgtcatagttcatgcagacctgcacagtgtatcgacctcatgttcacatgaagatctagatacctgatcaacgaagtgtccactcagcccctgtcaggtgcattctgggaggtgaagtggtatgtgactgccttgaaggaaggtgaaagcctagagacagattgtaatggtttagaactttctctttagaaaatagtgaataaggaaacaaggctttgctggggcagggggtgggagctctggcaaataagaggttcttctagaacccacttcctttgttctactaagtaaagtcttgctaacgctgaataattatagtcaagaaagcctgaatgaggccatccttttacttgttcaataaaggttaatttaaggacccaatgggacttgagatagagcttgaatttagggatttttgcaaattacctgttaaagccatgaaaacagaagtgtatttgttccttaatatgtgcatgacctcttactatttaagagtgattactgattaaccagggagtttcaaaggagatgttttcatattcagatttaaagaagttgctccagctcagagaactggcttctgttggagtgagctatgaacagagtagggctgctctatctcagagcattgttcattcacctggagaaacttccttcctgtgtcaagcacctgtagcatgctaggggttgtgcctgcccagtggtgcactaaagccacctctgcaatgttttcatccaagaaacatgaagtaggaaggaaaagtaacacttgcctagaaaggaaagttgtctgctccctatattctctatgaaattgagacagctattctttgcccccacaaatggcctttaggacagaaccattgagtgtcaaagacaggcccagcctctggagtatacttgtctatttccatttccaaaggtgagatgttt

SEQ ID NO: 103095 - DNA, 1056 bp, Homo sapiens
tcacatagaggctacgctggtatagaaattgttctagaaaaattgggcaagattttgcagagaaaggaggcttttagatgtgtccttaagcattgaagcgctttgagaggtaatcaagggtccaggacagcagttgaggtaacatgaataacctatgcaacagctggaagatgtgcgtatgccttaacttttcagaaatgggggaactgtgtgggtggagcatctggtgcttggagggcagatagtgtgggaggggagggcggacgggcagaccggatccaaactggatccaaaggagagtcttgaacattataaggaattgagacttgaatctgagaaggatgagaagacagctcagggcatcatgtatggaatgaactggaaaaagattggagacagagaaactgctgcattacagggtagcagggatgcaaagggagagcccacttgaaaatgattctttatggagattggatgtggagagaggaaggggaaggggtagtgagagaagaggaggaagatttgggtttctagatttgtatgatggtgattcccttaacctgagacaagtaatgtaggtttgggagaaacttggtgactttgactttgatcaggactagagccctgactctgactttgaactggagccctttgaactctagccctgaaaagggtcagggctagagatgaaggttgagaagtcattagataggggagtgtgtattcaaaccaggagtccagaatgagcttgtccagaaaagagtatagactaggaagagagaaggggtacagcataggacttaaaggaaaacaagtaagtgagttgggaccatgtaagagtcagtgaagggaacccgaagacctcagagagaagaaaacagaaataggctgaggagcacaaagcaatgtaaacaggttggtagagtagcaatagtacagatgacaacacgggtgaggtagcatggccctgtgcattcatttagcacaggtgtatcagttagcttttgctgcataacaaactgcccttaaaacatagcaccctaaaaacaacagtca

SEQ ID NO: 103096 - DNA, 1053 bp, Homo sapiens
cgcatgatctaggctcacggcagcctcctgagtacctgggattacaggtgcaggccaacatgcccggctaattttttgtatttttagtagagacggggtttcaccatattggccaggctggtctcaaactccggaccgcaggtgatctgcctgcctcagcctcccaaagtgctgggattataggcatgagccaccgcgtccagcctctagttccatttctttaacctagtggattgcaagcccctcactgctttccagcccgaaaggggcattgatgggattgtgaacacaggacagaaagtagtattaatgattattgttacaccccggatgcgtggtagggatgcttgggagcacctttattctccagctagcattagctgtcgggctgaggaaggctagcttgatgactctgccacttttctccttccccctccatcatcagcaccattgtgatgactatttattgagtaccaggactggaacgcatttgggagaaataaaagcatagatttgacacagccttcattctgttagcctatggaaaggtgattatagcacttgttacttgaattagacccgaaaatatagcacattttagggtctaattcaatataggacactctgcgtttaacttatgttttacagcctaactcatgactgctatggccaatatcccttctccacacccccagaccccatcactaaaattccttctagtggcagaaccgtcaccacttatcacagataagtggatattagttgggcagttgacatacaagttctgtgacttggttagctcagttcagagtatgtttgagggcttacttcaagaaagcatgtgtttcattttttaaaaataggtcttaaacctgaaaatggtgtccttgagattctcatcgttctctatttttatcctgttatcgcagaagacccatctggaacttgcattccattgctgtctcctactcaaggcagaggctcctatgcaagaccctgggactcctgtggcatggaggccaaaggcctggacccaaaagtcaggaggacttc

SEQ ID NO: 103097 - DNA, 1029 bp, Homo sapiens
gtacacgacgggtgggagtggggaggaggagggctcctggcgcggggaggagccgcgggaggggggatgttggccgcagggcctcggagttctgagctgtgtttgtggcttcagcgctttgatctcctgccagggaaacctggaaggtcaggccgggctgcagccaagccctggagcgaggagccggcgggtggagctggcagcactgcgccacccaccctcacctcccaaccccccaagcagtgaagcccgcctggccgccctggcctctcgcccccgctcctgccgctgcccctgcccctgcccctctttacctcctgtgtgttggtctcctgtaggccgtagattaaggggctccaagtcttgaaagtaagctagccaaatgccctgcaagtttggcttagtaaaatcatgtatgttgtatatactttaaaagaaaccagatatttttttaaagctgtgtgcgtccctttcctccaccctcctcatccccaccctagtacaaattacccaagaaccacaggtgattccccctgctggttcgtgagtgttagggtctagtttgcctctcctcttctaccaccaccaccacccccgttcctggcaccaggattttctcaccggttacccgtgtgctcttggtgtgtgacctcatttcctatggaatgaaaagtttctgtcggaaaacagggcccttggtgaggcaggccttgggagcccccttgcccagcgagaatgtcctgtgtcatgcagtgactcatgcttcagagaacagcagctgaccagaatgttcaagagcctggtgcctgggtggtcactactaagtgaagaactcgaggaggaggaaaggaaaaagtgaggagtaaggatttaaaatccacttagtggcctccagagggagggggataacaggactcaaagagcctgggctctctggcctggggtaggacccgccaagagggacctgtgggcgtcaggcgtggccagtccctaggaccggctgggtgctctccatcgtgttaaccgccc

SEQ ID NO: 103098 - DNA, 1593 bp, Homo sapiens
ggaaactgaggctgaggctgaaagcaattgagtgacttgtccactgttggcagcatgccagtggcagaggcaggaatagctcccaggattcattcctgactcctagcctagcaatctggtgatgaaacagggtgtggtggacaatcggcagagactttcaatgcattgaatctccattcaaaaagaaagggtcccctgcaagacaaagacagattgtccagagtgccagaacttcttaaactgccaaggaacttgcagtatactgaagattttactgaagttgtttttggtactgtttggtgctaaatacaaggaattggtttgttgtaaaagctatagggtgagactgccctctagtgggccagtggagctattggtctagctgtgttctgggcaactttgctttctcacgccacatcaatgtagagcgattattcctacggaaaggaatttcaattttattctttctcaagcactgtggcccatagtaactctgttgatctctaagcactagccatcatttgcgcgtcttatagaaggctgggtttgccttctatacatacacacattagaagtgtcttacttccctaacaagattcaggctcctaaaagccaggacatgcatgtatgtatgtatgtatatattttgtggagacagggtcttgctctgtcactcaggctagaatgaagtggtgcaatcacaacccaacctctacctcttgggctcaatcaaacctcctacctcagcctcccgagtagctgagactacagttacgtcctgccacacccagctaatttttctgttattttttagataatggggtcttgctatgttacctagactggtctcgaactccagccatgctatatcttaagtcttgtttttccacagcttctgccttgctgtccccttagctggacatggaattagaaggttctttgggatggaaaggaatccttcccccacctcccccaaaaagaatcccgtcacttctcatttgttcctaaaacattctaatctcatccctctgatcagtagttccccaagtagttgaatcatctgaatcccccagaaagcatacacaactcagtttcctgggcctgactccagccctgctcaatcagtctctgtggtttgagccaggaaacctgctttacaaacttcccaagtggcttttgatgtgtagccaggtctggcagccaactgcttcaaaaccccatttacaattatttttcacagctcccaccaccgacagtgtctccagaggtcttcagcttgtgtcacttattaaaattaaccattttgagactcattcagaaatactcaatatattcttctaactgggtgacatgggaaggaaaaaggaaccgcatgagatggaccaaaggcacttgctttggttgccaatggctctgaaacaggaaatactgaaaccaatacctctgtactgactgggcaggttgttgatgtgtaggttgttttcagtatttgggctggataggaagacaaaagtttgttaagttatcaattatgtattttcccctattataagtcatctgacctcatgattaccatacaaggtaggtgaaatt

SEQ ID NO: 103099 - DNA, 1005 bp, Homo sapiens
acggggagcagagcctctattccccgcagacccccgcctacatccgcagctacccacccctccacctggaccacagcctggccgctcaccgctgcggcctggagcaccgggcctactccccagcccaccccttccgcaggcccaagttgagtggccgcagcttctccaaggcagcttgcttctcccagtatgagaccatgtaccagcactactacttccagggcctcagctacccggagcaggaggggcagtccccacctagcctcgcaccccggggcccggcccgtgcctttcctccgagcggcagtggcagcctgctcttccccaccgtggtgcacgtggccccgccctcccacctggagagcggcagcacgtccagcttcagctgctatcacggccaccgctcggtgtgcagtggctacctggccgactgcccaggcagcgacagcagcagcagcagcagctccggccagtgccactgttcctccagtgactctgtggtagactgcactgaggtcagcaaccagggcgtgtacgggagctgctccaccttccgcagctccctcagcagcgactatgaccccttcatctaccgcagccggagcccctgtcgtgccagtgaggcggggggctcgggcagctcgggccggggacctgccctgtgcttcgagggctccccgcctcccgaggagctcccggcggtgcacagtcatggtgctgggcggggcgagccttggccgggccctgcctctccctcgggggatcaggtgtccacctgcagcctggagatgaactacagcagcaactcctccctggagcacagggggcccaatagctctacctcagaagtggggctcgaggcttctcctggggccgcccctgacctcaggaggacctggaaggggggccacgagttgccgtcgtgtgcctgctgctgcgagccccagccctccccagccgggcctagcgccggagcagctggcagcagcaccttgttcctggggc

SEQ ID NO: 103100 - DNA, 1051 bp, Homo sapiens
gaagagaagcaggtggcccgcgggggcggagggggcagcggctgctacactgaggactactcggtgagtgtgcagtacacgctcaccgaggaaccaccgcccggctgctaccccggggcccgggacctgagccagcgcatccccatcattccagaggatgtggactgtgatctgggcctgccctcggactgccaagggacccacagcctcggctcctggggtgggacgcgaggcccggataccccacggccccacaggggcctgggagcaacccgggaagaggagcgggctctgtgctgccaggctagggccctactgcggcctggctgccctccggaggaggcgggtgctgtcagggccaacttccctagtgccctccaggacactcaggagtccagcaccactgccactgaggctgcaggtgagagcaggaaatggcagtaggtcagagcaggagtttccatcagggtcgtcttgtcttctgtcttaggcattttctgaatgacttcttttgtgtccttggttttaaacaccatctgaggctgaagacttccaagggttactcctcagcctggccctcccttggagttcagacccattgagccctctgcttccatgatctcgggatctctccccaagatgcctgcagcctgtcatgtccacagcagtactcatttccccctctgccctgctccccatccgcatgctcacaccaaaaacctagcaccagctgggggtagtggctcatgcctctaatcttggctcacccaaccactttgggaggccgaggctgtggatcacttgaggccaggagttggagacagcctggccaacatggcaaaaccatggagtcggttcatgactcctcatggctgggatattatgtaggagccacttcataaacattctcgttactcagtacaaaagttagccaggggtggtggcgggtgcctgtagtcccagctactcaggatgctgaggcaggaaaatcacttgaacctggttggcagaggttgcagtgagccaagatcaagctactgcactccagcct

SEQ ID NO: 103101 - DNA, 1915 bp, Homo sapiens
gcccccagacctgtccgctacttttctcctccagatcttaggttaggtaacactccagccccctctgagatcacctacacaccttctgttcacttctgtcatcctattgctaaattactttgtctcaaggttcgtaatctctgtgagggagtcctctctgctgcttttcccaaggcctgacgcacaccgggcacccagttaacatctttaatatattgggctttcgtgctacctgagggcttctagaaagctctctacatccaagtgagaggctggctctccaggaggtacctgtgctctcagcacaaatggagcccctctgggaacaggaacctgcttcagccctttagcatacacaggcctgccacatgctggggacagggccacctgagtcccttgcctggtcccatgtgtggtgccagctccctcccctgatgattgttctctctctttcccaggaccgagatctcactcagcagacagcagcagcccgggagcctgagctcaggaggaactcttacctggaaattgggaactgtatggagactccaaactgacttctttcaaaaaacaaaaacaaaaaatttttttagctttgacaaacacacaaaagtggtaataaagagagccctccttgtcaacccaaaatgtgagccccctgtggcaaaaccaccccctaccccattaacaaatcaacagacaaaattctccgagtcctttgcctcttttgataacatgttgttctgttttgtaaagtgtgtgtgcttggggttccgaggtgtgggattgagttctctgctttgtttttttttaagatattgtatgtaaatgtaaaaagttatttaaatatatattttaaagaaccctaactgccaacttttgctgaaaaagaaaaaaaaatcactgctgcattaaatgaaccacatcatgtgtagatactgttgtctccctgaagggagctcaggcctttgaaaagctcagggcttcacctgccttagaaaatgaaccagaaacttgaagtaaagctagttgataggggtacaggctctgaggagcagtgcaaaactgcctctttctttctcgtggcaaatcccaatgtacacgatttcaggtctcagacgccatgcctctccagcccacgcctttaggcaggtgatggcagcagctaggaatagggtgtacatgatccacagccctgcggagccaggtcaagccgctgctatgaaagctccagggtgatggggacgattctgcccagtgtcctcagtctgtcccctcaggtcatggtcccaagtgaaatgacagagttcacagccctggtcttggctgaggtccaggtcatagtaagggcatgttcttggggccctcgacctgaactctgaccctccgggcagggaagaggaggttgtcccctttggttgtcctggctttggagtcctttgcaaaaatattttgggccccctgccactggctgcagaaatggctcgacggggtgtgtggggacagacacccagaaggaatgtacttttgtggccttggtgtccgatggggctgggggagagtgctctccactgacccagcagcacacccatgtgcagtgcgcctgcatctgtgtgggggcagccacaccccttggctgctgcttccttgggctgcctttctgggggcatgtgactggacctacgaggtctgcactgagctccatttgaatgatacctttcctatcccatttcccccacggaagcaccgcttcagggttattcagtcctctgcctcatggctgaaattgctcatctcgtctgcagatgtctactatcctgtctacctaatgcactattatgtattgattctccatgagacagagagagagagagactatcagatagtttacacccaaagggtaggtttttgtata

SEQ ID NO: 103102 - DNA, 1691 bp, Homo sapiens
ggtgagatccgttctccgtcctcgggtgcagtcccttgggggctgctcctcggactgcgccccgcacacctgttatcgagggtgtgagaagcgcctaagctggtgacatgtgatctgggacgccttcatttctcgggccaggagtagcagctgctaaggacagcagcttgcattgcgtggttttagggaagcagggtctggcttttaatatgaactgcaaaaagcagcttctcactgatatttttttgttgttgtttctggggggtttttttgttttgtttttaatgcctttgagtgcatattttcttcctcgtctgaaaccgaactcccaaagtggctttctttagccctggctggaaaaccacctctcaatagccttaagcaataaatagatgagtagagaatgtggcttcaactgggcttattaaagtaagtgtgtctagttttcacttgaacaagtgatagctgcagatggcgaaagaaacccatttaatttttgtagcttacaggtggtagaaacaaaaatgcaattttaaaaccttaaataccaaataccaaccattgccttttttttttttgagatggaattttgctcttgtcacccaggctggagtgcaatggcgcgatctcacctcactgcaacctctgcctcccgggtccaagtgattctcctgcctcagcctcccaagtagctgggattacaggcatgcgccaccacacccagctaattttgtatttttggtagagacagggtatctccatgttggtcaggctggtcttggattcccgacctcaggtgatccgcccacctcggcctcccaaagtgctgggattacaggcgtgagccaccatgcctgcccagcaataccaaccattgtcttttaaattcgtgttggcttctcagacagggagatcactggaataaaataaccgatggtcttattttgtcacacgtaaatcaaaagaaatgtcctctttgaagttgtaagactccaccaatgacagacacccttttcggtggactctgagtggtgtgtagtggttttatagccatggaaactaggagtatctcactttccactgagaacccctgcccccaatccctctaagttggggtgtggcagttgggcagggtcaagtgacccagccctggctgtaggacagccatatacagtgaagagttctagaaccagctaaaaatggaagtttgggtgtttaccaacaaggtacctctttatggatgcagccccagtaagctggctttaactctcagctccttccctgtctcctcctaatccaagcccttttataaaataaagccccttctgtcccactgctcacatacttatgtgctgctagtctctactcgaagttcgtgcaggactaatgcttttaaaatgaggtctaaaaaataattactagtcgagactattattctttaaacagaactgcctttttctactctttatgtaaactctttctattgtgttggtctaacaaggcactattttaaaattttttaatttttcccatagcacttaaaagagattttgtaaagaccttgctgtaaagattttgtaataaaatggtctaagggctctttttccaacattaccatttttaaaaaatgttttaaaagctagaagacaacttatgtatattctgtatatgtatagcagcacatttcattt

SEQ ID NO: 103103 - DNA, 1080 bp, Homo sapiens
atgtgtgacccaaatctccctctgcttctgagcaaaggaagctgcctacattgttgtgcctccggccagcccaggataaccttgctctgggaacagctgtatccatcagatgtgtgccatttacttccttttagtcgactaaggtgtttctttgcttttcacctcccgtctgactctagcaggggatcttaacctgacatctatggtgcttcaaaagtgattcacaatttcctggggatgatccatagctttgatcagcttctcaaagttatctgtgattgaaaacaagttcaggatcactggtatgtagggtccagaacaaagactgtaagcacttttggttatacatttgtgctgcttatgcccaagatcctggtaatgagacttatggttcagcaatgcattgaatttaattattattagtacaggtgcaaaggcagcctcttgagctactgggacagggaaaaatgattgttgaactatataccctgtccctggttctacatacattggaatctcaaccatggcactgttgacgcagctgagccaacatatattttcctgtattgtatgggccacactgtttaccttctgccctctacatacctttgctaacgctctagggcccttgtagttgtctcaaagtcaccaggcctttagtctatgttttctttatccctatacctttctctatcttgtatcaactgaccattccctcctagttgctattgacttattttgtttgttataaaagtgttaaaagcttattcttaaaaaaaaaaacttctccaacaccacaaatatatgtggtttaaatagttaaaattccccattttacctattttccctgaaaccctccccaccaagtcccaagtcccagagacaaccaatttgggtatttgccacttcacattttgctatctgttgtattttattgttcaagttacacatgcttattaaatagttcttttatattttattttccaagttatacatgttaatttattttttgcataaattaaaaaattagtcccaccccattttttattaccttcccctaggttttctattcataggaat

SEQ ID NO: 103104 - DNA, 1002 bp, Homo sapiens
atgacacagtggactttgaggactcagggggaaaaggtgggaacggggtgagggataaaagactacaaattgagtgcagtgtatactgctcaggtgatgggtgcaccaaaatctcacaaatcaaactaaagaacttactcatgtaaccaaacaccacctgttccccaagaacctatggaaataaaaaaaaaaaaaaccagaagtaccattatccactcattccatgatttcagtgggtgacacaggaagtgcttgttcattcagcatatagtcctagagcacctgctttgtgaccgggaccactccaggccctgggaatacaggggtgtgtggaagatatagtcctgccctttagttgctcatagttaatcaggtagagagacaagtaaacaggtgttcagaatcaaactcagcatagactgctgtaggactacacagcagggacacataaccctctttcttgtgggggatagggtggggaggatgggagggccatggggcttcccaggggaaatgatgttcaggctgaaatcttaagaagggaataatattctaagcacagggaatagcatgtgcaaaaacccggaggccagagagcaaagtccagttgggaaacttgcaaatacactacaatttggtctctgtatagaatgtgagctgaagggtagacaggtcatggtggtgggagaggggaagggggagcagcacaggagcagcagcagtgtaccatgtgagaaagtttggactttatcctggggggcaaccagagagctttgagggtttggggaagggctccatttacctcaccagctgctgctgcttttccctttctctgctaccagtcacgctcacttcttgtagttcctgccaaggccacaatctttcttgcttcaggcctttgcacttctgtctggaatgtactgcaaagattattctggttgcagtttgctaactagattagagtagggtaagcctagaaatggagatagaataggaggctga

SEQ ID NO: 103105 - DNA, 1085 bp, Homo sapiens
taatccctattccaaggggaagaccttgtgaagaaggtactgtgctggtgtccccaatccccagggaagcccctggaccaagctgctgggtgtggggcccatgtctgggcctgagcccctcagtcccggaacaggaatgaacaatagctgttagcgctgtgctaagggatttgagtgaagcttcccccgctggaggaaattctgctgtccccatttgcagatggacaaaatgaggtccagagagggtcagggccttgtccaaggtcaccgatgtaggaagcagcagagccaggactggaacttcgcccctactgcggggctctggctctcatcataccacccctgcccgcccggtcctttctttcttctccttttcatcacagcccttggccccgggcccgcttggctgcctcctgcaattagcccctatcactgttccggatcgcagccctgggccctacagagacaaagtcccctgggcccctcgtggcagggggtggagtgtgggtgtaggtggggggcctttgtgggagtggccggtgccaggctgagctggtctggcctgtttctcccctcctggaggcctctgggggcctggaggtgctgagtgggcagaagtgttgggcccaggagggaagtgccgcctcttcccagcccctgccctcaccaaccccactgcccagcctcatccagctcttgggcagcttatcaatgaccacaccccagggaaggaagcccccaggggctgcagggatggagcacatggggatgggtcccttcatctgtggaaacctcgggtcccagctcctctggccggagctgctgcctgttctccatcattcagtcattcaacaaacatcgctgagcgtcctcaggctgagccctacacaaacttggtcccagctcatgccctcctccagcacctgcgtgagtgagtaaagcccagggctattgtgagtggctaatgggtggtgcccaacccctgcctgggcctgagggctgagacccaaaggatgaataagagttggctggagcaagagggaggggctttccaggcagagggatcttcatatgctaagatcaga

SEQ ID NO: 103106 - DNA, 1199 bp, Homo sapiens
aaagtgttgcgattacaggcttgagccactgcgcccggccaacaattttttttaagagacaaagtgtcactctattgcccaggctgtagtgcagtggcgtgaatatagctcattacagcctcaaactcctgagctgaaacgatcctcatctcagcctcccaagtagctgtgactacaggcaagcaccaatggtagagattttaattaaggaagaagaaggaaaaatactgttttttttctctagctcctccctggtaaaaagaaggacagctctggccattgtggaccatcacaggcccacctctcccggcctagtctgggggctgggcatgtgagggctgttgtccacgtgtgtgtgtgtgagggcagatggctctgtgcgtgcctgtatagatatgtgtgagaagatggccaacagtaccctgctgggcctgccttcacctgtttgtgtacatgtgagaagtgtgtgtgtgtgtacacatgtgcctgcatgtgcatggatgtacatgaatgagagcactgtggggccgtgtgtggacatgcccagagatcacagcttcagcctatatgcgtccatgcgagagggcatgcgtgtgtgtgtgcatgtgcaggtgtgtcagtgtgtgtgcaagtgtgaacgcatttgcagggagaaggtttgactgtgactgtgtgcccctctgggcctgctttggtctgtctatgtccatgtgacagagccgatgagtgtgtgtatgtgaatgtgtgagggcacagagtcctgtatctgcaggtatggacttgtgtgcagggaggacggtcatttctgtgattaagtgtcctgctggatttgccttagcctgtctgtgtgcgtttgtgtgcatgtatggagctctgtgtttatgtggatctgtgtgtgcacacggaggcccgtgtgtccatgcgttgtgtgtacatatgcctatgtgtgtgtgcacgtgctcactgcagtgcgtatttgccctgtgtgcctgtgtgtgcatgtgtgtgcgtgtatctgtgtgtttgtgtggatctgtgtgcatatgcatgaacatgtgtgtccatgcattgtgtgtacatatgcctgtgtgtgtctgtgtgtacgtgctcactgccatgcatatttgctcctgtgtgcctgtgtgtgcatgtgtgtgcgtgcatttgcgtgtgcaggcactgtgtgtttgcgagcatct

SEQ ID NO: 103107 - DNA, 1025 bp, Homo sapiens
taccccccagaccaagtcggtgcttgggggcttcccgggcccaccggccccaagggagatgccggcagtcggggcccaatggggatgagaggcccaccaggtgagtgcccgcaatgctgccccacagctcctctggccatcccctccaccaggtgggcccttccctgctcctgacatggccaggatgacctgggccctttcatctacttgcctcttcactcagcaccccaccacggagtgccctgcccacgcctgggctccatgaagtcctctcttatgttcactgacccacattccctgggcacctacacttatcaggctctgagctgggcactgggtggggtcagacatgtccctgcccttctggagcttccatgctgctgggagcagggctgggcagaggagaagcagcaatgcttgccccatgtgaccagggtttctatgaggggttttgggggtttgggagccccaaggaaggaagactcagcctggacgaggtggagaactaggtgctgtgctcatccccctgttagactaccaggcagcctaggcctgtggactccggggccctctctcatgcccactgctccaggctgccttgtcctgtcgctcaaggccaccctgggcctccttgcctcctgtatacccacaaatccgtgtgattccattgcaggtccacagggccccccagggagccctggccgggctggagctgtgggcacccctggagagaggggacctcctgggccaccagggcctcctggcccccctgggcccccagcccctgttgggccaccccatgcccggatctcccagcatggtgagtccccctgggatcccagcaggtggaggtgggggtggagtagccatcagcacagtgcccgctaccatctgccacgtgccttctgtgtgccagccctgctcacgataggccacatgtgacccagtcctccagcaggcgccgttgtcctcctgtggttacaggtgaggaacactgaggaccagagagggaaggtggcttgcca

SEQ ID NO: 103108 - DNA, 1053 bp, Homo sapiens
gggaacctggccctaagggagaccctggtgagaagagccactgggtaagctctggcctggcactggcctctccctgccttctcagccctacatgctcaagagagtattccctccccaggaggccctgggagtgggagcatcccatccacatccccactacagcctggtctcccaggcaggagccttggcaattatcagccccaactccttcccccatcttgttgctcccaaccgggcagggccagccctatcagcagaccccatgccttctgtctcagtctctgtccctgtctccaccttccctctgtggcctttccaggccagggtggctctgccttttcctcctgggtggtttgggctgacccaggccagactgcatcccctgcctccatagccccctcccagccaaggcttagcttgctcccttgtctgcagaacaaagggaagaatgaagacaatatctacacaggagaatgggatagaggacctaggaaaggggcctagaaatgatgaggtacataggagccacgtggtaaaaaggacagggaactagataccaccatacacatcggaaattcatgaagcctgtgaagagacgcctcgaaactgctatgtacacgtttgatgtggttaatgaggccaggtgacctagactcctctatacttaaaggacctatagtttacacaaggtcctagacaccatcacatacataggagacccatgatggatgagaagggaagcctagaaactctcacatatacaggagacagagtaaatgagaaggggacaagaagggggaactagaaaccacacaccgcaaaatctcatgattaatgtggggtcctagaaaccttcacaatcgtccgggatgccgtggctcctacctgtaatcccagcactcttggaggccgaggcgggtagataacttgaggtcaggagtttgagaccagcctggccaacatggcaaaacccccatctctaaaatacaaaaaaatacaaaaatacaaaattagccttaaaggtttgggctaaaaatacaaaaattagctgga

SEQ ID NO: 103109 - DNA, 1697 bp, Homo sapiens
tgaggcatacctggctctgtttggctgagtagcttcaggcagatcccttttcctttctgagcctctgctgctgaccagggtgacgctattccatgctggtccacagtgaggagacgggagggaatggtggccagcacacttggcatggggcctggcctgtggcgtgggcccacccctggctgcttttggttttccttgaccggccgccctgccccgggcagacagatgcagctggggccttccggtggctggaaccctcagagcgacggctgcaggtgctgcaggagggcgtcttgtgcaggaccttggcggggtgctggcccctgaggctccttgccaccccgggtagcctggcggagctgcctgtcacccatcctgccggagtgaggtgagggtgatgggggggatgccagtccaggtggtgggcactgtggcagggctgccagtcaggccctcttctcttcccactcctccaggcctcccatccctggaccgccttatgtggcctcccctgacctctggtcccactgggaagactcagccctgcccccaccaagcctgaggcctgtgcagcccacctgggagggctcctcagaggcaggcctggactgggctggggccagcttctccccagggactccgatgtgggcggccttggatgagcagatgctgcaggagggcatccaggcctcgcttcttgacgggccagcccaggaaccccagagcgcaccatggctgtccaagtcctctgtctcctctctgcggtaaggtggggtgggcagaggtggggtcccctggtataggggccggggtggccctgacactccccacttctccccccacccccaacaggctgcagcagctggagcgcatgggcttccctacggagcaggcggtggtggcactggcagccacaggccgtgtggagggtgccgtgtcactgttggttggaggacaagtgggcactgagaccctggtgacccatggaaagggtgggcctgcccactccgagggtcctgggcctccctagcccaggcagagagtggggcacaggcaggcccttgggtgctaagggctgggctgcatgtgggtagcccgagctcctactctgtctaaagagggccacagtggggagcaggggcacctctggaggcaggagaggccccccagcatgctgccctagtacgtgtttagaataaaaaccagtttgtttttcaacctggacctccttggaggcagcagttgtgtttgactcttctgtgttggcatcagggggatgaatgaatgagtgagcaccaaatgaatgaccagttgtgggagagctgttccctgatgtccagagacacaggcttcctggccctgcaccttgcagcctatacctccaggaggctctgtcctccagcacagagcattctccaccgcccatttctagccctctccgtcgtagcctcattcccagctgcccccatctaagcacacactgagaccaagctgcggggaatcaggtaggggcctttattggccagcacacatctacctcctggcatctgtcacaagcatttgcaggagtaggcggccccttcctctccatgtccccatccccaacctgagatgcgggagggcctgggggctcagagggaagaactgaggcaagaagcccccggtgatccagtcagaggattgggcagcctgacctc

SEQ ID NO: 103110 - DNA, 1016 bp, Homo sapiens
tctcagccaggtatgatttagtaaatacagaagcagagtaccttcatggtgtctgggacatagtgagtgctctgtagcgggttgtcagtgaaaagactgagtggcacgtccagtgtattctgtttaataccacagaggcgtagccacagtgtttggaagtccttggtcccttccaccaatgattaagtgctggctgtgggaagactggctcctggggaggggaggtgggctcagcaggtggccctggtgtagcgtaaccttcaacctggcacacctgggacagccttggatgttggggccactaacctggcacataagccccttctctctcccagtgcaccggctgctgacccatgccctgggccacacggccctgccaggcctgctcctgagcctgctgctcctgcccactgtgggctggcagcaggagtgccacctgggcacgctgagattcctgcatgcctcagccctgctcgccctggcttctgggctgctggcagtgctgctggcaggccttgggctgtccagtgcagccggcagctgtggatacatgcctgtccacctggccatgctggctggggagggacaccgccctagacggccccgtggggcactgccaccgtggctgtcgccgtggctgctgcttgccctgaccccactgctcagctctgagccacccttcctgcagctcctttgcggcctccttgccggcctggcctgtatcctttgcctgagcccagggcccgtggggatgtgtgggttctgtgggtgggtgcctgggaaggaagtggcacaaaggggtgaaggcccaagcaataccaaggagccgtgcacacacattccaggagcttctctgagtcttcctctgggacatgctctgggctgggacctggggtcttatggcctggtggaggtgccaattacaatgtaaagggctacgtgggctccctgtaatatcaatgccattcttcgcagaaatagaaacaataaccctaaaatttatatggaaccacaaa

SEQ ID NO: 103111 - DNA, 1039 bp, Homo sapiens
tattgaggccttctcgatgggccagttggtggctacagacgcctgccatgattagtgcggattgctatggtttatggaggaagagttgtgggccagggcctgccttagcctattcctttttatttcatcatactctgaggaaaagaatttatgaatttccattttacagatgagaaaggagaggctcatctgtaaaatgaggctcatctgtaaaaagatgaggttggaaacttgcctcaggacacagagcagaaagaggtggagcgcatactgtacccttcctgtggaaaggggagccagggccagaggggctgtgccagtaaggaagcaggaggaggcttacagtggatgggttcaccctcaaaggggatgtctcagtcgcaggtctctgagtatggctcaagatgtgggacttctgcccatctgccctaccccttaccctgtcggcttgcccattgtctggccccaccccagggtcaagggcaactgaaaccatctggagcattaaggctgggaacaggggaggggaggaaggagggaggtagtagtctgagggaagggggaggacagaagagggctagagatggccctgaattcgccctggggggtgagggcctgaacccctctttttgggagttcagggcctatcaggactcagaagtctctatgcctgtcccctgccagtccttaaacagaggtgagtggaatggtaagatggcttatgagcgcatgggttagggtctgagctccactaaggccaagctgctgggcctgcgtctccagcctgtttccacctctgtaaaatagggctgttgataaggtgcttgagagggtattggtgagataaaagctccagtaataacttgttattgttttcttttatccccagcacacagccccaggaccacccttgaccgtcctcaaccaagcgatgcatgccaggggcccccatggccaactgtccccagcactgcctctggcctcctcagtcctgatgctgctgatgagcaccctgtggctggtgggggccggccccggc

SEQ ID NO: 103112 - DNA, 3656 bp, Homo sapiens
tcaggactctagctcccgggcgcgacccgagaaccctgaatccattccgcgcacacccggccgcgtgacccctgccgaccggctggcgcgccacccattccccgcggcccgcggattagtcagcagttgttctagtccgggtcccttcccccagccctcccgccgatctccgtctccctgcagggccgactcttcagcgaccgtccctagagccagcggacggaaccattccaaacagcctagtctcgtgctgagagcctctccggtttcacgctgagacccgctcacccccgctctggccccttagatgctattttggcccgagtgtcacgtcgggcgctctttagagaggactgggacaagagttgcggacgcgaagaacgagtaagcggtggttcatccctcctgaccccacccccgtggcctggcccgatggtcgcgcccggggttgcgagatttgcgcctgcgcagtgcggcgcctagagggaaagcgagagggagacggacgttgagagaacgaggaggaaggagagaaaatggcgtccacgggtgagtatggtggaactgcggtcgcgccggcggtagccggaacgcccaaactgggggtcgttcgtctctgggcttggctgggaagactgagtggagttgccgagagggggttgaggcacccgccgcggcccgacgagctcggggatccgcattcctctcccctcccccaaccgggcgggccggttctggaatcttccggcgcccgtggcgcgcggggggcttgctgcggcgggggcgcgcggggcccgccttggcctccattgtgtggcggtcctcgcgccctgagctccgggcctcccgccacgtgggcggggcctgcggccttcgaggccctgcgtgaaggggaggatttggccaggcctcaagccggtcactatgaaaccgccggggggcccgcaggctgctgtccctgtgaggcctccctccccgttttcagggtttcctgagaaaccaggggaaaaagcaaataaagataccgtggatttgtgggccgaggggtgccggcctatgagcgggagccccgtcatccttaagacccagtcggctggggcgtctggcgctgccgagctgccccctctgtggcttccagccccaagccgaacttctgctcgcctgggctttagacagaatgtgcttccctcctccagggcccccagtttgccgctttcttgggcttctccatttttatcgttattaatccacgtcctcccctcccccaaaaccaattaagtggcttcccagggccctttttctgcaaacgccgagggacatccgttgtataataaggccagcctgggtcgagagacgagaaacgctaccagaaagatatttctggtctctctgacctaggaggaacaaaaggccgagccttcatttgaattatgtttcagcagtggcctcgcacgtttattcgcctgcgttaggccggcaggcctgttgatttcgtaggtcgacagaggagaggggaaaaaaggccagtagaagcaatcttaaaggcacttgcaagcaagccccggttgggaactccaaaatgggagtagagtggtccttgatggaaggagcgtttaagagtgtcgcctagccatcacctgcagttcgcaatctgtgggtacactaacccgcgaaaattggcagggtggagcatttttgccccgggggtattctcaggccacctggttccaggccttagagacagtgggagaagatgagaaggaagacaggaaaagttctgggcactccagagtttttggagtccagaatccagcaacttaaggacagtttaagaattctccccatctgtggtcaataaacaggtaagtgttggctgttcgtgccgggataccaaagagtggataccaaagagtgccggtagaagagaggactgaaataccacagctaacctcccggtgggaagtggtttcctaggtgccctatccaccctcttctgctctgcaaaagcctgaaaaggcaaaacgtgtgcgttgacatttttgcgtggctggacgtgccttttttcagtcaactttgttcaaaccttgttcaccagtaactaccatgtgctgtactgtattagaattacagttgtggtttctgttgacacaaagtaaacacattaggcctggctgggggggccttcagagagtcacataagtaatctggtccttagtttcctttcctgtaaaatacagaagttaggctagacctcttaagcttttgagcccttctgaccttccagcataagcattccacaaatttgtcctatgctgacttcagctcaggtactgtgaagctcaactcaggtagtgtgaagcagcttccatagtgactgctctaaagtgttaaaccgttgccttgggttaataatagaagttttctctcctcgtatgttatctcatgtagaaaagtacgtaaagcatatatatccagtgcaacaaagaattggaatgcagactcgcagcaatctagaacccccagcgctcaatcacagtgaagtgatttttagtgaagtcagtggctcacttttgggggttaaaaacgaacacggttgctgaataatctgaccagtttgtaattgtattaggttggtgcaaaagtaattacgtttgcatcaacctaatagcttgcttgagggcctgtgatgtttgtgtgctctaggaagataaatgtaagttcatgaaacaaatttgctaccttctatagcccaccagttagtatagggccgaatcctgtggtttctcactgataagaggtcattggttgttccatatcagctttgccagtttgatgttttacataactgctcttgcgtaaaagtcgtcttgcaaacgttgaacttacatgacagtgatttacaatcacttctcaagcaaagacctcaacaaaacgtgggttaaaatatttgatgttaaatgattcattgctgtgtttattttgtagatgccacatggaaaaaatgatctgcatttagttttaatgtcagagagagtatgacttgtagtgctattgaaaatgcctttaagattgtcatgaacagattatttttttcattataggttagcctttgggcagttgatttgttcctcttggtgattcagggttttgagttaagagtgtgtacaaaggaaagaaagtagtccagtaaagtacagagaggtaggcagataagccaacgtgaagagatggattcagcaaagctctctcaggccgccgagggattgtgaggctggctttggattccatgaagtggatgccatgaagagctgtcaattgttggttttggatgagggactactttctgattggaaaataaaggaccccttttttccgtcctaatggcagtactgtcttcagacagaacaagatatgtgttcttgtggagaagaaagaattgggcagaattttcaaaaataattactttaactgcctttaaaaaaaaactaaatttatctaactttaatgcagtagcgctctgaaaactattttccgtttgtttttactacttgtagacacctcagtggaccagtttttggtccctttggatgcatgttataaatttcataggaaaaggaaaattatagggaggtttacttagataagggatgaaaatt

SEQ ID NO: 103113 - DNA, 4166 bp, Homo sapiens
ttttgaatatggagccttctataattgtagaggtggtatttgaatgttctctattcaagttattgcatttaattcttttgcagctacagtgcttacaccgcccagcccactcaaggatatgcacagaccacccaggtaatctttaaaataattacatgtagctgcacctccaagtaaaatcagtatattatccagttatctttcagttatccagtaaaacaaatgagtaatgtgtttggaatagtaaaatacccaggcattttaaactttcacagtgggagtgcgaaggactccattgtgccatcataaatgaaaccattcagaagctgataattgactctttataactttttaatatgatttctcaagttaggtgccctgttccatgcttggtccttcttcattatgtttaaatttagtgaatttattcatcatagcaattctgcaaaggaagaggatgatatgaccattctgcagaggagaacattgcagtgcatagatattaagtaacttgccagtggttgcacagtaagtggcggggttagctctaaaaactggcgacctagccaaggagctgctgagctctttccagtgaagagtctgttgaaaagcctaggccaacagattctagaaattagccttctagtgttttcaagataatgttgaattctgaaatgatccatgccataaaatggatactaataactgccatggaaacatgttctaggacaagcagaatgtgatgtctctggcagatcttacataactggtcatttaaacaaacctagagaataatcatgctaatatctgaaagaacaactcttccttgcctgattttaagtattatggatgtctaagttcaaaagacagtactcttgatgtgcccaccataagaggacatacagcgttctggttcattttctttgaagtggtatagtagttttaaagtctttttgtcaggctgaaaatctggttttcaattttttctgacagattttagccctcttcattgctttctctgttcatttgtcttcgtaccttttgtttccaatcactaaaactgtgctacgctaagtgctagcagttaatacacctgtgcccttattgctcttcccttgagagtgtcttgttaatctcatgtatagttaactgaggttttgcctgattatcttttttttcccccttttgagaagctgtgaatgacattgcctacttacctaatgagctttttccgtagctaactttaccataatatgagtgaaccagataagggataacattcatgatactgtgattatttgtcttgttttgttgtttttgttttgtttttttaatcttctagaaaggaatgtttttgattttggttctccaatttagtccattttattgctaaaatacaaaagttcatgtatgaagttcttgcattcgtttttttttggagcaggcatatgggcaacaaagctatggaacctatggacagcccactgatgtcagctatacccaggctcagaccactgcaacctatgggcagaccgcctatgcaacttcttatggacagcctcccactggtaaggcctgccttggagagatttttgggtcgttctggctagggcattggctaagaagcttattagtcatgctttcggatgtatattctggtccataccttggcatctggggaatcctttattcttaggaagaggtattttttctctttcttccctactcttatagtcttgagagatctccaatagaatgtgggtgggataaattccaagagagaaaagaacttttaactgtttgaataatctcacgatgaaatggagactatgtaaaagattttgctaatgctaatactgagtaagaatgagtcttcttaaattgagctgcttaaaaatcaaactggttttcacatgtttgcttcatctgatagtgtaccctctactttttgttttgtgctttccacagtagaagggaccagtacaggtttgactatcctgctcattcttgcatgggaaatgctttccatcttgtctaaccctgtaatgttaatcctttaggtgttttcatttgttgaacccccaaactttctaacatcacacacagcaaggtgctaatgaaaaactgcttcaggtgccatttgcagatccatgtcctattctttatatgattttgggaaaggtttttttatttaatattactttgtttcaagccttaataatagttatttaccttcccaaaggtatttcaggtgatttctccccagctgattttcccctgttccctgaaggatagattgcatgatgagatttatttagaggagcagactgccaccctgcatgtatcatgtttgtctattggttggtttctagtccagacacattttattttctgttttaagtgttatgaattattttaatccatggtatgtcttgaatatatataacattattccaagatactaaaaaataaactattctaagaattagaagaaattgtattccgatactgaggttgggtgggatacatgaaaaacctatgataatttttttgtgttcagtgctgtgtaatgtttcaggctgtctccccctgcccttttattattgctgttataaaagactctaataaagtcttaaagatatcagagctcttattttcaaactgtctttagttctccaaattatatatagtccagttaaggggaaaaacctgtctgtaatttatctcattgagtaccagtgtcctgattttgatgggaagtaattcctaacctcttctagggtgtttctcaaataggatgggaaatgtttatctaaactttctagtggtgttaattgcagctgtgggaagagctggaactaaggttatgcagtttggattttttagcatagaattttgaaattgtgagataaacttcatgtattaaagccattacattttttaaaacaagcatgatgtgaaagttaatgtggcctagatctagccttccgaatccttagatcattttacaggaatgagacggagtgatttataggcaaattaatggttctctagagccatgtatcacattgtcgttggttgagaaatccccatcatgactgtgggcctaaaaagtacaggtcattctagtttagagactagtagctttgatgagctggagattgcacttagtaataataatgtttgtataaaattcacagtttatagagtggccttcttgtctcccttaatcctcccaagaacttttggggtataaaaacaccaaaattaagcctgatgagcaaactgtgtgaacaaaacttagcaggagcctaattggtagtgcgtgggttcaagcacacatgctgcatttttccttacctcatactgcctttacacatgaaagttatcggatagtcattggagggaatacatagaaatacactgttctcttctaggatttttaaaaattaaacttcagaagaaaggggttatataaacctcaattcaatggaattcttaaaaacttcttaatttttacgttgaacaaaagttttggtttgtgtaatatttcttaccacctttttccttcaagttgtcagcacatagtaggtgtgttttctttttttgccactggtcttttgtttttttgtttttttgttttttttttggtcattaaatcattttgctctgttgatttttgttcattttgcttggctgcttttgtgggtactacagattaattaaaaggttatttattaacccagtgtctattgctgtaatctttagcatgacaaggccctaactgttgctgcatagttttatgacatgagttattgccctgatcacttttagttttttgtttttttaattgccctccttgtaaatcttatagacgtgtcatgtagtggggtgtaatcggtatatgaacggtagggtagatggtattagattctaatttaaataaatgaatgccttatgtggttgaccttaggactctgcaaaaacttaagcagttcagatgaacaacatgccaactcaaaaacttttattgcttggggcttcctgttttctggaactatgtatactttcatacacattttaactcagcagttttgacaaggacattactatctctgtgtataatttcagaatttccttttaatatttgaggtagagaagaaaga

SEQ ID NO: 103114 - DNA, 3522 bp, Homo sapiens
ttaattactacccaaattacaggttttagtgctagaactagtacctggatcattttctaattattttaaaatgctatgtcatttgccttttaccttttcttctgggatgttttattcctgcttgagggtattttggggtaagtttgtttacaaacttgttaagacgacctgctagcaaaatcagtacagacttggcaaaaacagacttgtctcctattcacagcattcaagagggggcagaaggaaccctgttttctgtagcatgacatgccatttctgttaggtgtggttttagagcaaatgagacagttactttaccaaaaactaggtacattcagagaacttaggctttaaataccagtttgttgctactcttgcggaagggggaatatttaaagggattcaatatcctgatggtttaaagtaagtggtttacaaattgttctgataatgagtgtctaggcagatctctgaggggacctgaaatctgatgcagctctcctttgttctaggttatactactccaactgccccccaggcatacagccagcctgtccaggggtatggcactggtgcttatgataccaccactgctacagtcaccaccacccaggcctcctatgcagctcagtctgcatatggcactcagcctgcttatccagcctatgggcagcagccagcagccactgcacctacaaggtaaggccatggtgtccttaatgcgtcagtcttatgttggagggaaagaaagcaactgtgtacacttaaaataatctgtggtttagttccttattagtggttgctttcatatactctcagatgttcactgttagtaactgatgtgctagaacataccacagaaatattctgcatttaacagtgaaattggctgggcgcggtttctcatgcctgtaattctagctctttgggaggccgaggcgggcggatcatataaggtcaggagtttgaaaccagcctggccaacatgggtgaaaccccgtctctactaaaaatgcaaaaataccgggggggcgcagtggctcacgcctgtaatcccagcactttgggaggccgaggcagggggatcacaaggtcaggagatcgagaccatcctggctaacacggtgaaaccccggctctgctgaaaaatacaaaaaattagccgggcatggtggtgggtgcctgtcgtcccagctactcgggaggctgaggcaggagaatgtcatgaacccgagaggcggagcttgcagtgagctgagatcgctccactgcactccagcctgggagacatagcaagactcggtctcaaaaaaaaaaaaatagaaaaattagctgggcgtggtggcgcacacctgtaatcccagctactggggaggctgaggcaggagaattacttgaacctgggagatggaggttacagtgagctaagatggcaccattgtactctagcctgggcgacagaggaagacttcacctcaaaaaaaaaaaaaagtgaaatggtgctatcgaagggtcaaaatgaggaatggcactgaataggttctctggtttcagaatgaccttttagggtaggagaaggctattgtttttaaacccagaagaagagagagagagagtgtgtgtgtgtgtgttttcactcaaaacagcataactgatagaattgtacttttgaattgtacttttgatgcttttatctttgatttcattgaccctgtaaatgggtaaccgctttctctttggcaaaaacatggtagttcacacaggcaggaggggaagggagcatcatgtgagtcaagaaatggtcgtatgacctaattgtctggaaaggacataaccatattcaagaaatcaaacattactgtctcggcttaagcaattgacatgacttccctacattgtatagaggcttaatctaaatattataggcaaataaaaattcttaactgggtaccctgctataggatgagcagagctcataccccatgactggttagcaggtaaacagtataattattacttaacaaaagattttagatctttgctttaggcagtcacttaactggcttgtgtatacagtcttgaaaggacattgaattctggtttgaaagaagacattttaggaaatcaacttctaacctagatatatctgctctagaggtaagaaattagctctgacaaacactcgtgaaattacttttaaaatgcacagtgagtaatcggagccgcttggcaatttacccttggtagaccacctttgcagtagctaagttaaacttagtggcttattcctgaaaggcctcatttccgagtgtcatcagatgtatgaagtcccatttgatactctgatgcaacagtatatccaagccatatctggagggttttatatatgaattgggttttgataagtcatcctttttttttcttttcacttgttaccactttaaaacagctgtctgtctcataatcagtggcaactgctttttcgactggaaaagggtatgggacctatttcagctcaggaaaagttagtacttcacaccctctctggtttttctgggttggttggttggttggttggtttttgagatggagtgttgctctgttgtccaggctggagtgcagtggcgagtgcacccaccacccaggttcaagcaattctcctggcttagcttcccgagtagctgggactacgggcatgtaccaccatgcccggctaatttttgtatttttagtagaggcaaggtttcactatgttggccaggctggtctcgaactcgtgacctcaagtgatccgcctgccttggcctcccaaagtgctgggattacaggtgtgagccaccgcacccggcctgcctgttgattctttggactttgcttaaaatattaatagctctaactcagtctgctgcagccttgatgtaaagtgttagggccaagaggtaatagaaacccctggagttttccttggaactgagattaattttcgtcatttaacagggatacttacttccaggttcatctgagcagggacttgggaggggtctctttgccttactctggtgtttccattacggagactttgagccaagttagattagtttatggcagcccagtttaggaaatgatttttttctggttggttggatggtttggttggttttttttttttttttaagatggagttttgctcttgttgtccaggctagagtgcgatggcacaatctcggctcgctggagcctccgcctccggggttcaagtgattctcctgcctcagcctcctgagtagctgggattacaggtgcccgccactctgcccagctaattttgtgtgtgtgtgtgtgttgtttttttttttttttttttttttttttttttttttttgacagagtcttgctccgtcgcccaggctggagtgcagtggcgccatctcagctcactgcaagctccgcctcccaggttcatgccattctcctacctcagcctcccaagtagctgggactacaggcacccaccatgatgcc

SEQ ID NO: 103115 - DNA, 1033 bp, Homo sapiens
tctgccttccaggtttaaacagttctcttgccgcagcctctcgagtagctgggactataggcgtgtgccaccatacccagctaatttttgtatttttagtaggtggggtttcactatgttggtcaggctggtctcaaactcctgacctcaggtgatccacctgccttggcctcccaaagtgctgggattacaggcatgagccttcaaacctggccaataccagttcttttcaagcttcatttctgtgcaagaatgtatctattaatttctcccatgtaattgacataatcttaatatttgtctttcatacaattccttcattctgaagtttcctctattaatactcagatttcatagttaatcaggcatgtctgaaagattgaaagtagcaaagacaaatctttgagggaaaactactatttttgtgttgagtacccttatcccttcagaaaatcgttaactcgagattattggcgggcaggcttggaactgaatgcctcacttcactctctctatattttctcagtccccatttcactgggtcagccttccccaagtgcatattcttgccacaatacaggaagcatctaaactcccatatttgcctgccttgaatatagttgaaaatgacgttttgttttgttcttttgagacggagtctcgctctgtcgcccaggctggagtgcagtggcactatctcggctcactgcaagctccgcctcctgggttcatgccattctcctgcctcagcctccccagtagctgggactacaggcgcccaccaccaggcctggctaattttttgtattttttagtagagatgggggtttcaccatgttagccaggatggtctcgatctcttgacctcatgatgtgcctgcctcggcctcccaaagtgctgagattacaagcgtgagccaccgcacccggcctgattttttgggtttttttttggagacggaatcttcactctgttcccgagtcgccaaggctggagtacagtagcggatctcagctcactgcaaactccacc

SEQ ID NO: 103116 - DNA, 6428 bp, Homo sapiens
cactctgtctcaaaaaaaaaaaaaaaaaaaaaaaaaatttttttgttttaccctcccatttaatgttttattctgaacacaaaagtatttgctgagttgaaattcaaattgttgatgtgtagaaagtaactactgttttatggatgtctgtgtcacatggtgtgaatgtctcttttattcaggggatttgaaataacaagcctctttctaaaaaagcttttttttttttctcttctctctctttcagctattcctctacacagccgactagttatgatcagagcagttactctcagcagaacacctatgggcaaccgagcagctatggacagcagagtagctatggtcaacaaagcagctatgggcagcagcctcccactagttacccaccccaaactggatcctacagccaagctccaagtcaatatagccaacagagcagcagctacgggcagcagagtgagttgctaagagagaaaaccaaataagaatgaatgtgtttagagtttttttgtggggttgattttttttgttggtttgtttttcttttgagatggagtttcactcttggggctgaggctggagtacagtggtgccatctcagctcactgcagcctccgcctcctggttcaagcaattctcctgccccagcctcccgagtagctgagatgataggcgcctgccactatgcccagctattttttgtatttttcgtagagacggggtttcaccatgttggtcaggctggtctcgaactcctgacctcaggtgatcctcccgcctcagccacccagagtgttgggattacagtcatgagccactgcgcccagccacgtttggagtttttgaacagggggaatactctttgccattgtttgcttttggaatccaggacacatctttagggcatggcattccagctaacatcttggatgccccagtgaagatttcagtgcttttttccaatttgtttttagtatgccttggcaaaaaagaaaagagatactaattgatcagaaaaaatgttttagactgctagccctgctgtctttggggaagttgtatgcagtgagtaaattcaacatcgtttttggcctccctatcagtcattaatgtaaagtggggaggcagctattgcaggccactatgattttgatagtcaagtaaaagctatgtttttttgttgctgtttgtttatatccattaaggggaaaaatggccaggcatggtggctcacacctgtaatcccagcactttgggggaggccaaggcaggaggatcacttgagaccaggagtttgagaccaccctgggcaacatagtgagaccctgtctttttaaagataaataaagattctttaagaaaatagaaaaggaaagggggaaaaataatcctcctcacagaatatttgcagttcttctgtatggagagaggtaaccaaaacacataattatcttcagaatttaggatcattgctctttttaaattacattctatccacggggatttctcaacaactcaaaggagtagtgttgatttatggagctcagcccctagcagtgtgctaaagccctaagaaacctggctctgttttcatttcttgagtttagctcaaaagaagctgcttttggagacatcttaggatatagaaccctataaactatatgttagccagagggctttttttgttgttgttatttagaagaggtttattataggctaactatataaggttatttcagctgtgatgatccagcagttttgttgaacttaaaagagcctacctattaaggatgctttatcgtgatgtaaagaagatggtgccttggttagtgccttggaattgaggattttgtgattccaggagaaagtacatcaggcagtggtgtaaatgctggtccatggcttacagatgtgactctttcctcaggttcattccgacaggaccaccccagtagcatgggtgtttatgggcaggagtctggaggattttccggaccaggagagaaccggagcatgagtggccctgataaccggggcaggggaagagggggatttgatcgtggaggcatgagcagaggtgggcggggaggaggacgcggtggaatggggtaagagcaaaccttttctccttttacctaattttgtttcatccataggattttcagtggaaagaagggactgaaagacataagaaattaatttctgcatttccatggacaatctgttgagctcaagccatcttctaaaacatggaaatgtcatctttgtggcatatattaagtggcagtttattttctttccctgccagtatacttcgttgggtcggggagaacaaagaatggttttgaaaccagagctttcagttcccttcatggtttccagaggtgagaagcctctgtgggtagtagatttgggatggaacacacacaacccttctaatgaccctaagttgttaactaactgcctttgaatggttgtcttgaaatacctggtgtatatactgcagaaaaggaatgcagctgttttccacagtgtttgtccccaacttctgtttgtactcagaatcgttgaacatatgaagattttggtcccataatccttaaactatagcctgaggtgcacctgattacatagagtttggatggagcaaagaaaaatccaatagcattttgcagagtaatgtatataattatgggctcacttcctactggagatgttgaaagtctaaatcggtttgaccattttgattgatggcacaatctggtttagaaaactttgtttagatcaatgacataaccctgctgcctctgcctgcccttcccctcccttctcccatccccttttccctatctggtgtctgtactttgatgaaggtgagctataatattggtggttaacataatccagaaggcttagttctgtgtgtgttctgtccctatataaactggtaaagaaaaaaaaaagttatgcagaatgttagatatttacatttgatacggtgtgccactattcaaggaaaaattaaatagcattttttaaaaaacagaatgaacttcaaaattaaagttgatttttaacttccatattagcaaatactcttcactactgaaagacagtactattttgcatattctgcataactttaagaaagtctttagtgaaatctttattggaagaaagtcatttgacaacaggcaaaaatttaatgattcggtatgaagtaaaatcaatcttctgatttggaaaatactctattataaaggtttcacttctttttggatgttttaaaatagacatagacacttgaaagtactatcatcacgtctcaaatcacctagaattcctagtatttttaaattgcaaatacaatttcaagtttatttaaatactccagaagttataatcctactaattgtgctagactttgctagtagagggggcccctctttctggatgagaagtctctcttgcagccatagaagagaccatggctttccccataggtttttcaacagactgtgaagcagtctgtcggatcctgtggggatagacgggcatttccctcgttgcccccctttttattgtggtgtggtgatggttttcagtgtcttgtacaggtaaggcactcaatgttgttaacatgccctttttcattgcctcagtattttgatattttcattggctgttaaacgtggaaactttttaacatgctttgtcgcatttatatgctacaggttacaaagtgagagccttgtatacacttcaatacttaaaaagtacccgtactcagtactcagccggcagcataatgaaaagtgggactagacacggtgtccatatggagaggaaaaatatacatagaatatttttaacaaaatgtattcattgtataaatggaatccttctgtaactttggtaactgcatacttgttgtttggtaatgaaccagaggaggtataatactctagaattgtgtaacattaaagtgtaaacttttgtgtttaaagagagagaacattttatggtgtgtacttttaaaaaggaaacaaagctgcatgcaacagcttgaaattgtatattcaggtattaaaggtgcaatactggttagaaaaaactcagggcctcccactggggagctgcctttatttaattttaaagaaaacaaaatctaacccaaaaagtccaattcatatttccctctcccctctttaagtaattttacatggccatagtcattattctaactgatatgtctataaagttgcacccccagtccgttgagccttggtatttgttgtaaattctcctttcacagcgattgttaaatctattcgtgccctgagatgtatggctttatgctgaagattggctggatgcgtcctctgatgtgtgttgtaggaatttaatgtggttgtctcctgcttttattatactgtgacttgttaggaaaccctgggcctcatttggctctcccttgggagaggttgagggtgcacctttatgaacatggaaaggtttatcacagcagttaacccccacttgctcctcccctctataccaagctcttctggtttttcacctgacggggtgggtgtttgggatctattttttcttgctaatttgccaagtattgcactattaataccagcccccgaaatgaaaggaaccaaccacactggtgtgtacaatcagacaagcaaggttgtatattgaggaaatttgagcaagctgccctgaagaaaggcatagtgacaagatgagagagatgcattgtttggagatgtgtttagccagtgcccttcttccccacgagcccccccaaggctcagagcggtactggcttttaaagggaaaggccttcatttcttcgtttatccccccagcagcgctggagagcgaggtggcttcaataagcctggtggtaagtttttgagtattaccatagatagtgtttaaaaaaaaatgcagtcagtttttagaaaactataatttttttattagtttcataagtggtttaaaaatgatctatacaaaagagactaatgggtactgccggcattgtcttaggggttaataaggttaacctatggttacaaaacaaagggtaacttgaagtattgagtaactgcttctgtaatatgggggagaataaatttttaaatttggtttatttagaggaaaaattttgacttaaatttaacactgatttggcacataagcattgagagtgtatttggttaatggtttagaagcaaaccagcaaaggaaaaaagcaaaccctagcaaacctttcacaaatgttaaagagacactgctccattttagcagtgcgggtcattttgagtttaatgaatccccatcaaatggtggtatagtagatagctatgtgtgtttgtaaggtttgtagcttgcaagacgtgcactaataatattttatatgatctttcctggttggcaggacccatggatgaaggaccagatcttgatctaggtaattttgaattctagttgtgcttcatatcgtgctttgtaaattaatggtacagaggtaaatgcatgcgtagagttcagcagccttatagaccagtgtgatattcttgctgtcaaggacagtttgggaaatcctatgtgagcatctactcataattgccttaagtgaagtaaaccaaaagtttgatagcattcttcttagtatgcttggtagttttcttagatttatgatgaatatccttgggcagtagtgatcaggtagttaagaaacccctatagatacatgataataattctcctgtcttgttgtctctgaaaggcccacctgtagatccagatgaagactctgacaacagtgcaatttatgtacaaggattaaatgacagtgtgactctagatgatctggcagacttctttaagcagtgtggggttgttaaggtcagtaaaagcataaccaggtcatctggcagaactttaaaccacagagcattttaaagagattgaattgatgttgagagttgttttctaaggttgcctttgcctgacttctttctaggtatcttatggtttgttcctttttaaaaaagattagcctttttttttttttttttttgagacggagtttccttcttggtgcccaggctggagtgcaatggcgcaagtcttggctcactgcaacctctgttcaagcgaatctcctgcctcagcctcccaagtagctgggattacaggtgtgcgccaccagctaattgtgtctttttagtaaagatggggtttcaccgtgttgggcaggcgggtctcaaactcctgacctcaggtgatctgcccaccttggcgcctcccaaagtgctgggattacaggtgtgatcccctacgcccggccttccctcctccacccctagggacagagtgttgctcaatctcagcctcccagg

SEQ ID NO: 103117 - DNA, 1050 bp, Homo sapiens
tattcagctgaaagactagtcatctgttctaactggaggaagtagtggctgtgttagactaaccaagaatccctgtagttcactcacagcctgtacactgtccttcacggtttaaggataattttctttatgccagtcatgtcttatgtggtggtatcaaagtctgactacccctacgaggtggctgtgctcagtggatacctgtctgggcatagaaaatgccagggcaggcaaaccagcatcagaagatggctaaggcaggagtggggcctatcctgttcacttccacactttggtctactttggtttttatgataaagcagggatagaggagaaaataacttagaattctgaaaaacttaaaagcggagaaacggtgacatttagtgacttactacatgtgagaaattggtacttttcctggattttgcctggacttttttctcccaaattagtatattctagtcatgcctaactatgctattctttgtctagatgaacaagagaactgggcaacccatgatccacatctacctggacaaggaaacaggaaagcccaaaggcgatgccacagtgtcctatgaagacccacccactgccaaggctgccgtggaatggtttgatggtgagatgtactcactggcattcttaatctccctggctatagaatatggcatgagggagaaacttgtgaaccataggagcaagaagaccttccatctcttcctgggggaggtagatggccggtctccctgcagtagtagtagcacccagccattgaccctggatttggagatccctttattttgaggcattagtattacaaatcaaccttgcttaaagtggcaaacacttcctaagcacagattatcagaaggtacagaaaacccttcaaaagaacatcttagccagtgtacatttgcatatagataaatatatatatttaaatgaggccttgacattaatggtgggatttcacttcagacaaaaccaacttgaaagcattgaatgacttggccatgtccagtggcttgcacctgtaatcccagc

SEQ ID NO: 103118 - DNA, 1593 bp, Homo sapiens
tgccctaaagcatgggtgtacatagatcctcttgatagtgagtgtgtacctgttcacacaccacctttccttgtttatcttccttagttcaattggtgatttctgctgtgatgtaattgtatgcaggggttgtggaaaccagaacttcgcctggagaacagagtgcaaccagtgtaaggccccaaagcctgaaggcttcctcccgccaccctttccgcccccgggtaggtgcaggtttcatgagtgtcccctcagcttcctggtgctaaacctcttttcttatttgtgggcttggtaaactgcagttgccctctgcttaacaactttgagttgtcgtgtcctcatttctaaattgtcagcccgatgccgagattgagtgaagtgtctggtttgttctgctgtgagagaaggaagcagagcagcttccacagtgtccacagggcctctgcagccacccactgactgctttcgccctgctattctcaccttaggtggtgatcgtggcagaggtggccctggtggcatgcggggaggaagaggtggcctcatggatcgtggtggtcccggtggaatgttcagaggtggccgtggtggagacagaggtggcttccgtggtggccggggcatggaccgaggtggctttggtggaggaagacgaggtggccctggggggccccctggacctttgatggaacagatgggaggaagaagaggaggacgtggaggacctggaaaaatggataagtaagtgctggtgaaaagcagctgtgggccgccaggcacagtaagaggacagcccttcccagcttggttggcgcaagtcctcatgtctctaggaagcttgtgatagtggttgggaggagccaggaaggggcacctgggggctctggaagggcttcctcaccccttcccattctaaccgattgggaggagccaggaaggggcacctgggggctctggaagggcttcctcaccccttcccattctaaccgaagggccctctttaccttgcagaggcgagcaccgtcaggagcgcagagatcggccctactagatgcagagaccccgcagagctgcattgactaccagatttattttttaaaccagaaaatgttttaaatttataattccatatttataatgttggccacaacattatgattattccttgtctgtactttagtatttttcaccatttgtgaagaaacattaaaacaagttaaatggtagtgtgcggagtttttttttcttccttcttttaaaaatggttgtttaagactttaacaatgggaaccccttgtgagcatgctcagtatcattgtggagaaccaagagggcctcttaactgtaacaatgttcatggttgtgatgttttttttttttttttaaataaaattccaaatgtttataaagagtcatccttctcggcctctgttccacagtcactgtgtgtctgctgggagcatgctcccaccccacccaggagaggggtgccttccaggtaaacggttggttcagggtttgtgtgaggggaaataagcggttgtgacatggaaacagactctggccctgatgcagcctctgagacccact

SEQ ID NO: 103119 - DNA, 1016 bp, Homo sapiens
tgggcctgctggccccacgcctcgtgcagtttgagcaggagattgagcgggagctgcgtgctgcacccccagcccccaacgcccctgccgctggggaggacaccactgaaaccgcccccgcaccagggactcctgcccgcggcccccgcatgacacccagcgacctgcgcaacctcgacgagctggtgagtcccccagcaccaggtgccagggacccgacagcacagccagtgcctgcaatctgtccctgaacctcccagggtccaccctgctatctgcagaacagtctgccccacaaaaagagtgcacatgttgagcaccaaaccgaggaatgtatacctgaccccaaggaaatgggtagcccacagagagggaggtgccggggagatgacgcagcccagccgggcctgggacaggatgcgggctcctggcacgatcttccctcactttgtgtgctaactgtgcctcaactgagcttgtgcattccttcttctggggggccgcatgatcggggcgcctcctctgtgccctccctgcagtcagtcttaggcagatgtacccacaacctcatggaggctcgaggttgagcgggtgctgtgatgctcggttgagacgaggcatggaaaaacctgggcaaggtgcctggcacacagtaggtgccccagggggctctgcaggtctccccactccccaggcacccctgggaagcctagctgggttgctgctgttgctgggagcagggatcctgtttggaattacaggattcgttctactctaagcataggcgttgctgggccctgcccccaagtctctcctctcccaggatctgggtggcccctgccacccctgagggctggaccaagagtttccttcttatcagaaggtcaggactacaatgtgcctgcctgggaggcagatagcggatggcagtgggcagagcctggggccccaccccctgtcctggaccagggtcactcaaggccccacctgcttatttcctctggcggcaccactgc

SEQ ID NO: 103120 - DNA, 1386 bp, Homo sapiens
aggaaacttcttcttccgtggcttttggggccctgggccgctggaggaagctgctcacttctccctggaagtccccaggacagaccgatgcccctgacagccccgtccaccagccacataccctgctgttcctctccctgcctgttctgcatgccagtccttccgtggtaccccatctgtctctattgtccccctgccccaggccccgggatcagctgcccccccatccccgctcccgccgctactccggggacagtgactcctcagcctcctccgcccagagcggcccccttggtacccgcagtgatgacacaggcactggcccccggagggagcgacccagccggcggctgaccacaggcaccccggcctctccgagacggcctcctgcctgcgcagccagtcccgagaccggctggatcgcggccggccccggggggccccaggaggcaggggagcccagctgtcggtccccagccctgcccggcgggcccggagccagagccgcgaggagcaggctgtgctgcttgtgcgcagggatcgagacgggcagcactcatgggtgccaaggggcaggggcagtgggggctcgggcaggagcaccccccagactccccgtgcccgcagccctgcagcaccccggctttcccgggtctccagccccagtccagagttgggcaccacaccggccagcatcttccgcacacccctgcagctcgacccgcagcaggagcagcagctgttccggcgcctggaagaggagttcctggccaatgcccgggcccttgaggctgttgctagcgtgacccccactggaccagcccctgacccagctcgggcccccgaccctccagctcctgactctgcctattgttcctccagttcctcctcttcgtccctcagcgtcctgggtggcaaatgtggccaacctggggactctggccggacggccaatgggctgcctgggccccgaagccaagccctttccagctcctccgatgaaggcagcccctgccctggcatgggggggccactagatgcacctgggagccccctggcttgcactgaaccctcgaggacctgggcacggggtcggatggacacacagccagaccgtaaaccctcacgtatccccacgcctcggggcccccgccgcccctccggacccgcagagctggggacatggcatgccctgcactcagtcaccccgagggctgagccagattcctggatgtgatggaccagctcagctgtccccagaccccatcccttctccttttcctttgtggccttaacccttctgcatcagggagccccctctgcctcttgagtaccagacctcatgggaccagaccccttgggaccacatggcacaatgggacctct

SEQ ID NO: 103121 - DNA, 1019 bp, Homo sapiens
ctggccaagagagtaaaatctagcgtcttgcttgggatggtcagatcccttctgggagttgaggattggcagcagagacttgggtggtcccagagttttcaaggtagaagcagcttatactccaggcccctggcattagacagagctccttgagggcaggacagggcaaggcctgcctacctgggcccaccagtgcctggcccagaggagaggaacagagctgggcttcaggcctgcagccaggctggggcagagcagagcaattggcctggggctctttctttctgtccagatggccatctgggggaggggacccacagcccatccttctgtccagggtccagaacatgggaaggctggcacggtgagaggctccctgccaaccacagccccagctcccgagtcggaggagctcacctgtcccgcatcagcacctactccccctgccatccctgtggggcttctctctccccagctttggcctggcccccgccacccccctccaggtccacgcgccactcagccccaaccagacagtggagatctccctgcctctcagcacggtgggctcggtcatgaagatggagcctctgaacaacctccaggtgggttccgggcagggcaggcaccccagtccttactcacctaccagccgggccccactggggtcagtagaaggtcgtgtctgcggagtcatgctcttagctgcagatgtgttggggaggcccaggttggggaacgaaggggtgtgtttaccagggaaggccctgggagagaatctgctcagtgacactcttcctggggcctcagaggtggcgtcaagccccagagactgactggggacccccttgtgcctaggtggccgtgaagaacaacatcgatgtcttctacttcagcaccttgtacccactgcacatcctctttgtggaggacgggaagatgggtgagtcatgagggagcccgctggggtgcctgaaatggggctgtggcttgggaacctggccaaggtggtgccttta

SEQ ID NO: 103122 - DNA, 2131 bp, Homo sapiens
gggactggtccaggatctcacagctagcagagctgggactcagaccagttctgtctcattccagatccctgtctgcgcctcctcctctgttgttcccaggtggttggtgtggcctggtggcaccgtcctagggcactggcatccagttttcttcttagcatgggctgagggctagaagcaggcggccctctcccttcactcatcctcacggaggacctgaaagatggacctgctgtgggaatgggaatggggaagaagtggggccgtgtggacagccctgtcggggacagtgaggagactcagtgcctgtcctgggggacagctctgcctggaggctggggtctctttgaccttcctgagacatcctgatgcctccaccctacttctgtgtcccggcaggagtgagagcgcagagagccctgagacagcccctactggagcacctcctggggagcagccagatgtcatccccgcccagggcgacctgctgggtgacctcctcaacctggacctcggccccccagtgagcggcccacccctggccacctcctcggtgcagatgggagctgtggaccttcttggcggtggccttgacagcctggtatgttgtgggccccctctggatgatgttgataatgatcctcagaggagcagtcactgaatgcccctccatgccaggcaccagctgagtgcctcaggtacattatatagagtccttaccatttacccttggaggtgattgtgtagctccctacttatgatgagaaaaccaaggtttagagaggccaggcagccttccctccgaggtcgcacagcccctgagaggcagacaggattccactcccttgttgaaccttcgagtcccaggagaccctgggcagggaggcgcatcctagcccttgccctgatcctggcatcacagtcacctttgccctgtaaggctagggtgttcctggctttgaggaatcagacttgtgtccacttacccttatgcagcgccagctgggaatagcagcccatccaggcctatttgagagggcatgggaggccggggagagaggggagtgggaagacagtagggaggggagtggtgagactgacttgggtatctccctggggcttcctcaggcaactggcaggaccatgtgtgggggcgcctaaacctcttcatttggctgtgctcggctcaggtccgcacggtggcagcacgggggcaggacactggtgatcagtgctgctagggtgaggcaggaagggctgtggtgcaggacaggtgttggggtaaaggtgtggggtagtgcctttcatagagacagggtctgggcctctcgccagacctcacaccacactcctctcggatggagctaccgttgactaatctccctctttcccttctctctcttgtttctctgtcttccttcctggctttttctctctgcatgtggctgcctgttctcttcacctgcctgcttctgcttggagatgggggatgagcctgaaggggtatggttcaacccttgcgtcaccaagccttcgtccttgctcctcccgaaagcgctggcccagcatcccaaggggcgggggcgggtgatgtcacagcagcctccacctgctgagcccctgccttggtccagcatcctggcagcctctgtcttgaccacctggcatccggctgccactgggccccatagccatggattcttgcccagtcctcaccaccccatgacacgtcgccttgtcatcgcggggattgccagccctcagtcccacaacccttctctgatgtcctggagggagagcacccatctgcgtagcatgtctccacccagccgtgtgtcttgggacctccttttatccataggctgagcgtcaatttgggagtgtccccagccctttcccagaggttactcctaaggctcaaggcttgcagggcacgggagggctcagcctctcttctccacccacctctctctgtcttgtttctgtaatttagagttgatatggaggctgtcctgccccctgcccccagtgtcttctaaagagccaggtggctctactcattcccagaccctgatgtctttgcctcttgacgcccacctctgactctttccctccctttccagattggggg

SEQ ID NO: 103123 - DNA, 1052 bp, Homo sapiens
gagttcctaaaccaagggatgaaactagggcttcctggttgcagtgtgggtctttatacgccagtgcccttgggtcacggatttaatgcggcgtagtgactagtagagcagatcagcgtgcaggattccctgtgctatatttaacatagtaaatctcttaagaatttgtccacgtcactgagacatgccctgccctggtcctgagatgtggctgggcagcttttgccaagtcctaatcgcagaaatatcttcctgctacccagctcggggtcttgcctctcccatggggcacgacaaaggctccttgcttggccaggacctccccgcagtgtgcacagcagcacagagtacccagttttctcctttctctctgtcctgtcttctcccttcctcaccatctgtcctcgtatcttttccttcctcctctctgttctggaagggcataggagtaggagtcagaggcagaggattctcgccccactctcgtctttactgacattagccatgtgacctagtaccagcctctcaccctctctgaagtttccttgttcaggaaaaatgtggtgggtgatactcgcggaaggcagaaggatgttgcctttgagggaggaacaatgacacatgtgaaagggctcagctagtgacagctcctgcctagcggtgccttctctgaggcaggcatcgatcatgctggatgcttctcgtctcactctcacagcaggccgattaggtcggtgtccatgttggggtcccaagaccaccctcatgctcaggtttcactagcagtactcacaggactcagcatatattttttaaatatatatattttttgagacagggtctcactctgttgccgaggctcgtcttgaactcctggactcaagcaatcctcctgccccagcctcccaaagtgttgggatgacaggcatgagctgctgtgcccagccaggactcagcatatagctatacccacagcaaagatctatcagcagcagagcagggctgcccggctgggtcataggggagaaggacacaggtggagtctggagggt

SEQ ID NO: 103124 - DNA, 1039 bp, Homo sapiens
tgggactacaggtgcttaccaccatgcccagctaatttttatattttttggtagagacaaagttttaccatgttggccaggcttgtctcaaactcctgacctcaagtgatccacccacctcggcctcccaaagtgctgggattacaggcgtgaactatcacgcctggcctggacatgctattttggtaactaaaaacagaatgtttccccttgtctttcctgtttgccccgttggaatggacggaccccagcatctgtgagcgggtcacccccaggctctcccatgccaactccgctgtggtgctctctgctgtgaaggtgctgatgaagttcatggagatgttgtctaaggacttggactactacggcacactgctcaagaagctggccccacccctggtcacactgctgtcagccgagccagagctgcagtatgtggccctgcgcaacatcaatctcatcgtgcagaaaaggtactgaggtcaccacacgcacgtccatgcgtacccctcggggagcctcttctgctgggaatgggggctctcaaaggaaactgacctgtcaccatgcaggaagtctcaaatagcttaacccagaatagcttaaccaaagtggcagctttgcccccctgagggatatttggtggtgtctggagatactttggttttcacagctgaggggggcatgctaccggcttctagtgggcagaggctaggagtgctggtcagcatcctacagtgcacagaatagcccctcacagtaactgtccagcccgaaatgtcagcagtgctgaggttgagaagccctggcttaacctaactaggaagcaggctatgtaaagactagcttggtgattaaactagatattgtcttcatagtccacgagctgtcctgaaatgggctgtcagattttgtgtatctgtgtacatttcttcgggggacagagtccgtagctctagtcaaactctctgaggttggaaccttgaggtctgggggagaggtacatcggactcactccaaatgctgtgccgcccacttc

SEQ ID NO: 103125 - DNA, 1086 bp, Homo sapiens
tcccgagtagctgggattacaggcacgcgccactatgcccggctaattttttgtattttaatagagacaaggtttcactatgttggccaggatggtcttgatcttctgacctcgtgatccgcctgcctcggactcccaaagtgctgggattacaggcatgagccactgtgctggccaatcctcagcattttaaagtgctgggattacaggtatgagcgactgcacccggcctacaagtttccatcttgttaattcctgtcctaacagtcatccctcactgttgcctggcccacctgaggccaggcgcctgaagcttccctcagccaacagcataggatgtcttacgtgcctccctccggttcttttggaagttagatactgggaattgtcccctgccagggtagggagggatcactcatgcttgcctcctttccttaggggagatcttcgagctgaaggcagagctcaacagtgacaagaaggagaagaagaaggaggcagtgaagaaagtgattgcatcgatgaccgtgggcaaagatgtcaggtgtgcaggagtaggcctggtggcagctagaagctggctgacaggggagggtttatagcttgggtccacttcagtctctcctttagggtgtctagggacccatgtctcccctcatacagctcccttcataaaactttcttcccaatagaaggttttgtttacacaggaatcatgagcccagacactgacaggtcaggtggttatggagtgagttaactggagtaggtgggaaaggcagcaggcaatggagtgggtgtggcatgaaccctctcagaaactccagaggatcagtactggctggggaagaggacccagtgtggccaggtcttctggtttttaaaagaatgggaaatctgggccaggcgcggtggctcacgcctgtaatcctagcacttggggaggcccaggcgggcggatctcgaggtcaggagttcgacaccagcctggccaatatggtgatatcctgtctctactaaaaatacaaaaagtagccgggcatggtggcgcatgcctgtagtctcagctactcgggaggctgaggc

SEQ ID NO: 103126 - DNA, 1042 bp, Homo sapiens
tcttggcctgtaaatgctgaaattgagggggggatcccagcccagaatgctgtctccttagcaaagtgactcattatactggccagagcagtttctgaatcaaaaattccccgtaattaaccactttaaaaaatttgccctgacacttccaaagatggaatccaaaccctaagctttttcttgcctaaatttgctggctttttttttttgagacggagtctcactctgtcgcccaagctagagtgcagtggcgcgatctctgctcactgcaagctccgcctctgggttcatgcttctcctgcctcagcctcctgagtaactggaactacaggcacgtgccaccacacccggctaattttttttatttttcatagagatggggtttcaccatgttagccaggatggtctcgatctcctgacctcgtgatctgcccacctcagcctcccaaagtgctgggattacaggcataagccaccgcgcccagccgctgcctgctttcaaatatgattcgtgtacccgatcagattcatcagagaacaaggtctcagcccctttggcctctatggggtagggatacagtgcatgataacagccaagcaggtgccaggaaaaacaccagtctttctcatggcatctatgagtctgagccccgttaggactgaactgtagggttttttccattcctgcggagagaatgagaaatctcttgcactgatatccatccaagaggcaactgcaagaccaggtaccagcattaggtgctcacaatggagaaaggacacgaggagatagctgccctcagtacatcactaagctgtaggtagggaatcattcatggtgaagtgaggtgttttgttttgttttgttatctgtgttttggggtggctttctaaagcgtttcacttttctccgcatctcctcccttctctactttaatttcctgcatatgaaacaacttcagagggatacatttctgcatcatcagtcccattgggccctctgcagagggatatgtgaaacagatactgcggaaaaaagctg

SEQ ID NO: 103127 - DNA, 1054 bp, Homo sapiens
agcagtccccaccccccactctttttttctttttttgagacacggtctcactctgtcacccaggctggagtgcagtagtgcgatgttggctcactgcaacctcctgcctcccaggctcaagtagtcctcccacctccgcctcctgagtagctgggactacaggtgtgcaccaccatgctaatttggtagagacaggatttcaccatgtttcccaagccagtctcaaactcctggcctcaagcaatttgtccgccttggcctcccaaggtgctggtattcacaggtgtgacccacaacacccggcttgatctccccattttaaagagggaaattgaactatggagatgaagtagactcagttcagcatactttccttttaaaggttgtcaccaattttgagacattggagaaaaattgaaatactatacttagtacccattttcttatgtttttatttttttcattctcaaaggaggtgattttcttatgttttaaaaatagatataaattcattttattagcttaaaacacagaaagatagtctatatttcttgttcctaaaattatatttagatatatgaagacaaaatttgaaaaatattgagaactttttttcctttaagcctaaccctaacttcagcagctaaaaaccaaagtctttagatggaaatgttttttcttcttcccttttttttccttaggacctaggacctctttttccctctcttagatcatgttacatctttgtccctggacactgtttccaaaagtctcaccaagggcttctttatacatctagaaaacataagagagaaagctactatattttaggctttattgctcagttccttttcttttcttttttctttttttttttttttttgagacccagtttcgttcttgttgcgcaggctggagtgcaatgctgcgatctcacctcactgcaacctctgcctcccgggttcaagtgattcccctacctcagcctcccgagtagctgggactacaggcacccgccagcatgcccggctaattttttgtatttttagtagag

SEQ ID NO: 103128 - DNA, 1105 bp, Homo sapiens
acctagaagcttcctcctcagctggaattgtccacggacttttggcagattatactctggggcatatcgcagaccgcagcccatctgtcgctctcttgtacctgggactcagcctgtgttccttgcttttttttttttcccctttacaatttttttaaaacatttttttttcttttgtagagacaaggtcttgctatgttgcccaggctagtcttgaactcctggcctcaagcaatcttcccacctcggcctcccaaagtgctaggattacaggcgtgaacccaccatgtcaggcctgttccttgcctttttaaagctgccgtccacattcctgatttattggtatcttctagtttctcccttattttcttcctagcttatcccttactattttctctgcaaataactccacagactcttttcataaacttaagggtgttcttgctgatcactccgcaaagctaagcaaaactctatccctaggaaggagcagggctgccagacttccaaaggaactttgtccctgtcggtgtagccgactctgtcctttctatggcgttcagcagtgtctctgatgagaataggcattaagcatctattttgggtcaggccctgtgctaatcacacttttacattcactgtcctatttaaatgaaacttagtgtataagtcttttgcctccttggttaaatttatccctaggtattttattatttttgatactattataaatagaattattttcttaatttctttttctgattgttcattgttggtgagtagacatacaattgttctttgtgtgttgactttgtcccctgctgctttactgaattcatttattaactctagtaattaaaaaaaacttttctgccagtctgggcaatatagtgaagccctgtctatacaaaaataagatttaaaaattagccaggcatggtggcgcataattgtagtcccagctactcagaaggcaaaggcaggaggatcacatgagcccagaagttggaagctacagtgagctatgatcacacaggtgcactccagtcttggggacaaagtgagaccttggtctctaaataaataaataaataaaagggtttac

SEQ ID NO: 103129 - DNA, 1041 bp, Homo sapiens
gctgaccactcgctgagcgccagccacatggagaccaccatgaaacttctgaagaccagggtgcagtcccgcctggccctccacaaacagtttgcatccctaggtaagctgatgatggggcagtggtttaagagtcactcagacaacacacggacaacaacaacttagcctttcactcaaaacttgaatcctgatgacaaatacaagacctggattcctggctttacggagtgggcatcttggcagagccactggggagagctccaggcctgtccaggcagaggaccgagctcccccttagagccatcagtgctgtcctgcctcacagaggaggcccagagccattgggtggcacaagtttgtggactggtcggggcagttcatcctaggtcatgcattgcagattttgatgtgcattcgacacatatttagtgagatcctgattcatgccaggcactgagcatagtgctgggggaagaactgagcacagtgaacccctgcccctggctctgtggctcacagtcagctttttgaatatagctatccagggagcaactcgcatatcccttccccaaggcctactgacctcgtgttccccagggtgaggctgagcctatgttttcttctaagctcccaagtgataatgatgagccactgacttaggtggtggcatttgggggcttcttttagtttattcactcagtaagtggttgtcaaatgcttaccatgtggcagggggatggggtcaagatttttctgacctaaaagagtctctgggacaggcgcagtggctcttgcctgtaatcacagcactttgggaggccaaggcagacagatcacttgaggtcaggagttcaagaccagcctgccaacatggtgaaactccgtctctactaaaaatacaaaaattagctgggcatggtggtgtgcacttgtattcccagctactcaggaggctgaagcaggagaattgcttgaacctgagaggcggaagttgcagtgagctgagatcgcatcactgtattccagcctgggcaacaa

SEQ ID NO: 103130 - DNA, 3001 bp, Homo sapiens
tttgttgctagtataaagaaatataattttgtttacgttgagcttttatccacctattagttctattagtttatcatgtatcacttttataaataatgatttacggtcactaagtagccactttttcctgtgtggactggctaaaaaaggaagaacaaaaatctgtctcttgtgtgcaggcttcccttccggtgcaggagtacctgtttatgccattcgaccaggctcacaagcagtatgagacagccagacacctgccgcctcccctctatgtcctctttgttcaggccactgcgtatgggcaggcctgtggtgagtatggggcctgggtgaggacaaggggctatgggagcagcagctgtggccgagtgaatcagttggaagcagtacctgctcaggaaatttctcagtcctgcccgaagccctcaggtgacagaagctttcttccctctgcattgcccagcatggctgctctgaccagctggcctaaggctggattaacctgatgggtatttcacaatgggtggctttgagtcattcgtgagcctggctggacagctcttgggtgcagaacccaggcagcctgtctgggctcccaggtgctcaccccatcaaggcacgcttggcagttagatcagtgcctcttgctctgcttcagggtgggggtgcctggtgaatacaggtctcagccagctctcccaggctttcaccatgccttgaatcaggctgcatgtctttgttgtgaatttccaggttagatgatatgtcctcattaagcttgagggcagcctgtgactctgctagggttttgagaaaattttggagactctgccttttgccctaatgcagctttcacccagcacctacattttctcccccaccccaccccacctcatcagacagacatacaccgcaccagtgcttgcttctcctcccaccttgggcaccaacacattactgtctcttcttgtgtcttcctcgtccttctggtcctcccctcccctttgttctccctcctgtttccatcatcagctcatatgaaatcctcccagccccctagacagggtgagtaattttcttttcttttatgtttaaaatcggcctgttccattctgatgttcttgtagaatgctaatattaaatggctgaaaaaaatagtctgttgtttgccagtgcttgatgggagcaactagttgcttggggtgaagggtggtgattcacatagggttgccatagataaggcagtggtcagccacttgggggaagtttgccatccctccttagtgtggctaggcaaaccgtttcaggctcttgggaccatatgtacccttaagaatggagttggacggtggtggcctgtctgacctcacaacgctagaccctcagagggggtctcaagacatcactcaatgaggtgtcatacctggtgtatgcaacaggctgttagctcatgtgctggagaggccaagcttaagttgaacagacctggtcttgaatcctggtttatcagccttatagctgtgatgtctagcttctctgagccttaagtttctcatctataaatggctataatgtattactcctgtagggttgttgtgagtattaaaaaaaatttttttttttgagatggagtctggctctgttgcccaggctggagtgcagtggcatgatcttggctcactgcaacctctgcttcccaggttcaagcaattctccctgcctcagcctcccaagtagctgggattacaggcacccaccaccgtgcctggctaatttttatatatttagtagagacagagtttcaccatgttggccaggctggtctcgaactcctgatctcaggtgatccactcaccttggcctcccaaccagacatgagccaccacacccagcctaaaaattaatttttaataattttataattaaaattacaagcatcagctcattcagtccccaccactaatggggcagctactgtttttcttttttcttttttttttgagacagagtctcactctgttgcccaggctgcagtgcagtagcatgatcttggttcacagtaacctccacctcctggattcaagcaattctcctgtctcagcctcccaagtagatggggttacaggcacatgccaccacacacagctaatttttgtatttttagtacagacgggattttgccatgttggccaggctggtctctgaactcctgacctcaggtgatccacctgcctcggcctcccaaagtgctgagattacaggtgtgagccactgcacccggcagctactatttttcaagtccccttttcatagatacagaaactgaggctcagacagtgacataactttccaggtcatgtgtttgagaattggttaggcagggactcaggtctggaactggactgcaagatccaagttcctattcactgtcctactgcctcccagttaagtgagacaatggcagccatgtgcttggtatagtgtagaatagagaataagcacttaggtgagagtcattgtttctgggatgtggacaggtgtggatttctgggtgagaacctctaagacaactggcagaggagttccatgtggctttaggccctcagtttgaatttctgtgctttggtgtgcaccaaaaaagagaggcattcactgctagtttcaggtgatgctggtttaggaatttgtacttaagttctctgttctcagtaaatgacggaaaaaaaagcttaagtgtcccaccttgtttcccttcatctggagcaaggacttttgcccttccacccttagtcagcaaggagctgggcagaggtgggagaaatgcagccccagagctggcctactcacactgcttagcagctttcctcagcagctttcctaacagacttcttcttgccccccagataagacgttatctgtggcaatcgaaggcagtgtggatgaagccaaggctctgttcaaacctccagaggactcccaaggtaatgtggtggttgggatt

SEQ ID NO: 103131 - DNA, 2714 bp, Homo sapiens
ccatgattctgaggcctccccagctatgtgggactgtaagtccaattaaacctctttttgttcccagtttcaggtgtgtctttattggcagcgtgaaaatggactaatgcagatgggaagttgcacttaacagcacggacagtatgatcccgttttgtttacaaataaaatgtttatttatccacaatcttcactcagtttcggactgagaggcgaaattataggcaatttttccattttctttttgatactcctctgtatattctgaatctttgataccaggcatgcattactctgcaatcagaaagcaaaagaggtttctattttgaagagaagaaaagcatttaatttaaggaccagatcttttagagacctgactgaggcttcattgttactgtttttatctaaaaggagatgtcagccaagtgtccctgatcccagcagggagacttttaccccatgcacacagagcctttatccttacctctacaggaaggtaaatactacagtgaggaggccgaggtggatctgcgggaccctggcagagactatgagttatacaagtacacctgccaggagctacagaggctgatggctgagatccaagacctgaagagcaggggtggcaaggatgtggtaaggagtgggaccaggtggccgtgaacctggtgggtttacatagatgaggctgtttttgcacctaccagggcccttcctgatcttgatcttctgtcctagccatgatcaggtgattggagcctgagggctcccaaaacctgtgaatttattggaacttcttatcaccattcagtcaccaattacaggaatgaaagtacaggataattaattttttccctactaatttgatcattcatccaattaatatttattaagtgccaggcattttgctaggtgttgagaaatgatggtacttatacatttgcttgatacaaagatggatgtgtacaagtaaattgtagataccaaaaatgaaattatcattaatagtaaatgaataaatgaggttttaggggcagagaaattaaacaatgtgactaaaaactcgatagataagttttttaaaatccattttttcccccaggaatctcacgtatttgtgcttatgctgacaagttttgttagaattattgcattcaatctattctagccaagctttatggctataattctgttattttccatttaagttatcctgtaatgttatttatagaggtcaaattttatgacaagatgttactattgctgggatctctgtgtaggatctgtagagatagattgtgcctttgctgcccttattccatcttcaattcctgttactctagtccaagcagaaattacttttttttgcccgagattcttaatcattttccttatacaatcatcctcttattttcttcatgacccttctcatggttctgagctccctccggtgccgtttttggccccagatgaggatgggtcagtggtgaaggactgaaggaagctgagctagccctgtcgtcagtgggctttactgttttctttgcccacaggcaatagaaatagaagaacggaggatccagagctgtgtgcatttcatgactctaaagaagcttaaccgattagcccacatcaggttgaagaaaggaagagatcagacccacgaggtagtagttaaaaggtttaattttaaccttcctccttcctcctccccatccccttctttttttttttttttttttttttttgagacagagtctcgttctgtcccccaggctagagtgcagtggcacgatctcagctcaccacatcctctgcctcccagcttcaagcgattctcctgcctcagcctcctaagtagctgggattacaggcacctcccaccaccatgcctggctaatttttgtattttttagtagagatggggtttcaccttgttggccaggcttgtcttgaactcctgagctcaggtgatccactcgcctcggcctcccaaagtgctgggattacaggcgtgagccactgcacccagccccatccccttctttattccctttacaccttctcttagtttgctgaccctctcctctgctccatcctgacttgccctgctcacttctgatcgtattttcctttcaggctaagcagaaagtagatgcctatcatctgcagctccagaacctgttgtatgaggtgatgcacctacagaaggagatcaccaaatgtttggagtttaagtgagtttgggaggacagggctttggcacatgtggtctttcggtaactgctttttcccatgtagctcactgtaagtctgtttcttttttttttttgagacggagtcttgccctgtcacccaggctggagtgcagtggcgcaatctcagctcactgcaacctccacctcccgggttcaagcaattctcctgcctcagccttctgagtagctgggattgcaggcgcccacctccacatccagctaatttttgtatttttagtagagacggggttttgccatgttggccaggctgttctcgaactcctgacctcaggtggtcctcccgcctcggcctcccaaagtgctgggattacaggcgtgagccaccgctcccagcctaagtctctctttaaaaagaaatctgatgagcttagaaaactgtaggatctgggagaagggcaaattgcaagggtgaatgtgggagaattgcaagccgtg

SEQ ID NO: 103132 - DNA, 1051 bp, Homo sapiens
gaaacaggagaggcattaattaggtcggtcttttttaagaaagagaatttagacagtattgttgggcaagactgttagagtagtcctggagaggaatgtggagggcctggcctagggtgttgagatggagacacacatggtgcctggatagctgggtgaacacttgaatgcaggtctcctctatggagagtgtggagcaggatgtgggtggaggcagggcagggagaggttgaagtagatgattccgaggtcagtgggagtgggtggtgatgcctttttaaaagagaaggtggagtttgttttggacaggctgagagatgcttccctgttgtattacagagggttaaattgaggctttgaggggttaaatgactttccttgagttaccaagtctgtaagtggccagaactgctagtttgacttcagtgttatgactccagaagaatctcaaaaactttctcctcttaacaggaggaacaaccatgtcatcagaatcgagcaaaaaacggaagcccaaagtgatccgaagcgatggagccccagctgaaggaaagcggaatcgatctgacaccgagcaggtgagatcagtcagggttgccatgctgctgagaaattacatctcatggccaagcacctggctgtgtgtttgcagcagctcggggtcgcatctaccaggtacaactttttggtggcttccacttgaccaggtgactgggattcctgtttcttcactaaagctgagtgtccacatctggtttagctgcagcatctccaaaaccaacaagcctgtattagacatgattatacctacccagagaatgtattccagtatgatatgtgtctccagttttcctgatggtcagaagaaggtagtccatctgcagcatggcactggagcttcaggaatccctcggtgtgctgctgagacaataccagaaccatgtgcccacagaacctcttttgtggcctgagagctcatgtggtcgtcaggttcttttcttctttttgtctgtttctctgtccttgaatctgtcaacttcatttgtgactt

SEQ ID NO: 103133 - DNA, 1790 bp, Homo sapiens
accaccaaagtcctgtcttatcccataatttgagggatctggtgctcttcatgggcccttccacgagggcaatgggacattcctgtcgcagcatctggggcctcctcctgcccactcaaaggccagcatgtgtgggtggggccaggggaggttgttggcttgcttgagccccctgtgtgacctctgccttctctctccgcagtccccctggtgcgacacatggagtctaggatcatgatccccttgaagatctcgcctctgcagtgatgctgcctacacctccacctccttccccttctccctcaggcaaccccgacagacagtggcactcctggtcctgctgtcttggttttgtcttggctctgggaggactctgaggggcagtgctcagttcagacaagggggaactgaaggctgacaagttctgaggattacagctctgcccaggccctttctactttccctgcctgcctccctccccctgctagaagtagtttctgatttccctgaatgaaagatagtgatcttttaggccttcatttatcttctaaaattcctcatctcaaggccaccagtccccagttatcacccttggaaatcctctgtttagcttagttgcacaaaaggtagtatgtccagtggctagaggtggggtgggaagagaggaggccaggccaggccctcaggaattccctggtttccactgggccacccacttgctggacagtctgagccaagtccctcctgctggagaaaagcctggaactgccaaaacaaaaaaacaaatacaaacaaacctcgtcaccacggtcaggaggaggttcagacattctgcccagaggggctggggaaagggatgggagccaggaaagatttaggggcaggagacagacacgtaacaggaactcggaaggtagaacttagaattcagaacttgggtttcaattgtagaatttggaatctggaatacagaattgggaagaagaacagagatgacaaaagaccacttgaagagaggttcctaatactagacagatggagagtggcttggctgtttccccctgcatattggggttgaaaacttaaatgtgtagttccagtccttctatgcagagtctctcctgccctccctccttcctgcaggcaaatatacaagctagaccctgttccctcaccctgtatcctgtctcccctaattgacattctatcagcccaaccctcattctgcagggccacctggtgtgtggaggtggcgggaggggtcagtgactctgggggtctcctcagtgacccccatacctcatcatgaacccttgggtagcttgattctgcctaccatccaggaaaacttgtgctggaattgctgatggaaacaattaaatatttactataaatcagtgtcttttcttcatctgcaaggaactttagcaggtgcctgaggcagggcacagtagagctggtgggcttagtcccacatggcagatctaccctcctggagggtactgtgttcttgagctattctcaacagtcagtactggttgggtgcagtggctcacgcctgtaatcccagcattttggaagtccgaggtgggcagatcacttgagtgaggtcaggagttcaagaccagcctgggcaacatggtgaaaccctgtctctactaaaaatacaaaaattagctgggcatggtggtgcatgcctgtaatcccagctacttaggaggctgaggcaggagaatcctttaaaccctggagtcggagtttgcagtgagcggggattgcgccactgcact

SEQ ID NO: 103134 - DNA, 2279 bp, Homo sapiens
tataatcacgacactttgggaggccgaggtgggcaaatcacaaggtcaagagatcgagaccatcctggccaatatggtgaaaccccatctctactaaaaatacaaaaattagctgggcgtggtggcgcatgcctgtagtcccagatactcgggaggatgaggcaggagaatcagttgaacccgggaggtggaggttgcagtgagctgagatcacgccattgcactccagcctggcaacagagcgagactccgtctcaaaaaaaaagaagaaaaaaaaaaaaggcagggagagatgatggtgaaaaacataggggatctacattggtctaggtagacaaataatgcctctctgaggaagtaaaatgtaagctgagagctaaaggatgagaaggagccagctgtgaattgctaggcaaaagcattccaagtagacagagcagcacatgcaaaggccctgtggtggggaaaggccttcggggttttgaggtgtggcaaggaggccagtgtggagtgagtagggaagaatgtggggagatggaacaggagagggggaatgagttgggatttattgtaaatgcaatgagagactatttgtttcaaatagcagtgacacgacctgatttttgttctagtatgatttctctggctgctgtctgctttgttaagagtgcttggtaggcgagcaagagagaaagcagggcttcaggaagccattactctagttcaggcaggaggggatggggcagtgggatgctgagaagtccacagaagatttgttagtctagaggtggaaccaacaggacttgtggatgaattgtctgtgtggggcaagagaaggagaagggcattccagaagagctcccaggctcgtgcttgagctgctgtgtgtcatctcctgagtctgggaggtctagggaaggagcaagtcagtggggtcaggagcgtaattttggcccttggaattgttactttttttttttttctttgagacacagtcttgctctgtcacctaggctggagtgcagtagtgtgatctcagctcactgcaacctccgcttcccaagttcaagtgattctcgtgcctcacgctcctgagtagctgggattacaggcatgcagtaccatgcccaactaatttttctatttttagtacagagtttcgctatgttggccagactggcctcgaactcctggcctcaagcagtccaccagcctcggcctcccaaagtgctgggattataggcatgagccaccgcacctagccggaagtgttaacactaaaaatgctgacacaccaaagtagagatgtcaagtaggcagtagatggatataggagtctggagcccttgggagtgtttgcgactagaaatataaatgtaggcaatattaacatatgtactgattggatggatgattaaagcagacagtgtttgctaatagtctgagggaggcatctagggaggaggagacagcagtgcagggtttaggggacagtgggaagagggccctgtgctgggtaagggatccagtcctctgtgcctgaggaatgagcctgtgcctttctcacagcctataaagacctgcagtctcgggaggagactcgaaacgctgcctggaggaagagaggctgggatgaaaatgtctactatacaggtgagtgaagcctttggaggtcttctgctgagaaccctgtctgaggatggaatcctctctgcaaggagatctagtctttcttgattacctccagtgatggggaactcacttttaagacaatgagttaatgggtttctatccaagtggcacactccataggataccagcaggcctaggtgagtactctaggggatgataacatagccagggccacgcctctgcctaggagatgtggattagcaaacgcccattgtgaccttgggcacggttctttacctcgctgaggctgttccctcgtctgtaagatagtgatggtgatagtgcttctgtcagagggctataacggaagattctacaaactattttattattttatattttattttattttatttatttttgagacacagtctcactctgtcacccagggtggagtgcagtggcatgatcttggctcactgtagcctccgcctcccaggttcaagccattctcctgcctcagcctcccgagtagctgggattacaggcgtgtgtcaccatgtccagctaattttgtatttttagtagagacggggttttatcatgttggccaagctggtctcgaactcctgacctcaggtgatccg

SEQ ID NO: 103135 - DNA, 1021 bp, Homo sapiens
ggaagttacagagtctgagtttctagactgctggcagccagctgcccttagctctagcttgcctgtgtgatcccctggggaccttcctccgctgatgggcccagccatgctcccaggatggcaaaactgttcctttcttctcctccacaattaattaggtttctttgttactaggaattagattagtttcctggggtggccagcataccgcaaactgggtggcttaaaataacagaggtttatcctgtcacagttctggaggctggaagtcacaaatcaaggtgttgacagggctgtccttcctcctaaggccttaggggagaacccttccttgcctcttccagtttctggggattgctggaaactcttagtgttccttggcttgtagacttgtcattctaatctctgcctccctcgtcacatgctgttctctctgtgtgtctctgtcttcacatagtgttctcctgtgtccagatctcccacttctgataaggacactagtcactggactcagggctcacctagtataatctcatcttaggtcgattatacccacagagacctatttccaaataaggtcacattctgaggttctgggtgggcataaattttgaggggacattgttcaactcagtgcagataatatgatttttatttatttttatttttatttatttattttttgagacggagtcttgctcttttgcccaggctggagtgcagtggtgcgatctcagctcaccacaacctttgcatcccaggttgaagcgattctcttgcctcagcctcctgagtagctaggattacagatgtgcatcaccacgcccagctaatttttgttttagtagagatggggtttcgccaagttggtgaggctggtctcaaatttccgacttcagatgatccacctgcctcagcctcccaaagttgattatttatttacttgagacggagtctcaccctgccacccaggctggagtacactggcacaatcttgactcactgcaacctctacctcctg

SEQ ID NO: 103136 - DNA, 1050 bp, Homo sapiens
ccatgttgcccaggctggtcttgaattcctgaactcaaatgatcctacctcctcggcctcccaaagtgctaggattgtagacatgagccaccgtgcctggcctttcagttttattcatttttaaattttcatttatttatttatttttgaaaccaggtcttgttacccagtggggagtgcagtggtgtgatcacagctcacacagccttaacctcctgagcttaagcaatcctcctacctcagcctcctgagtagctgggaccacaggtgcatgccacaatgcccaactaatttattttaaattttttgtagagacgggatctccctatgttacccagggtggtctcaaactcccgggctcaagcgatccttccactttggcctcccaaagtgctgggagtacaggcatgagccacagtgcctggactattcacttttctattttggcatagatgtcacctcctcctggaaggctgccgagatttcctccacgcgggctgggtcaggcaccttccttagctctccaggcctcagtaattacctcctcacgccctgatcatgtacccctatagctgcctgtttagttgtctgtctccatatatgggtgaatccccaatatgcagcacatatttgtggaataaataggagttcttcttgtctgagctggtgtcttacagtcccaggggcacccctagcatgccccatcccagcctaatagacacatcaaagttggcaccagctataagaacccacacatgaatttggctgactcacagcatctcagccactcaaagggacctcaaattcagacccacactgtccaaaatgatagccactaaccacatgtagttatttatttatttatttttttgagatggagcctcgctctgtactgtcacccaggctggggtacagtggtgcaatcttggctcactgcaacctctgcctcctgggttcaagtgattctcctgcctcagcctcctgagtagctgaggttacaggcgtgtgccaccacacttggctaatttttgtatttttagtagaaacagg

SEQ ID NO: 103137 - DNA, 1033 bp, Homo sapiens
agactttttttctttttactgcagagatagggggaaaaatctcctgcactacttgctgcattgctcaattggctggatgctttggaagatttttccacttgaaagatttgttgtttgtcattttgagaaagtgggtgctgagtgtaatttgccaggaggctaaacggctatgttatttcttatctaggctggaattttactctaataattcaatctatcagtaagaaaagccaaataggaagttgtaagagatcctaatactatcttatattgaaaacaaagcctccttctcctgttgtttggcattctaaatgttttcacatacctaagtgagattatgattgtattaaataccaacattgcagatcattccagcatacaagtggacgtaagttgtccataacagaaggaactttctaaaggggaagacagatagaacaattctggcattttcagtaaaatcttaaatcctaggctccctaggaccaggcaaaccatccccttcaaggatgtaaactctggagggcagtgtagttgtacagggtaatagttctatactctatattagtgcaacaagaaacttctattcctgtttcagaagtaagactgttatctacctttttttttttgagatggagtttcactcttgttgcccagactggagtgcatgatctcagctcaccaaaacctctgcctcctgggttcaagtgattctccagcctcagcctcccgaatagctgggaatacaggcatgtgccaacacgccctgctaatttttagatttttagtaaagacagggtttctccatgttggtcatgctggtctcgaactcctgacctcaggtgatccacctgccttggcctcccaaagtgctgggattacaggcacgagccactacgcctggcctgttatctacctttttaccgctgtgctctcccatgggttttttttgtttgtttgtttgtttgtttgttttgagatggagtctcgctctgttgcccaggctggagtgcagtggcgtgatctcagctca

SEQ ID NO: 103138 - DNA, 1908 bp, Homo sapiens
tataggtgtgaaccaccacacgcagctctgatttactgggtgcccacgttgaccaggcagggaacacctcctagcagtgatcaaggactactttggacctaggttctgtaactgacttcatctttaagtggggaaacagaggctcagacaggatacatagcatgcttaaaggcttagtgcagccactatctattctgaaagaggcagaataggacagggacaggtaggtagtgagagaatagggagaatagatgggcacaccctttaacttaatatcgaccagtaaagcctgcagttgcttatttgaacctcacattgaggctgacatgtaagttgagcaaatcttaactcaagcttcagtttccttgttggggccgctgaggcagcatagcctagagattacaagcatagacttcagagtttgattcctggctctgcctctaaccagctttgcaaccttaaagctccttaaccccctcacatgcctctgttccctaactgtaaaatggtgaatgtaattaattcttcctgcatagtgttacaagaattaaatttgagtaattactggtaaagtacgtagaatagtacctaacacaagataagtgctatatataatggttgttacctaaagaaataacagcctgggcaacatggcgaaaccctatctctacaaaaaatacaaaaattagccggttgtggtggtgtgcacctgtggtcctagcatctcgggaggctgaggtgggaggatcacatgagcctgggaggtcgaggttgccataagcttcctgattgcaccactgcactccagcctgggtgacagagtgagaccttgtctcaaaaaataaataaataaaataaattaaaaaaataaaaaggaaataagttcagtgcctgtcgttagcttgctccctttctcagcctctcctccacttcctcacgcaccctcttgctctgagcctattatcctggtccctccttcacactgccacatctttgcataggctgttctctttgcctggaatgccattctcatttgttgcttggcagaactgaactcattctccttctaggctctgctcaagggtttcctcttctttgtgtccaaagtcaccacatagcttctaagtgatgggactgagatttgaagccaggtcatctgtctttcaggccagccctctttccactaccctatgctacccaaataggaagcgtaaaagagaagtaggagagaaaaagttagaaacctggagagaacttaggtatttggtaaacaggaaaaagaaagtggaaagaagagatcatttgaaggacttcctcaacttaacaactatttgcctatggcattattttattgcatttggtgtatgatactatctcaaaagcattttgtaaacttgccagtggcttacatttttgccggatgaatgacatgactaacgatccgtgctacattacctcagtgtctagtttgtcattttgaatcaagtggacattttctgtaagtgaatcattttcacttgctcatgatataatgagaattccttacctttggcttaaaatgaggcttatgttataacagttaagcattgtctagttgcatatttaacatagtcagaatgctcctgcctgtattcagcctggtgtcttataatatttggtatgcccacctagatagcaattggtaacatctttattctgagactctttcatgtatggattttgaaaagttagttaactgttcagacgacattgtttctttgacttttacaatccgcttccctctcactgacagttcagttttggaagaccctgtatttttttttttttttttttttttttttgagacagagactcgctctgtcgcccaggctggagtgcagtggcgtgatctctgctcactgcaacctc

SEQ ID NO: 103139 - DNA, 1064 bp, Homo sapiens
atattggaggctcatgaagcccaggttaaagaggcttgtattcatcagatgcgatgaagagctttgaagtttttactagaagtgtgatttaaagtggttggcatgcaaaatgatttggaacgtttggggtttggggtagggagagagaggttggaagtaggaaacaattagaaggcaaacgctttgggcaaggtatcacattgaaacctgaacagcagtgggacttgctgggggttgggacaaaactaggcagatgtaagcatctagtgaatctagagattagggtgttctgtgaccaagaatgagcagaagacctgctaggctcaagattcaggagattctcaggtccaaagccagtcctcagtctccgaagtcagtcaggcagaagggaagttggatcaagctggccagagttgagctcaggaagtcagtgcactttctcttgtctggttcctgcatcgttttacttgtgtaaaatcatcaagatccctaaaccgatgtctgaacaccaggcttctaggcagagctccaccgtgtgaccttgggcgcatcacttatttcccccaggcctcagttcttctgaaagatgaggggaagaactcacattcaaaggccctcagctttagcgtcttattttaggtgatctgggcagaagagtctcactgtgctcctctccctttcatatttcctgctttggtaggaagtcatctcaagacttgagtgtataggcatgaggaagtctgctagaggacaggaagaatattgcttaaagaataagagctacagccctgatggaaggggtaaattggcctgggaaaagccctgcctctgctacctgcttcccaagtgaccttgaacttaactctttaaacctcagttgctgcatctataaaatgagaataatagtatcttttttatagggttttttttgttttgtttgtttgtttttagacggaatctccctctgttgcccaggctggagtgcagtggcacgatctcggctcactgcaacctttgcctcccgggttcaagcgattctcgtgcctcagcctcctgagtagctg

SEQ ID NO: 103140 - DNA, 1097 bp, Homo sapiens
tcataaactaaagcgtttgaggttttaaaaacccagaattgagttttctcagagctgctaatctttctagccagctggtgacgaggcttctcaattcttgttacaggatgatgtgttctgtcctcctgtctgtgctttgtctaatttagattctaaatccacatgtttaggacatttttagcgtgtcaaaatttattaccaaagtagtgctgacttcagggaaaaatttttaatggaatctttagtcactcatgttgacacaaggtgcttgtcctagtgcaggaatctgtgtggcaccactaggtggtgccagactgcatcatttttaaagacagccttttctcttccaactcttttgccactgttctcttttttgcttctttgccaaatttggaccgagctttgaaaacttcatataaactttctcttagtgagttatgttgcttatagcttttccctccaccttgcctgttttagtcttcttgtttcaatagttttgatagtttgacattcagataaaacttaaaactgaagcccaaagtaattactaaatgtatctcgactgatctgtggttttaaattcaccaacagtgcatctccctacttgcttaatcatattgattttgagattaaatcagtctcataaatatgttagtcttcagcccacggtagttctcatccatctgcagactttttttttttttttttttgagatggagtctaactctgtcaccaggctggagtacagtggcgccatctcagctcatggcaatctctgcctcctgggttcaagcgattctcttgcctcagcctcccgagtagctgggactacaggtgcttgctaccacgcccagctaatttttgtatttttagtagagacagggtttcaccatgttggccaggatggtctcgatctcttgatctcgtgatccacccgcttcggtctcccaaagtgctgggattacatgtgcgagccaccacgcccagccccatctgcagatatttttaccagtcctatccactcatgcctgtaccttctaatgttattaaagtcagttttattatcattgatgaccatgagacttaatcaaaaggtc

SEQ ID NO: 103141 - DNA, 1219 bp, Homo sapiens
gtaattcatttggttttgaaagacttaccagagtttaaaagctccattttgtggcttcccaaggtgctgtgatttgtttcttactagtctcctttgttctgtggaaaattttcttctttggttgtttgagatttagatttccttgccaaggtatttttagagagaggaaatcagtatgtttcaccaaaggggtaaaatatataccttaaggcctaattatgcaattacatttttaataacgagtgtcataaattcttgcttcattgcaatcattaattggaagactgttctgctcagaagcctcatctagttatcatgattatcatcaacatcgtcaaccaaccacaagcatcaagcatttatggagtatccacagattatgcagcacttgccagggttctgggagacttaatctgtgtgtgtgtgtgtgtgtgtgtgtgtgtgtgtgtgtgtgtgtgtacacccttgccttcaaggagtttgtgatctgcagaactggaggaaagacagaaaacttggggaaagacaagtacctcatttttcaatatgtgtaaagcccatactgattcatgtatgtggcattgggggacatggacagcagggagacaaagggatagatcttagaaaggtctagttacaaataaatggaagcacataagtttgctgacatgggaggacataggctgggttgtaataaggtagggtaattggttgaaggagggaggaagaaattggtgaagagttgaaggcagtaattaaatagatttggcataataacagagatgattggagaactgggagaagaaaattacttgctgtagttgattatggcagaaactgacagggcaagagattacagttgggattttttgcaaagaggagctttcaagtttgtgacatctttttttttttttttttttttttgagatagtcttgctctgtcaccctagctggagtgcagtggcgtgatcttggtttactgcaacctctgcctcccaagttcaagcgattctcctgcctcagcttcccaagtagctgggactacaggtatgcgccaccacgcccaactagtttttgtatttttagtagagacggggtttcaccatgttggccaggctggtctcgaactcctgacctcaggtgatccacctgtctcggcctcccaaagtgctggagttacaggcatgagccactgcgcctggcctccaagtttgtgaga

SEQ ID NO: 103142 - DNA, 1105 bp, Homo sapiens
ataaacatgagactcatcccactagtcctaggttcttggagccccacaggtattgttgcaggatgcatcattgcttcgaatcagtgactgaacaacccagttcctaatcagcgtggagagtcagaattgtcacacgcactgggctgaagctgcatattcagtactgcattgaacattcagtactgcagataggataattatgctgtttgtcagatactagaaaagtgcaaagaacattccttcactttgcaacagcttggacccaagtggcagacctgctgttccctcaggctggcgtgacctccctattgtcagccccttcaccacagctcaactacccccctggctttcaagatacagctcaaacagcatctctcctcaggaaagaccttactcccggagacccaggcccgagttgtgttgccactgtaccctgttctgttagcacttaccaggttgcatttttgtgatccatttacctgtcttccctgtcagacatgaacagggacagtgtcttgtcctcaattcatcatttttctcctgttttgagcacaatgaccaggacgtagtggatgctcaataaaggtttgtcaaatgactgatagtatggttagctcagtgagaattgatggtgccctttgtgatctgtcatccatcatccttggtgtgaagcagggctgggaggctttaaacagtgccacttgagaatctaaggagaggtggcagagttacaattaacaataactaccccttactgagtatttatttgctatgggccaagcactctcttagggtttttaaatgaatcaatgcacttaatccttagatcaatctgctaagacgagttctgtttattatcccctttgcaaagcacaaggaagttcagtcacttgcccaaggtcacacagtgacagtgcagagattcataccaatggagacaaccatcacttatctatattccttttagactagttcctggaaagattaagccctcatgtcctgaggcatccatcttaggtaacaatttaacttctctcttgtttctagaatggtattagtgtgttccctacttgggagaatggagaaaatggtcaccagataactt

SEQ ID NO: 103143 - DNA, 1370 bp, Homo sapiens
tttccacatagcagatggaatagctgagaaaagagattgccattgcttcaggttcttttgaaagtgaggctataggataaacacactacagtatattgatatctattcgtcacctgggtttagataccaggagtttgaatttgctctgggtgactgggtgagtagcttcccctttggcctcagttaggcatccttgacaggacagacctgtgattggactgtctggtctctcatggttctttttctccatgatttatgactttgattatgatttctttatattaaaaaaaaacttgtagtaaaaccagtcttatttaaaggaatactagccttttatcaaagggcaaagtaatgatttaaaaaaaaaatcaacaacaaaatttcaagggaatgaatgtccctagaagctagccatctccccgagttaacttaagaggctagactctcctaaatgaggatgcttatttaccagctttcctaaattagcagctttggagatgttaaaatccgtaaggaactgtccaagggatgtattgtgtatgctttgcagtgattaagccattaagctctaattggtattttcccactcatgggtttgtaaaggaagctttaaaattatttaggaattcagtcctcatcagctgtcttagtgtcatccccacgttttggaacctgagagtggagagtgcagagaaaaggttttattaatgatttttgctcacagtgtccttccccattggtttgttattgcagatgaagtggaaagggaaggacctctttgatttggtgtgccggactctggggctccgagaaacctggttctttggactgcagtacacaatcaaggacacagtggcctggctcaaaatggacaagaaggttgggctagaactcgatgaaactggtggggctgacgtgagctttccagtttttccctgagcaggcgcctagctcatcactggggcgctgtagctgtatagtagagaagggggcacattcctgaattaagtcatgcagaaagcaggacgtagagatgctaccagtttccttctcctcacaggctctcctgggcaagcagaagttaccaggattagactgctgctggccctggcttctttacccattgttaccagcctgattgcttctggctttatgcctttcagtttatgaataaaaacttcatgaataaaaattactgttatcttcatatacttaaaaataaccaatttgtgtcttttagagagtattggggcttgtgttctttagggaattttttaaagtctttttgaggaacaccatagtctgacatgaagtaatcattaatatgatctaaggaatagagagtgcctggtccccagggtgaaagaatg

SEQ ID NO: 103144 - DNA, 1408 bp, Homo sapiens
atctaaataatcacatgggaatccctgctggttgtaagttcaatggtaattcccaatgatcatgagcatctaagtgccactgggggccactgtcagtgagggtgtcgtagaccagattttgaatctccttggcattgccatctagaatttgggcaggagcatggagagttatgtgtcaaagacagcaaaactttttgtatgtttttcatgattcttagcaaagtgaattttaatgatagctgagtgtaggccaaatggatattagactgggggcatcaggagccgtggaacttgctgctcaagggaaatacatcatgacacatgttaatggagccttgtagcctgtcacatggcgtgtttatgtcttgaaattcactctggagagcagatggttcaagctttacaggggtgaatggaattgttagaagatttaaaggcagtggtttacagactgtgcttcaagtattttgtggggcatctctggaggttccttgaaacaaagggttgccatgatggacacattttattctgttgctcagttaatgtttagatgacttcataatgatctagttcatcatctctaagctgtattttttttttttttttttaagacagagttttgctcttgttgcccaggctgcagtacaatgacgcagtctcggctcactgcaacctctacctcctgggttcaagagattctcctgcctcagcctcccgagtagctggaattacaggtgtccaccaccacacctggctaattttttgtatttttagtagagatggggtttcaccatgttggccaggctggtcttgaactcctgacctcaggtgatccacccgctgtggcctcccagcgtgctgggattataggtgtgagccaccacgcccagcgctctaagccgtattctatcacggacctaaatattggcagtaggcaccaagaaaaaagaaataaaggaagattccactacttcagataattaaaaaaccttccacctaccataaaggacagtgtccaagactgctgagtgatacatttctagtttttaactattctgtggccctgagaacatttatgccttaatcctagctctgctcacttcttggggctattgattaatttgtttcagaaacaccataggaagtgaatattacctcttgctataggtgactttgtgaatacttcaaactgtaaaatcacaactttcaggaaatgtgataaatttagtgggaaaaaaatttaatgcacgccttgcaaaggcttctttgagggtagcacaggaggaagtgccaatatagtgtgtttgtcttttgctctgcaattctgcaggtactggatcatgatgtttcaaaggaagaaccagtcacctttcacttcttggccaaattttatcctgagaatgctgaa

SEQ ID NO: 103145 - DNA, 1048 bp, Homo sapiens
agaggagagctggctttcctgctgtgtttatttcagtgtccccctgccacgtcatgcagttgtcttgcttctgtgtctggaacatcccaagttgcaccattctaagaaaattaagtgcaatgaaatatgttaattcaacattatggcttaagaattatatttcctggacctcacgtgtacttaaaagttgaatcgatcaaattttattgcttccttttcccttagagcagcacgttgagagtgatggttttttctgcaatcataactcagtggccttggtgacttttgtcttgtgttaatacttaaaagtagatccatttcctctggggccatgcatattcaaaggggctgaggctgtagtcatccccagagctgctcttgacacttcttgagttcatagcgctctgtcacacagcctctgttgtaactacagagaccgtttttactcttcagcattgatcatgaagagaagagataaggggtttttatgcatagccgtcataccagtaacttctgtgactgaactctccacctgtctgcatcagtaaaaaaaaaattgtaccctttgtcagaaaattattaacaggctgctctggcagccctcattagaacgccgtgaggccatctgttgtgatcagcctacacacctcacttccactcacagagtatcatgtctcccttgttgctcctttcaggtaaagaagcagattttagatgaaaagatctactgccctcctgaggcttctgtgctcctggcttcttacgccgtccaggccaaggtaggctcaaagaagaaaaatgtatttttcctgggcgttaatttgggtcatgggatcactcctatcttctctttctttgggttttctgtacttcagagagacttgccccagaaagtgagatgttatgggacttgtggacttgaagaaccactgtcactgttccagtgtttgtataatcttgtgtgtgtatgtgtgtgtgtgtgtatgtgtgtgtgtggtgtgcagaaattataagtatcgttctaatgaattagaattcattctaagtg

SEQ ID NO: 103146 - DNA, 1863 bp, Homo sapiens
tgttgttaatcacaactttcacagttgtgatttggtgttttaattcaaaagctactgttttggaagtgactgctttctttgagggttagaaaacatgcccacatttccatacaagtgtcacattcttgttagcacatcacccatccatctcttacaggattatgcaactcagttcatagatataatcagctttgtattttcattcaaggataacaaactagcaaggttgaaatcttgacttgtcatcggaattgaattgctccctggagctgggagggaatgagattggtccagctctgttcagaaatggcagttatctttagaatctcaatcgcctgctctccctttcttctttccagtatggtgactacgaccccagtgttcacaagcggggatttttggcccaagaggaattgcttccaaaaagggtaagagattaaattcccttttcaggaagacatagcagatatgtggtctaaaagaaagctaaccaaaggacttgaaggaatattggaagtacatagcaatttaattttaataaatattttgtaatctccagtaaacagtgtgggatctctgttaagaatattaaaaagcaaaggtttttggagttagtttggggtcaccaggactagcatggcctgtaaatgttttttctagcgtggttgttttttcagatgcagttgagcatcattgattcccaaagaggaggctggagcagagtgtattcagcttggggaattgagctgtttgcagtggcgaggggcggatagaggagatgaggtaggggtgggcattgtggtttttaatcctcagtgttgttcatcttattcattagccacagaagcaggcccgccctcccttttgctcctgccgattttacagccctcactcatctgtcactgggtaataaaggcccgtttctcacctctcactctctttacctgtccctcgatggcttctgagcatgtgaaggcctgagatgagtgagcattgcttctgactgagctccgctgtcagaggtggtctctgtgatgtatcgcccaggcagggacaggggcactgccagatgagggttgcacctaggtctgagttatcatgcagctttctgagttgctcctccaatagaatggtgccttatttacacgccctctctctgtgtgactatctccctgggtgtagctttttaaaaatagctttactgttttgtaaaaatgatgcataattataaaagtggcaaacaataccaaatttacttcatgtgtaggttttttattttgctctattttttggtaggtaataaatctgtatcagatgactccggaaatgtgggaggagagaattactgcttggtacgcagagcaccgaggccgagccaggtgaggcccattcattgttggtttacattcctttatgggcttttttttttttttttgccttaaagaactgcaaaactaggacatgcttgttaaacaaaatgcagtactgaagtctataaaagaaaaggggagagctggggagctgggagtaacgttggtcttcagttttgtgtgtgtccttttctagtacgtatgacataaagtaggtatgtgtactgcctgtcaagatatatagacctgtactcactggtaattaagtttaagatttttttttttttttgagacagagtcttgctctgttgtccaggctgaaatgcagtggcgccatctcagctcactgcagccttgacctcctgggttcaagcaaacctcctgcctcagcacccccagtagctggcactacaggcacacgccaccatgcccagctagtttttctatttttagtagagatggggtttcaacatgttacccaggctggtcttca

SEQ ID NO: 103147 - DNA, 1045 bp, Homo sapiens
tttttagtagagatggggtttcactgtgttagccgggatggtctcgatctcctgacctcgtgatctgcctgcctcggcctcccaaagtgctgggattacaggcatgagccaccgcgcccagccaatatattctttaaaacaagagttgttgggacaaaggatgtgagcattttgcattttgccaggtaccaccaaattgttctccaaaaaggctgtacctgtttatacatgcctgtcgacaagtgttatgagagtgtcccaccccccacccccagtctatcctcaacaattgtttttatcagtctaatttttgtaatctaaaaagtgaaaagttgtattatgttagaattccattcccttgattaggaattggtcatgttttcattagcctttaacatttttttctcttcttcaaatcagtttcctaacacttttttttttaaacttaagtgcaacatgcatatggaaaagtagacaaattataagtatacaacttgatcaattattgtaaggtgaaaacaccagaggaagaaataacctgtgtctccctacccccaattcccctttcttcctccccaaaggcaaccagtctcctgatttttaattccagattggcgttgcccatcttaaactttgcattctgttttttgtgtctccttttactcagcatcatgttgtcagattggggtttgtggcatgtggcaatagttttctcattttcattgctgtatagacttccactgtattagtatattaaaaattatttattcattctactaatgatggacagttaggttgttgggttgtcccctgagttttgctattacaataatgtcaaacaatttcccaaagtaattgtaccaatttacgtcaatgtgcatgatttctgatttctccaccttttcaccaacacttggcgttctctcaggctgggtttttaaaaattcattgagagcatttggagattggagagagaaggaagaggacaaggtcatagggagacttgagttaaaatatttcagtatgatacctgtttgggagtttt

SEQ ID NO: 103148 - DNA, 1397 bp, Homo sapiens
acattgcccaccaggctggtcttgaacttctgggcttgagcaatcctcccacctcagcctcccaaagtgctggaattacaggtgtgagccactgtgctcagcagttcttcattaattttaaaggaattattgagcatctgctttgtgttagatttcatgggggaaacaaagatgtagaaaatccagtcttagcattcaaggaagtcaagtaactactcacctgctataataaataagtgccgtggaagagacatgatgacaacaaatgtagtcttccacatacaagcacattcaccctgaccgtctgaatttaatctctataagaacactgctgtaaaggcaggggctgtgttgtcaatatctctgtgtcacatcaggaagcagagacacagaaggatcaagtgacctgtgtctgagtgaagtagcagagattaggagccagagttgctgatgccacagcccccgcctttcagggaggcccagaggctgagtcctgagagcacaggggcactggggagagggaggctccactcagtgacctcctggtacctgcacagccaggacacagactagagagtgaagaacaggaacagcttatgttgctgcctgcagagccccaaacctgagcatatttcctgttttctctttttcatggcaactcaaggaagggaacaccaggcccctggtttccagtatatggttgggatctactcagccatgcttgataagacagactgagccccttaattcaaaacattctgactttgaagtttttgttagtagttagcccaggagataagcagttaggtatttcttttttaaagtacttaaattgaaagttccacatgacataaagctgtatgtgtgccaccgtatggtagtttttcatctcccaatttcataaagtctgtttattgcacgtccacacatttgtgtgctaaaggctccctaaacacccgttcttcaaagaagccaaggattgaaatctcccatactatggcctgacacagtaaactctaatatgccctctccgggggacaggcgccatcatgttccatcatgtcaataactcatgcagtaagcagaccccaagctgacttgacataaaagaagtagtcttggtagttatgcatgacagccatgctgtcaaaacagaaatgttagtttattttaaatgatccattgattctttgtgtacgccctggcatggtgcagagcctgcggtttccccactacttgtggtttcccaatgacagctccagggtttgacagcaaagccaaaaataagctcacaaaattcatgaatagcagcctacacaagagcaacactgcttctaagttaacttggctgaaagctaaacaaaggatcattttctgtcctcagtgtactaacccct

SEQ ID NO: 103149 - DNA, 1031 bp, Homo sapiens
atttgattctattaacagcttttaccaaattattcccatgttcagaaacctgtggtgagctcaggtatcctgtcacatcaaacctaaacccttcttttttttgagataggggtctgctctgttgcccagcctggagtgcagttgtgcaattacagctcactgcagcctcaaactcttggcctcaagcgatcctcctgctttggccttccaaagtgttgggattacgggtgtgagccaccatatctggccgcctctgacttttattctcactgccagcccctacacccaccccttcctccctctcaggctaaacctattatatcatcttagtcaccaaaaagctaataccacacacacacacacacacacacacacacacacacagctcatttccctgtctctaccttatttctggttttgccctgtgcagaatgccccttcacctgccttttagctaccctgttggattgttcttctaagatcagcttcactctctcttgcttatggtggatctactctgaacctccacatatttgtgatttgtaccacccagtgaagcactaatatttgatgtgatttcttgagtaattggctgttgttagcctagttccaactagatggtgagcttcatgaaggtgggcccatgccctcgactacagtagccctccagtgttggcctcagggttgggcccattaaggatgcttattttaggttgtcaagaatcccttcccacactcatgcctaagatggtctagagagcgtacctttagggtcctgagcttccacagcccgagacttggtgctcctaattccctgaggtttagtgcctggatactgggaagccaggacaaggcataacttcatgctggtctgtggccagtgtggttgcgcatttgtggaatttccaattgctggtaacattccaggctgtcggactgaaactgtgttctgcttcattcttccagtttactattaaaccactggataagaaaattgatgtcttcaagtttaactcctcaaagcttcgtgt

SEQ ID NO: 103150 - DNA, 1147 bp, Homo sapiens
gggataagattgaagcaagaagtaattaaatgtgctttaattatttaaggcagaaaatagtgcagtggtcacttctgggttctgctttttgaactcagttagtaccctgggatcacagaggaatggcactgtcttgtgcttgttccccttattaagctcagcatgtggcccaattaatgcagtgatccagaaggcaagggaggtagtggtggctttgtgctgttgccttaaggacacggggctgtgtttcccgcctggctccctcctgtcctaggcctggctcaggagttgtctccacatgaggctgtgcaagtctgtgctgtggctgttgcagctcccccctgtgaaatacaatgtgtgaactattgatgcatcacgtagaatgattccatcttctctgtgggtcagaggcaagagtggagctattgttgatgaaatcagagatgtgagaggggtccatgtggattagaaatggtgagatggcttgcctgcccagatgagaaagctgcttatttctggggctctatctgagggaggaggtcctgcattgcatcccatcggccatggggcagagccacctggggtttcccaacaaaaagcaacattggcaaggtagccatttcagtgcaccgtgtataagaatgcctccttctgccaggcgcggcggctcatgcctgtaatcccagcactttgggaggccaaggtgggtggatcataaggtcaggagttcaagaccagcctggccaatatggtgaaacctgatctctactaaaaatacaaaaattagccaggcatggtggcgggtgcctatagtcccagctactcgggaggctgaggcaggagaattgattgaacctgggaggcggaggttgcagtgagccgagatcgcgccactgcactccagcctgggtgacagagcaaaactctgtcccctccaccaaaaaaaaagaatgcctttttctatccgggtcaagactcaacaggtttttattgtttgttcatttgttcattcaccactagactgtttttcaagtggcacagctttcaactctgcaactggtttagaaggacggggtggggggcaataagaatgaccctggctacctaaaggaaagggaaggaaaaaggtcccaaaaggggagactgg

SEQ ID NO: 103151 - DNA, 2323 bp, Homo sapiens
cctgatggagcagaaggtgctggaagccgaggtgctggcactgaagatggctgaggagtcagagaggaggtgagggggcaccgggcaccagactggcgaggaggctggcgaagggccgcagaccagcctgccctgaggctgagctctacagcagttgtcctcaagctgcttgcccatcttctgggccgtggggaggctcctccttggctgatggtgactggtgctttatccattttggggctggcgctactggttgggcacaggaactcagttccccctccaggggggcctctctggtcatacttgtgtctctttgataagcccctgtccctctgatggccgtgtgtgcaggaaaacccctgagcatatccacagaccgctttcagctgaagagatgtgaggaggctctttgtgcatttaaaaaaagtgtggttcttttctgctttcattcagtggggctgcaggagaacagcagctgcctacctttaaagggaagctagtgcctgcatcccccagcctttcttggcacatgggggaggagggctaggatgatctctgtgactgggatgtcccactcatggccaggttgaaggatggaactgttgtctgtacttttgaaagactattctaggcctgcaaccttcagataaacactgacacattccccacagcttttggctctgttgatttagagcacttgaatttggcttttagctaccaaggtgcattcactacagttttcctcaccacgctttgcatgtcgttctgggaatatggttcctttttgcctgccctgcttcaggccccttactgtattcgggggtcactccctgtgcatgatgcaggttgggccaggtccctgcaccaggcctcacatgccgtgaccacctgagccccataggatgaggatctgcaccagggtgcgggtgccctcagtgactgggctcatctttctgctggagaaagtgggcacaaggcccactggtgttttatccgggggctgtgaagacgcagttcttgcacattctgccctttgcgatccaatataagaactttgatcctccaggttcttcctttgcccagctcactctcacccaaaaataaagcagagaaagctgctggtgccctctccagctcctctgtctcctggctgcagaaggtctggtttctctcattccccaccagttttcctgctcttccagtttagatttaccaactcaaacaaaagtcctcaggaatgttgtccttgcttggaagttctgatttcatgtaaatatccctgtctcactgtcctttttcacctctttgggtgccatcctcagggttagcccaggtccctcctctgcaggggtggggtggtgtcttttcctgctacctgccctcttctgtgaagctgacatctcatcctttccttgcagggccaaagaggcagatcagctgaagcaggacctgcaggaagcacgcgaggcggagcgaagagccaagcagaagctcctggagattgccaccaagcccacgtacccggtgagcctgggggccaccagctggggctgccttagtcctggtgatgttctctttcctcccggcccttcagttcatctggcggtgccttcagggtgaccattcaggcaaacacatggctggatgagaggtgcagagagcctgcagttagggactgggtagaacatcctggtctgccatttggctttggactagttagttgtctctttggttgcctggataacaggcaacagggccttttccagctctggaatgtttttctttttctaagtaatatagtcccaaattatcctcaagagaatttgctctcttgcctcttaatgctgagctgaatgtaatcttcaactatcagtatataccatatatcataattatagttctgggaagggattggctgtacacctcagagtgaattactgccgtgcaagaacgagcagccactctcagtttggggacagagagtcagacttccattaaatggggtcacaaaatgaatagaagcctctttccttcctttcttctgtgcattcagtttggcatttttttttttttcatatttgttcagtgtccacatagtgccatgcagttggaagtctctatcctgacaggtgttctcagggtgcacaggtgcctagaggaggaggacacagcccaccctggaggagcaggagaggctcagtgtggtgtctacactgatgcttgaagggggagcaggaagtagccaggtggagaagagaacatagggtattcagggtgagggcacagatgcacacatggcccagactcacacacagcacagtca

SEQ ID NO: 103152 - DNA, 1125 bp, Homo sapiens
tgtgtggatggattgtaatttatttaaccagtccctcatggatgagtatttagtctgttttcttttgcaattttgaacaaaatgacactgaacatccctgaacacaaatcttgacacacacacgtggatatattggtagaataaattcttataatagaactgtggggtcaaattttcgattttgatactctccaaagaagtcataccagttcatgctctcactagtggtgcagcaactagtacgcgtttttgctgaaaatttttatgatgtgtaacatacacatagagaagtgcccaaattacaactgtacagtttgaagaattttcacaaactgaacatacccatgtacccagcacccagatcagaaaacaggacatccctggcacccaaggagccttctctcagcacccttgcagacggtctgcctcaggccttgagaatgtctcaaatgaatgttccaagcctctgctctttcccagacactgtcctagactcaatacgggatccaaggatgaaaaagaggcagattgtttgcaggaaacttgcaaatagtagaaagaagatacagccaaaaagaaatcttttacagggtggaatcgcagaagaaccattagagaaccgtaaacacagcgttaagggacagcaaagaaaagggttgccggctggctgggaggggctagaaaggctttggtgagagatcgtggtgtttgagaagggccttgaaagagggatggagcatagggaggagaaatgggataggcaggggtacagagatgggaaggcagtagtccaggggataataaacaatactgtctgtgacttagtagggcaaatagtaggagaagccgggaagctagattggggtcctctttagatgaccctttgtgctgggatgaaagtccaaaaaaaaaaaaaactacaccacccctgcttcaggccctactccggttccattgtccaagcccaagcccctcggtgggccggtggggagccctttgtggtggtgcccatctcccaccccacctctccacactgcatggcagactcctggcaccctcactgggcactgccccacccattgccatacttcccgtccggcagaccttctcctggcactgccttgg

SEQ ID NO: 103153 - DNA, 2101 bp, Homo sapiens
ttaagccaaggggtgttatacccagggagctgccttactttatgagaaagcagaatgaaatggaggctattgagaatggactttccctctagtcttgtggtgtctttaagtggcaaggactataaaaccaaactgaatttttaacttttttcatacttaaaaggaagtgtctaggaaagaacctctttgttttaaaagagaagactttattactttgcaaatggtttcatatctttctctactggtattttgagctttcagcattgtcgagattcagaagctaaattccatactaattatcagcccaagagcatacctctctcatttgggccaagcagaagggtcctctcataccaaataatgctctgctcttaactgatagcccaggaccaggttaacacctataaaataggtgttattaagataagactgtccattgagtttaggtgatactgatacagttaattttttattctttacctcagtctttaaaataggcttccagttttatggactgtctctgtttttagtggttaagctgtatctgaaaactccaggggatctgtttctgcctgccttcgttgttgggtacagtaggcagccctgacttctacctctcgactccagtcacaactggcaccgggtagagaattccttttaatagtgcaacctagaaggaaaggcatttccacattccacattcttctttcctctggcttctgtaatttactgggcttcccttccaaaacaaaattattaaacagtaaaggggagttcaagggaggcctcggtcattaaggaaagaggtaaaacgatggctgagccagtgagccagtcagcccttaaatgaactgcctcagacaccccatctcaccccttacccccagccttgtcatctgggtcccaggaacagtctcaccatttccactgctgctgcaatgagcagtgccctcagccacagaaacctgcagtgtgagagctggagagaccccgttccaagccattaaaacaaacaaaatcactcatcacgatttcaggcctatccaagcattttgcagatggcacttatggcattgttgatatcacagggtatgtttttgtttttcttcattttattttgctggtttagcctcaagcccaaggcagaagacctatctgcatttgagccctcaaagtaggttgttcccaggtactctctatgtggtgatggtgctgccctctgtgatactaacccgtgcatgagcttgcctgtctctgtcctcgggccacactgagcccttacgagggcaggtggtgcctgggtactggccgcagcatgctttgagtctaaaagtaggcacccaccctgtgaagccagaccagcctccagggccccagaagactgcctcgttccgaagagcatgtcatggggctgtaggaccagccattcttcccatctcgggtcattgttgggctggggaaggttatggcttcttgtccagtcaggtgtgtctaaaagtcctttgtcttggtggcatactcctagcatggaaatggggtcaatctgggcactttggagactggtgtgtttaactcaagatcaagaccttttatgcgttgacagcctctcaagacccatggtcacacctggcagcttctggtagtggggcaaaagggttgcttgtgctggctcattttcctttagagctttccctttctgcacacatcccttttcttttcaaataaagcaaacccagagcacagggtctgatatgtgagtccacggggagtggactgtctgttcatctgtgctcagccacctctgcttcagcttcctctccataggctgagcagagatgtggtcagagtgaactcacattggaacagtacactcacggcaccctggagaggagcggtcactggttgctgagtgaattaaccgaatgtttgctgcttttctcctgcaacagttcattattcctccagcatgcctaggcagtggagagaatgtattttgcccaataataaaatgacatcctgcctctacttctcacctaatccccagtagtacccatgccaacaagccccacaccacctgacagcagcataggatgtgtccttt

SEQ ID NO: 103154 - DNA, 1034 bp, Homo sapiens
agtcagagcagtgctagcgatcaaaagccgccctggggaacctggaattgtttcattctcagtgggagcgacacgtgtcctggcatctgagccttccgagtgaggggagtgagtctggccatcaggctggggttgagggacacagggtgccttgagcctggctttcgtgccttcagagccacagtgccaatgatgggagtggtggcttggtgtggcgtaactgtaccaccataccttgatggtagaatgcagtcctggaatatatacattcagggtctttctttcatcgcttctcaagagaggggtttcagtctcccgatcctgagctggtctgagtgccagcaaacaaagtcatcacttttgtgcctgtggtctcccaaggagcacaggatttccaaggaaattgacggatgagaaatcatgggggtggtggagcttagaaagcttatttcattagtaaatggtttgaaccgtcaaggtccagctgtggtttccactgatggaggaacaggaagaagaggagccttgacatttatctcaagcgccagcagcttctcttggatcaggaagacataaaagtccaatgtcatcttcaatttgtgcaggctccccttggagttgcagagccagtgaagtgaagtagaacagttaaaaaaacacccggggaagtgataaatcacagagagagattgcatatgcgggaaaggtgtctcccacaattaaaacaagtggccagagcctccctggcgacctctggtctgcattgccagccctgaagatggctcctaaattacttaagtttaataggtagttaatatagccaaccctccttatgaccccagtgggctgaatggctctgcttgctttaggaactgggcgttgtatggtagagcatcttggccttgacataaaaggtagcatactggctccccagccctgaaccttccctgctagagcaaggcaggggtgagagggggaaggaaagaaaaaggagtggggagtggggtggggagcaaggattaacagggagcagt

SEQ ID NO: 103155 - DNA, 1036 bp, Homo sapiens
ccctcggcactgaagatgtgtttcagtgcagctctcctcggcaccggattcgttgctgcaacagtgggagggaagagccagatgcaaactcgttctgcgagcccgaggttctgttctcatgatccttgctgtgatttctcttttgatgttggcaattttaaaatgacatcagtctatctggacctttttcctaaggctcttgctcagaccactcagtagatagccgccacctgcccagtgaggtgaatcaggcccattaggccatttgtcaggggaaggaacagaggagcagcggagggccccgccggccagtgccacagggcagcctgcaaagcaggtagacaggttttcaggcagcttttgctgctttgggtccctcagggattaatacacaaaaagggccccttgggtattcagtggcagatttctcttgagagcagataaagtcgctaataacaaattggatttgttcattggggtggacttggcctttcgttccacctctgtgtaggataagtgtgtggatagtgctcccactgtgcacatcaccatatggcatttgggtgcagctgtccctagccagactgcagaaaagcttgatctgggccggacgcggtggcttatgcctgtaatcccagcactttgggaggccgaggcaggcggatcacgaagtcaagagattgagaccatcctggccaacatggtgaaaccctgtctctactaaaaatacaaaaattagctgggcgtggtggcatgcgcctgtagttccagctactcaggaggctgaggcaggagaatcacttaaacccaggaggcagaggctgcagtgagcggagatcgcgccactgcagttcagcctggcaacggagtgagactccgtctcaaaaaaaaaaaaaaaaaaaaaaagagaaagtaaagaaaagcttgatctggccacttagtacagccatccccctttactggcccttcctctttgcttatttggaagggggaaggtttcccacaccccaaaccaaagattcttttggaatttgct

SEQ ID NO: 103156 - DNA, 1210 bp, Homo sapiens
gggccacccaaaatcctcaggtagcagtgaggaggaacagttgaagatgcagattgcatgcctgggttagagagtgccggctgggtaccaggttcttttagccagcctcttctgtctttttaagtagacagatgtgtctcctgaatctgaacttgtttagattgggtggatgtgtctgtttttgtcacaccacacacaatttggggagcgtaaggaggcccagctctgccagaatggaactctcctaagttctcccctgccgtctcacagcctgctggctgtcacaaacagctggcagttttatggacaagtgggcaggggaaaagggaccctgccggggctgagtctcgatgttgggcaggaagtaaaagccaggacccaacaagtggatcagaggggggatgtgaagatgaacagtcagatagcaataaagcctcatagatctgccccagagaaagaaaaggaagttcgtctcctcagaatggaattggattagtgacagacttgagcagccggttcagtcgagagagaacttaattcctcctgtgttattcacacggctgattctaatcagatgtgaagagacagctggaggagagcagcgggtcagcccatgcctggtgcggaggcttcatgttcttgtaggcatcttcagggaactggcaggagcgctttgggttggagactctgagcagggcccttgggtttatagcctgcccaaggaactgggcctggctgcgggactcccatggttggaccttgtctagattcagtgaaagttttgaaggacagtgcatgacagacgtcactggtcaggttcaccagagcttggctcacttgtcttcagaaggattcaaaggcagttgaccagacttggcaagtcccagactggtgcagccactgtcctcgagaccctggttgtacaccctgaggtgcttctgcttcattacctgctgaaatttggagacctcttcttcctggataaccttcaagatactcattgtgcatgcgaggaattccccgccctcctggggggactccactccccaggcaggcaaggttgggcaaggggagggctgttgctggattgccaaagggagcatggacatttttgtttggaattcagggtgggaatgggactcaccagagtggcttcagtgctcaactcacagtgcaacataggacaaggtgaaggccttcttgggaggcc

SEQ ID NO: 103157 - DNA, 1047 bp, Homo sapiens
catcacgcccgcttcacagtgaggaactgaggctagaggggagcaagtgacctgcccagggccacacagctggtcagtggcccagctgggccttgcaccaggcagctgactgtgcctgtatctgactcaaagtggctgttcttttcagaaacctgagcggagatactgggctcacatgctttcatttaaaccctctctcatttttgccccagtagttatctggcagctaaatctcttcctcctttcttccccagtgaccattctggttcccatcatcacagggcacataactcctggcccttctcctctgattacatttagggagaagcccatcctgatgcagctcccttctagagggagttccatttaggcaaaaaagcgctctccattcccatcagaaccgggctttccaaagggctctgaaattggttccactgaagaaggcagctgagctgcctccccacattccgcttgttagtcgggaacttcaaggccaaaagatttggcaggatttaaagagttgctctcaagctgtctcattctgagcacactaatgctgtctgtcttctgatggtgaagtggtgggtttggagtctccctcccctgccctttatggagccgccgatagtaccgaggactcttcacatgcagactcgaggggtccagagaatgggccagaccatcttgcctgccccatggcaacctccagaggaaagaggctcagagaggtcaggggtgtctgcagtgagctgctgatggcagagagtgagctctcggaccttctcagccgggtgtggagctcttgcctctcccgcgaacctcagtttagttatcttcatagcccacgtcctggtcgcttaacaaacattgagctcctgatcggcacataacactaagccagatatttgggggatatgaagatgaatggtacagactccctcccctccacccccgcactcctgtgggaagtcccggagctggaaatggaacacagtcacacccaaggcattgatttcaggagtcagcagagagcagggagtagggaga

SEQ ID NO: 103158 - DNA, 1434 bp, Homo sapiens
gccaagcccggaggggatgagcagcctcagctggtgccgccacagacagcacaccacagaggtggctcagggaccttggtagatgggaatgtgagaatctattaaaataggcagggatctccggtcctctgtcaagaggcaatgctgacggctttttcctgctggcgtgcctctgcccaccagccttccccttgcacatcctcatttgtcacctcctaatttgaattattgggcaaatctggccgcttatttgggactgacagccaacttcttgagcatctatttgaacagccttccctttcgctcccagccacctttgaggtgagtccaagtggcaggacaggaccctgtgtgacagagcggaggtcttgtgccctctcagcttcttctctgctttcttacagctcaccttgcagagcgccaagtcccgagtggccttctttgaagagctctagcaggtgacccagccaccccaggacctgccacttctcctgctaccgggaccgcgggatggaccagatatcaagagagccatccatagggagctggctgggggtttccgtgggagctccagaactttccccagctgagtgaagagcccagcccctcttatgtgcaattgccttgaactacgaccctgtagagatttctctcatggcgttctagttctctgacctgagtctttgttttaagaagtatttgtcttcctttgtctaatgtgggattcctgactcccttcgtccaaggcaccggtgtgtgtgtgtcttgcactccagagctgacctccaccgcccagcctgggaagtcattgtagggagtgagacactgaagccctgagaagccagtgccatcatccccaccccgcccagggttccggaacattcattcccccaccggtgaggacctggcatgcagcgaagcagcccagcccggcggatcccaggccagcacgcctgccggcttctcatcgtcagggagcccgcccagagctcgtgacgagcaagtgctgggtccccgccaggcaccccgaggcggcgctctggctggcagctggtggggaataggcagggcagctgtggctggggagagactttaggcagaagctgtgatgcaggctgactgccagccgaggggctgggtagtgccgtgcgggagctgatggtacagggcactcgctgtccccctccggccaccctagaccagggtccgagaggcaggcaggagccactcatgtcttccccattgcccgacgcccatagacgctccttcctgtgtggggctggggtactccctggtcgtactgcagtcagcacccgtaacccggctatgaccagggatctgtaagccctgtggctccacaggtgctgcttctcactggcccagactctgagctccaccggcccagtctgcacggcccatctgcttcaccttccc

SEQ ID NO: 103159 - DNA, 1346 bp, Homo sapiens
tagctaggctggtctcaaactcacacctgggattacaggcatgagccactgcacccagccccttcttgccctttcttttctccatggctgatgctgctgtggccagccagggcccttgagatccttccagtttggctgttatgcaaagcaggtgatttgtcttaatcagataaaagatagaggctatgggggcctcaagatttttggagagcagaggtggtctctggcaattccatctggttttgagaaacttagcagctcacagagcacagagatcctgccttcttcctactatcaggctgacctaatggggttgggctgctcggcaactgcttgggtcaccttgccccaaggaaaccagccctgggtgccacccagccacttagggtctacagggtgggactccagacctagagcgtaagtatggatgttgtggccctgtgtcttcctagtgtgacccagccaggagcggaagcttcaggcgtttgtaaagtgaggtctggctctgcctcctccgttttttttttttttctgtttctgtttctgttttttttttgagatggagtctcgctctgtcgcccaggctggagtgcagtgtcacgatctcagctcactgcaacctccgcctcccaggtacaagagattctcctgcctcagcctcccgagtagctgggactacaggcgtgtgccaccatgcctggctaatttttgtatttttagtagagatggggtttcgccatgttagccagactggtctcgaactcctgacctcaggtgatcctcccaccccggcttcccaaagttctgggattataggcgtgagccaccatgcccggtctcttctcagtcttgaagcccatccctggatttccaccaggagttactttcctcctgacctgtaaatttgttctttaacaatggctgcaggtgggagcatatggtggtttataaaaacgctgtcgggctttgtttccttctttagctgccgtgtctacttctgaagtctgggaagtgccaagccacgcggcctcaagggagctggctggtgtttgagctgtggcagaagcacctggggctccagggagcaggctgggaactgcaggaccttgctcagccaggagcacttccccctccttgaggcaggaatactgaggtgcctccccacagatggagaaggtggagaggaggatgggcctcaggagcatctcaagccccagtagcaggagaaagaaagaaagagatgcctggttttcacagactggttcctgtggctgggatgactgcatccttttttttttttttttgagacggagtttttgcctttgtcgcccaggctggagtgcaat

SEQ ID NO: 103160 - DNA, 1069 bp, Homo sapiens
agagcagcgtcctgaccatggtggtttcattacgagcccttctgctggctctcaggcagaagccccacagcaccgggaccattcatgaggtcactgcccagctcatgatgtccgtgaggctgtccttttggccagtagccgtgtgcagctgtgtggcacagatggcttcgttcatcctgatcaaggccccacctcagccacagcagtccccccaacctgtgttgtccaccctattattcatgtacctgccaggccctgctagatagcaccccgtggcattacataacacttcatgagtggctgtgtcttgtaattttggggacaggtttctctctttccctctcttttttttgtcaaaagcccagagactgacaaccagctgcagtgtctaagtgttcctcactgacagggtggggcctcaccacccctggagggagcagcgttggcagggagacagcctggcccagtgaccctgggcccaagccagcccctccagggctttcagggaagcgccatccattttcaaagatgtcaaacgtcacttcttcctgtagggcccgagtcctgcctcctatcagggccagatcatagaaggctattttctattctggggaacgattataacttaaatgattgttttaataaaaattctaagctggaaaatacttgccttgggcttcctcagtttgcctgttgctcaggccattgaggcgtcaagaacacggctgggtggtggggctgtcttgtggttctgtggagaaacgagccctctgctgtctctcactgcttgggccttcacctctggccccttgtctttggtggcaaaagaatcacctccttccacagacctctaatgacaccttcgccagggaactgcctccctcttcctggggcacttggggggtggcaagggccctgcatggcgtcccagcactccatttcctctctgtggtccctgcccatccgtgatttcagaccagagaactagggagctgggctgggtgatccttccagacatttctgttttcggcgttccaggctctgggggtgcatgcagagcccctggggc

SEQ ID NO: 103161 - DNA, 1039 bp, Homo sapiens
cggctggggatgccagggctccccacatcacgtaggaagggcccctggaaatgccaagttgggagagcagctcccagctggggcagattcttcccctcagaaggtggtgggggcagctcccagccccagtccagagtcccctccctgctgtgtccagtgcatgctgtgtgtagggtggagaaccctgcaaggcagggctcagggaaacaccccaccctcaggagctcctcagggcagggaaggtatggggagggggacaccagggggccaagagctgtggatactcaaggatgacctccactgggctcaggggccccgtgaggtctctcccccagcgttacaggggagcctgacttggtggctgctgtgtgtctgccccaagcgtgctgcttctgaccctccggtgacaggactggtattagccaccttcggtcctgtccaggctggagcacatggatgcaatttaggatgctcgagagtgcctgggaaatgctgagtctaggatgggggtgggttgggcaaaccttggttttcaggcctcagacctggagatcaagatcaaggttctagaaagagagaagtttaaggcaggggagggaacatgaagagtgaatgcctccccaggacccctcacccccgaactcctgaccaccccgccaccctcccctcccctcccctcccacctcctaaccacctcgcccccctcccctcccctcccacctcctgaccaccccgccaccctcccctcccctccccccacctcctgaccaccccgccaccctcccctcccctcccccaccacctcctgaccaccccgccaccctcccctcccctcccccaccacctcctgaccaccccaccaccctcccctcaacccccacctcctgaccatcccatgagatggcgaaggggagaaaggtgcagggcagatgggggtggggagctggggcagagaaggggtcccatgaggaccgtgggtgaactggggatgggggtgtccgggccccccagtgctgctcagagttaagaacttggcctc

SEQ ID NO: 103162 - DNA, 1054 bp, Homo sapiens
tggccactctcaatgaaggctccactcacagactgggcaggccaagtgtcagccccagagccctaccctggggactgtctgcctggaggtctgactccttcctcctctcttcggccagaaagggctaagacttgcagccaccccattcccacccttgggtgctcgagtcagctgatggtgctgggaccagcctcagtgttcctggaggactctgctgtgtgtgtatgttggaaaaggtgtatgtcccagccatggtgggcacacagaggggatctaagagagtccgtgcctgtccctcacagggcctgggtgggcctcaggccagctctgtgcagccacattcctaccctgccaactgccctccatgcctccccagggccacaggtccccagagaccttttccagaccttcaaggccttttccacccagctctccctgccagcctgcccttctggctcagcctcctgcacaccctcacgggcctgggccctgcacgctccagcctcttacccccgcagggcctcccctcatgttgcatctgggtccctgagccccctgtgctaggtaggtactttcactgcatcctccatcaccagccccccttttataggtggggaaaccaaggctcagagaggtgagcgattgcccaaggtcactccatgagctgaaggtgcagagactcaaacccagcgccgcctggctgggaagccctcatcttaactctgtgcttcccacctccctgcctggtcctcctttccgctcagactgaccgccccctggatttctgcggcaggcacgtactgtctgcagcattccatcccgggctgcccagctccctcttcctggcacatgtggctcctccgcgaatggcgtcctcccggcagagggcctgggtctcgcccagaccgccctggggcaggagcactcatgaggccctgcagaggcggagagggcagagggggatccgtgccaggaatggccagccctggcattcaaggactgctgaaagggacctggggccgccagagggcttttagggcacctgcagccaaga

SEQ ID NO: 103163 - DNA, 1153 bp, Homo sapiens
tggcactgacagtgtggggctgtgccagtttcttggcccaggaggtagtacaggggccctcccaaagttcagccctggaggagccccctggctggaggctgctcagagccttcaggccccagctctgcctccttcctcagctggactacagttctaggctctaggctggggtggtggacaatgtggccttggtagctgggcctctggtgggagggccagaaggtggggggctgcagggccacctcagatgcccatcctccacgagcttctgcctttcctgaaaatccctgtggaaggaagaactgaggccaagtctcggggccctgagcctcgggttcctcacctgtgaaatgggctggcccagcaggtacatggagaaaagggggtctgggttggggtccaacgagggtcagaggaaggggcccaaggagaagaccaggggcctcctcaggctatgccaggcagcaaggcccaggacaccctggcttcccaccctcccccaggagaaggctttctgtccctgcctgtgccctgtgccctgggcagacctcagggaccagggctgggttggctgtgtggccccagataggctgctgtctcaaggcacagggtgcccgctcctgcccaagggaccacagcagcgactgggtcctgggggttcctgtgcaaatccctccttaatttcccaggagcccctggatggtaggaagagtgagtgctccttacaggccagggtggggacagggtggggctggggaccatcctcagagccaccacccggccctccacagccaggccacagctccaggtgaggaccgtgggtgggtggggagggctcgctggatacccaggccctgaagtacacgcagatggcggcccagggagccggccaagggagaggtctgcaggcggcggtggtgtggggcgggccacgggcaccgcatgcggtggatggggcatccaggtggcgtctacttcatgccactgcgcagcacctggttggccgcaatgagcatgacactgatgatgaaggcgatggcgaaggcgcagatgagactcttgcgcacgcaagtctggcggatctgctggttggagcaggctgtggccgcccgccgggagcaccggggagacagaaggggacatcaaagcgatg

SEQ ID NO: 103164 - DNA, 1052 bp, Homo sapiens
tttaaaacaatacatgccaaatatagaaactttaaaaaatagataccaaatgaaaaaaatctggacataatcctattaagttttcttttcttttttgaatgaggtcttgctctgccacccaggctggagtgcagtggcatgatctcggctcactgcaaccttcatctcctgggctcaagcgatcctcccacctcagccccccaagtagctggaactataggcatgcatcaccacacccagctaatttaaaaaaaacaaactgtttgtagagatagggtcttactatgttgctcaggctggtctcaaactcctggacttaagcaatcctcctttcttggcctcccaaggtgctgggattacaggaatgaaccactgcgtccaacctaaagcaacaaacttttattttctcatactgtttctagggtcaggaatctgggcgctgcttagctgagtggttctggctgagtctcttgggaggttgcagtcaagataccagccagggtggagtcttctgaaggcttaactgcggccagagggtttgcttccaaatgtattcacgtggctgttagcagggggtctcagttccttgccacgtgggccaccctgcagggctgctcacagtgtggcagctggcttcccccagaccaagtgatcagagaaagaagacactgagatggaagcagcagtgtcttttttttttttggagatggagtctcattctcttgcccaggctggagtgcagtggcgatctcggctcactgcaacctccgtctcccaggttcaaacaattctcctgcctcagcctcccaagtagctgggactataggtgcacgccccacacccggctaattttttgtattttagtagagacgaggtttccccatgttggtcaggctggtctcgaactcctgacctcaagtgatctgcccgccttggcctcccaaagtgctaggattacaggtgtgagccaccatgccctccctgcagtgtcttttataacctgttcttggaaatggcataccctcacctctgctctgttctcttggtcacat

SEQ ID NO: 103165 - DNA, 1046 bp, Homo sapiens
gccaaggagtcttgtctttttctagttgcactaggaggccattgaagggttttcaggagaaatgcgacaagatttaatgtgcactttaatgtcatcatcctggctggtctatggagagtggaccgcaagggggaagttattgtagtagatcatttgagggaagatgggtggttatttatttgagatggagtctcggtctgtcgtccagactggagtgtagtggtgctatctcggcttactgcaacctccgcctcccgggttcaagtgattctcctgcttcagcctcccgagtggctgggattacaggcgcctgccaccatgcctggctaatttttttttttagtagagacagggtttcaccatgttggccaggctagtctcaaactcctgacttcaggtgatcctcccatcttggcctcccaaagtgctgggattacaggcgtgagccaccatgcccggcctgatgggtggtaatttaggttagggtgtggagcagggcagtgatcagatttgggatgtaatttgggagggagggcagacagagcaagctagcagatgtgtgtagggtgcacaggaaagaggaattgaggaggatatctaagttttttttgttttttgttttttgtttttttttgagacagagtctcactctgtgcggctggagtgcagtggcacaatcttggctcactgcaacctctgccacccatgttcaagcaattctcatgcctcagcctactgaatagctgggattacaagcggatgccaacacgcccagctcatttttgtatttttagtagagacaaggtttcaccatgttggccaggctggtcttgaactcctggcctcaagtgatccgcctgccacggtctcccaaagtgccgggattacaggtgtgagccaccgcgtccagctgacatctaagttttgacctcaacaatttaaaatcaacagaatgatcttaagttctgttttggccacatcagtttgagctagccaacagacatcaagtggaggtgtctagaggcaaatgaggacatggatctgta

SEQ ID NO: 103166 - DNA, 1080 bp, Homo sapiens
gaaaagagactaggactcgcccctcgacgtctcgcggaaggtacctggctccccggtggctgcagctccgggctcctcctcctgcgtcctcgcgtcgcgtactgcttgctgggattcgtagtctcgccttggccatcagttcgcccttcccagagagctttgggaatctaagccgggactgggcggagggcggggagaaggtgatggcgcgcgagggcttctgggagttgtagtttgacatattctaacagccaggaattctggagaagaaaaattgggtaataaatcttatcagattatctgggctgtcctgatatgaaccttttgagtttttttcctcattcccaggataggaatacctctgtggttcaaaacacgaaggctgagattcagaggaactacaaatcccataaagtgttgcacgtctagggcctttggggaacgaggtcggccccagcgcaggcgcggtggcgcgagttggactgtgaagaaacatggcggccgcgacgttgacttcgaaattgtactccctgctgttccgcaggacctccaccttcgccctcaccatcatcgtgggcgtcatgttcttcgagcgcgccttcgatcaaggcgcggacgctatctacgaccacatcaacgagggggtgagggcctgtgccatccctgaccttggacccgcctgaggggtgacagtggagtagaggtgggatgggactcagtatacttttaccaggaagggggtaaggggtaaaccgtcggcgtcttctgtctcgagtccgccgtctgtccccttggcttgatgtgaattctaaaacgttaagcgaggttaatatatttcattttgcaggggttgtaagtattgctgtgtgccaccctacatacccacttgcccattatcagaagcaaaaactaaaggctagtgagagcaaaggacttactagctgcacaggaagccaggggcaagtcagggccagaaacgggacccctgtctctcagagtttcaagggcagatttgagcaggcgacggtcgtgaaaaggacgttagacaccttagacgccgtggctgaagtttcagacggc

SEQ ID NO: 103167 - DNA, 1006 bp, Homo sapiens
gttttcaggtggaatgttacagcgattccccaatacagatccaagcagagctgtcccgactgaagagaggactggagactctcccggccccatttcagtctccccctcaaccccacctcaaattctggtaacctcagagaatccaggggctggagcaaatctggcttgaaaggcttttggtttttcccaacctcctgagccctcctggcggccccatctcacccaaccaggttccctcctccttgtggctcttgctcctggttgaacctcgtctttgatctcatttctctccacaccctcaggccattcaccatccctcaggtgctgagaaccaaagtgcctagagaagggcaggaggaggatgacgacgatgaggaagacgatgctgacgaggaggctcccaaggtacctccctggcaggtagcagatgaaggggagagtgcagttctgaggggtgaatcagaagggcccctcacccctccctatgtctggccctgaggcagccccagcatcactggcagggacaggaggagtccctttgagcccaggatgtctgcttggagagctactggcttagaactaacttctgctgcccactagtgaggacctaggggacagattaaaggcagggcctctgagccaccagcttcattattaggcccaggagcctaggagtcaggagaagggcagttagcagcaccatacccaggatggcaattcttaaaatcagagaggagttagagcccaagggccctgggaggtcatctggatcggtaagttagaaaattctactttttagcagctaaactttttatttgaatgaaatcttaactagaacctcaacgtacagaacagataaacgcggtactgctcaggtgacagggcagcaacctgggatcatgccccacaccagggtgacaaattcagatgtttctggggccaggtcaccaacggcaatgagtagcggggcctggtggggactgcgctgagcagtgggaagcacgtg

SEQ ID NO: 103168 - DNA, 1013 bp, Homo sapiens
gaaccaagttcattccctttgtttccagggcttccgttcagcacatttcgtgttgactggtctgtcatctccactacactgagttcatgagggcagatctctatcttcttcatttctgaatctctccccaactcagcctcataccctgcccggcacagagaaggtccttaataaagactactaaaaaaaaatacaaaaaattagctgggcttggtggcacacacgtgtagtcccagctactggggaggctaaggcaggagaatcgcttgaacccggctggtggaggttgcagtgagctgagatcacgccactgcactccagcctgggcaacagagcaagagtccgtctcaaaaaaaaaaaagatgtgaagggaggcaaaccctagcccgccatgctgaaggctgcagtcctgacctgccctggctgccaggcagatagcctgacagactgagatggactcagacgcctgcctctccctgcaccaaaagccagttaatagaagatttttatggaagctctgtttggctttgtgtcttttctttttttttttattatcttacccttgatacattccagagacccgatttcacagctaagctggattttcttgcctggcatctcatattgattttcccctgcagggctagaagctacattccacaggcctgggtatgtttctgacaagccaggttttttcacaggtttgcaaagccgtgagttgagaagcctcagtccctgccgaagctgtgctgcagctcacttgtgacccaaacatgttccttctcccacccaatgcacccgagtttcctcacctgtaacgtgaccagagttgggcttccaaacattttcttccagtgaaattttacatggaaacttgagctgtggaagagacagaaggctgctgtagtgaggtgggggtgataggaagaggactgggaacccccttttcttataccccagatatccctatggctcccttgagctcagtcagaaagccacatgtggccttactg

SEQ ID NO: 103169 - DNA, 1191 bp, Homo sapiens
ctgcctgcaggttcctccgggactatgatgcactcttccccgtggccgaagacatcagcttgctgcagcaggcctcatcagtcttgtatccttctaccatagcccactacgacagggcccagcttgactaggtcagaggtgagacaggctgctggaacccagaggagtggaaagaggtttagccccagaacgcatgggtcagccagctgtccgaggtggcctgccaaggtcccagccttgccttttctagaggagatggctgctctgatgcttggggcaggggagatgcagtgctattttccgtctgtgtttcctgagtatctgggcctatgtgaccaagatggactcagcccctcctcacagcaggaggggaggtggacaagtaaacaggcagttagatagagtgtcacgtgggaagatttcagagggcaggaaaccagaggtggcgcctcacccagcagagctctgggtgggggtctcagatggaaatgatgtccaagcagaagaacagcagaaagaatgggagagcaccaagccaggagcaaggacaaggacaagaatgttcgcagtggacagaggacagagaaaacaggctccttagagccacagacgtgtatagagtacagggggcagtccttaaggaggggtctcccaagaggaggaattggggtgttgcaggtgaggtgaaggccagcaacgtgcacagccctggggtgaccatcactaagaagtttgggctctgtcctgcaagcgctggggagcgcggaaggttgtgaagcaggaagtgacatgggcagttctatactttggaaaagctctgtctggcccagggaagagaatggactggcccaggaccaccgtgaggctcgggccagtgaggaggctgttgctggcatccaagcatggatgatgagggtttggacaagaagcagtgagggagtctaaggggactctcagatttctggcttgacagtgcccagggttgttaacaaggaggaaggacagggaggagcagccagcttatgggtcatttttggtggttgcagtagattgctcagtcctgcttcagggaaacctgatggcccacagcctttgcagaatgccctcagctggttggacaggaagcccagtggcagtggccctaccacgccctcctcctggcagtcagtacaaaagaggagctgctggctc

SEQ ID NO: 103170 - DNA, 1031 bp, Homo sapiens
atcctcaatagcttcccagcctacttttcagagttgtcatgagaaccaggaaagtgtgtaagaaacttagaagaaagtgttttgtataccctcttcaagatgtgaaaaacctatggacttaatattcttgtcctgcctcggatgttccttctttgcatgatgtcttcagattcaagagttggttttcctttagcttagaagagggaactgtattatcttagaactggaagtaaccctagcggtgattgggtgtaaggccattggagtaatgacctgaggcttagagaggttaggtgactcacccagatcgtgctcctgaagatggactagccagactttgcctgggacctccagtgttcttttcctcctgtgtaacatcctgcctgtttgggaccctgactgttttaatgttgtctcaggtgctctgcagatctgtatgtgtggacagaggagaataatgcagtgtattcttttggcaacaggaattaaaggacattgttctctacctttgtgatacctgcaccacactttgggcctttctggatatcttccctttggcttgccagaccttccagaagcacgacttttgttacaggtaaggcggtagttctggctgttgaaatagagatactggcttatgtactaatttaacaaatatttactcatttaacaaatatttactgggtgcttagaatgtaccagtccctcttccagcctggggatgcagcagtgaaaacgacagataagcctcctgcttgtgtggcgcctgcattttagaagcactcctgtttttggccaagaccaggatagggcagggaaaaaaaatacacacacacatacaatgggctgggcgcgttggctcatgcctgtcatcctagcactttgggaggccgaggcgggtggatcacctgaggtcaggagttcaagaccagcctgaccaatatggtgacaccccatctctactaaaaatacaaaaattactgggcatggcagcatgcacctgtattcccagctactgaggaggctgaaac

SEQ ID NO: 103171 - DNA, 1048 bp, Homo sapiens
gtgatctacttggcagtatctccattcaccctgggtttctgaactgctttcatctgagaagggacatttcaaaggatgccattgctattccttacatttttattatttctttaggagatcaaaagttacatcgtcactgtcattagaatcagatgaaggtgaggaaagggacttagaagaccccaagaatagagtatgaaatttgatctatactgatgcatgtaaaacctcgctttactcaggctgcagcactggaaggatcatgagagggtgcctccccagtgcgaagtggttgggatgctttggagaacatggtatggccctgggggttgtaagaggagacctctcctaatgcctgggtcaggaggcactgcgtggaggaggtgacacctgccttatggtggagttagctctaggaaggcactccaaacagaaggcggggacagggatggttttctgaggttgagaatggtgtgagggaggagtgtagtgtagggaagggggaaagggtggcctgggataccagcagaggccagatctcacagggccttttgtgccatggtcaggagtttggacttaatcttgagggttttttttaggaagaacagagtttggtggggagatagctctgtctttccttgcctatcaggagtaggaagtgggtgcagatggtctgggcacaccttcacaggttatgggatcagcacccatctggaggtgggaggtgctgagcaagtgcgggctggtaaaactcagctttctggaatcaagaaatgcagtggcatccaggaaagtgcttacagaaagtccagccacctagtgacttgcttactcacccagccccatctggtttttgaactcattcatttttcaaatcctccagggtccagcaagggctgcatggtcatcgataaggaaaccaaggacagacctgcccaaaggcagagaacacctagaattcagagcatcctgaccatcagccagccttagatgctgggattacagggggccaagaaccctggctgcttaagggcattggcatttcaca

SEQ ID NO: 103172 - DNA, 1037 bp, Homo sapiens
ccccccaactcagcctcccaggtacctgggactacaggtgcacaccaccatgcctggcgaattaaaaaaaaattttttttagtagatggggtctcactatgttgttccagctggtcttgaactcctggcctcaagtcatcctcctgctttagcttcctgaacagctgagattacagtgtaagccaccattctgccttgggagtgtattagtattatgcaattggccatgcatcagacataggaatggggaagtttcctttggcgacgaatgtaagaacagcagtgataactaagctaacctttattggagagtgttccggggacctggcattctgccaagcactccacatatgttatgtcaattggatcctcacagcagccctgtgagataagtgctgtcatcatccccacttacagataaggaaactgaggttaaaatgtaggggacttgcctgagaggatatgactaataagtggcccagctgggacgtgtgtaaacgtagacctgactctcaagctcttgctctgcaactccctgcttcagggatgatggcactgtgtcaaaaatgtcatgatttgcattgttgctgagagcaggtagggacagagttcagagagggctcttctgggttgcaaaaggaacggacattagccgttggatcccattagcaggcagaggggagaaggtttgatcaaaaacaagcagttttttttagaggttcctctttatacgcacacacacacaaaaaaataagaaaaaaagagaaacagaagcactgtgggacgttacagagggagcgccccagtgaattcctctttgaattgtagctcatggagctgggcctggcacagaggggtgctcaccctggacgcccttgccagctctcctcacctggagactgtaggacacagtcttcgaaatacctagttacaaaactgagttatcccttataatggtcactttcctttattctttcctttttttttttttttttttgtgtattgagatggagtttcgctcttgttgcccaggctag

SEQ ID NO: 103173 - DNA, 1073 bp, Homo sapiens
caaaacaaaagtaatatatgaatatatgttctttttttttttttaatgggaaagtctattcaagccacaattcaccaccccccgcccccatcagagataaccactattagctttggggcgtcatctccccagcttcttttttaaaaatcaataccagtgtgtgaatatacttacactttttaaagaccgaaaactatgctctggtttttcttcataacaaataaatcttttgccttttactaaaaaaggaaaatgaaaactgattatattaaacagagagttttgtatcctgctttctcttcccttaacctttccccgtgtcattaaatccactccgaaaacatggattttaattaccgcctagtgttcgctgaatgcaaccatgccctctttgttagatacacttggttctttatgcttaaaagctccttggagggtcaccggttggaacagccaagtgttgtcattgctgtgggttggcaaatgggccctcgctgactaacctctgccacgttaacacgtggtttttggatccgtagcaccccgagcagaaggcagaccggtattttgtgttatacaaaccgccccctaaagacaacattcccgccctagtggaggagtacctggaacgcgccaccttcgtagccaatgacctcgactggctcctggccttgcctcacgataaattctggtgccaggtaacattctatcaaaattaacgctaagacaaagcacatgacatgccattggttggttgctgttgttgtttttcttcccctaggaggtgcttttttgtctacttctttcactggatccttaacagcaaattgtggttcggattgctctgtcttgtatcacaatcttaatgtttacacacctttcaaagtgtcaattttagaatcttgtgtttagcccttggctcattcatacctccttggtcccttggggtcggagtgtttggaatagggcagggctgatgggcattgagtccctgcacagtccacccacaagcccctggggcctaagggataaatcctcgctctcctctgtctcctggtttaggtgatctttga

SEQ ID NO: 103174 - DNA, 1120 bp, Homo sapiens
taggctgttccatgagtgcagagccggggccgccgatccagaccagtggggtgtgtaggggcagggaggctttggcctggtgggagggtacgtgcagcccaggagggcttcctgaaggaaagggcttctgaactgggtattgaagggcaacttaacactagctgggcagagcaacaggagaaggctggacctggtaggacaaccttagtatgcagttctggagtcttgagagatcctgactcttacactaaccacaagtcacttgaggtggcaacagtatagcagagttagcaagtacaggcttcgtgttcatttcacacatatttgaatatttgtctttgtgtctttgggcaagttattgaacctctctaagcctcaaatccaaaagcgataataataggaccagctttgcagggtggttgtggggattaaatgagatgcctgtgaatgagcactgtgcctggaacatagtaagcactcaataaattgttattacaatggtgatgacagcagggacaacaacagcagcactaaattgggggtatggtgggaaggcagatgagttgagggagacagctgcctgatcgaagaggggtcttgctggcagactgaagagtgttactctgaaggccacgggcagctcctgaaagattgtactaagatatgtgtccaccctatatttgtccctttagtcttggcttggggcatgatctctagccaaagggtagttaccacaccaccttttcagggtaattggtagagctaatgttggttgaggatctatttgaatagcacatacttgaagacccaaaagaaatagtcttgtggccaggcccggtagctcacgcctgtaatcccagcactttgggaggctgaggcaggtagatcacttgagcccaggagttcaagaccagctcgggcaacatggcaaaaccattttttttttttcccagacagagtcttgctctgtcgcctaggctggagtgcagtggcgcgatctcggctcactgcaacctccgcctcccgggttcaagtgattcttctgcatcagcctcctgagtagctgggaccagctaatttttgtgtttttagcagagacggggtttcaccatgttggcca

SEQ ID NO: 103175 - DNA, 1228 bp, Homo sapiens
gcgcaacccgggtccggcttcccggcggtagtttgctcggctctgggggcggggccaggccgagacttcctgtctgctcctgcggaatcgcagtttgaccccggaagtgcgggcgctcagggagctgtcaccgtggtcggcggcggcggcggcggcggcggcacagagccggtggtggagccgccgaggtgagtgcgtggctggtccctgccagatgcagggcaagggaccccggaggagccgcggctatgccttgggcagccttggctctcccatcctctggcctccattgcggggcccacgcttacgctacctgaggggttgtgagccgcctctcgagacttggccgccagggtcaggagccacgggttcgaagttcggccccagagtggcgttggaccagccacgatccccccacgtcctcacacccggggcttcagtttcctcagggttcattcattcgttcagcaaatatttgtggagtgcttcctatgtgccagacacagatctagacattggggatacaaagaaagcaagacagacaaggcttctgccctcatggagcttacagtctagtgggaggagatggtcaacgacaagcaaatgcacaaggtcattaaagctatgacagtaactgggagagtggatactataggcagagccatcagaaggtctctgaggagagtagtatttaattgagagactagaggaatgatgacaaagaggctgagggagcagtagccccggggatgctcccaggccatattgcaattgggtgcttgtagggagctccccctccctttcttagcttttggcttttgctgtcctgcctggcaggggaatacagtggtgggcacagacatagtcatgattattgtttgtccttttggagctcaaagttcagattgtccagttaatttattttttccccccaagacggggtcttgctctgtcgcccaggctggagtgcagtggcgtgatctcgtcccactgcaacctccgcctcccgggttcaagcgattctcctgcctcagcctcctgagtagctaggattacaggcatgcaccaccacgccctgctaattttttttttttttttcggtagagacggggtttcaccttgctagccaggatggtctcgatctcctggcctcgtgatccgcccgccttggcctcccaaagcgctgggattacaggcgtgagccatcgcgcccagccctgcctactta

SEQ ID NO: 103176 - DNA, 1032 bp, Homo sapiens
tgtgggagtgggaatgggagctcggcggccgagctcggcccggaccctagatgcgggggaggcggggtcccgggctcgggctgccttcccagacctggcggggatgggcccgtgcggctctgggtgtgggacgtaccctcggagcgcccggagttattcccacgaactcccgggaggtgggtgtgcgcccttcgccccctgccgggtctgtggcggtccatcgttgccggatactggaggtcaggggccatgggagccccggggcgaacggtgcgggcctgggccttgtggaaaggaggagtgaccgcccgatcgtgcagcagggcatccccctgacctggtagtacttaggtgggtaggatgattgggggcggttggcgtaactgagggaaccctggtcagactgctccgcaaatgattacagtgttatttctccggtagtaattttgcttgatgtatggcatttccggacccataagatgatactgtaggttgtattttggactggaaaacttatgtcaaaattatggggtagattttttggccacattaatagactcccctggaatttgataatctcacttgtgagttttggacatggactgctattacatattgatgttcaaatgtcctttccagacccaggcctaaattcttactgttgtagtatcttgattctgacatctatttttccacaacccaaacaaacaaaacaaaacaaaacaaaaccccaaaaccatatacttttctagttaaggttcaactttctcatatgtgaatggtaatgccataagaggcctgggttgaattacaggagattattattatttttttcaatgtgaaatgtttgtgatttgtccatggagaggtggtggggaccttcccctttcagattcagggctgttcagtaggacaggagacattgatggcatgcagaaagtcttccctttatagggcctatgacttgggtaggctagaagagcttacagaatgacactttttttttttttttttttttttttttttaagaca

SEQ ID NO: 103177 - DNA, 1142 bp, Homo sapiens
ctttaagaatttaagaggtggagaaggggaagcatgagaaacttaaagagatgcaaattgagcatctcttaaaatataatggatttatgtaggggaaacagatttgttgccaaaagttaatttgcaaacaagttattaggaacacacttgataaaattagatgctgattaattggagatatactgtatccagagatatattgaaggatccagaggaaataaacagagaaggagagggagtaagtcggcttctggctcataaaggggtccactgaagatgcttcccaccattatggttgctcctaaaccatctgactcagatttctagtggagggtaggatgggtgtgttagcaatcatttgagacccgggttgtgaaccaggaagggttactatgtattgtgaaaagttcttgagatttgccgcaggccatgaggagtggtaaagtcagtttaaaaatctgctgtagttctagttaacacgttcacaccttcttcagtaaagtggaatgctgttaccaaaggaagtattcgtgttttagaggggggtgtggtgaaggttcttacaagtttggaagaggtggaagaaaatgttgttacaattgtgtagagtagtgaagggctttggtaaatatcctgtcaaatcatagagtagtatttttagagttgcacccagctgtccattagaagagccagaggccttgtctgttttgttccctggtgtccccagtatccagcgcagttatccgcatattctgtgccctcagatattttttaattaagtgaatactattgatatgggaaaaagaacagttatggtggtttatagcagtgttagttattaaaagctacctgatattttgcaatggattaaagagccaatttttgatcaaatagggctctgggtaggaaagaaaatgaaaatgaagagccagctttcagtgcttattgtttggaatttttgagattcctttaagaaattgttttctaaagactgtcatgaacattatcgagtcccctagtttttgagtcttaatgaatcttaagtgtttcagatgttagttacttttttaagagcacagtaagtgcaaaggtagtatagaatagtgggaagttctggattgacagacatatattctgattcc

SEQ ID NO: 103178 - DNA, 1046 bp, Homo sapiens
aagtgggtagatagtaaatcttgggttcaagcctgggttgttattcttcattacccatgttgtttctggcaagctacataacccccctgagctccagttccctcattagtgaaaggaagaagagcaacttttctacttttctaacagactgtggatcaaacaatagtgtatatgaaaagcattctaaaaatgtaaggggctggtattagaatcgtattgtattagaatcctattttatgtctttgaagaattggcttgtggagcagtggtaaacctagtctgtattgtcaagtgcagaatttaccaatatcactgatatggcaacagagaaggtttctgcttctgtactctggctggagaaacctttcagcacatgtatcctgtctgccagtcggaatagtcacaatgttgcagggacttcagaggaacctgggatgtctcacatttatgccaaggtctctacttggaatagacttggctagatttcacccattttcttatgttggagcagtggtagaaggtggtaggagcaaggagttcagcacattctgtgtaaagttctaaggctgtgtttttaagtagcaggtggcagtgtcatagggtaatgaaatcaatgtacttatttaaaaaagcattttcagaaagagaatatatcagtacattgcataaagtaaaagtaaatatagacacagaggtattgtcttgatgctgatagctgcagatattcagaatgattctgttacaacagatggtagcaagcttttctgatttcacttatctggggtctaaatctaatttctttagtagttaatactgttttgttttgtttttttttttggacacagaatcttgctctgtttgcccaggctagagtgcagtggcacgatctcggctcactgtaacctctgcctcccgggttcaagatttgggaaacttttgtttctttttaaaagatatttttatgtatgtatacttggttgccgtgtaaaatgtattttttctttttaaaaattataattttcattttttgtagagacagggttttg

SEQ ID NO: 103179 - DNA, 1041 bp, Homo sapiens
tggaatgcagtggtgtgatctcagctcactgcaacctcagcctcctggttctagcaattctgctgccttagcctcctgagtagttgggattacaggtacctgccaccacgcctggctaatttttgtatttttagtagagacagggtttcaccatgttggccaggctggtttcgaactcctgacctcaggtgatccgcctgccttcgcctcccaaagtggtgggattacaggcgtgagccactgcacctggcccagaacggttttagtgttttttaaaaaaaaaagtagagatgacctgtaatcccatctggatgtaatgtttggtatttttgttttttttcttatacatatctattgaaataattttaaaaagaacaactttccctgtaaaattgatattcccttaatgagcatttagtgtttataatatggatgcatcatagtttatagcagttctgtgttattaatggatattgtcaatttttctcttaaagcagtactgtgatgaactcgtttggacattgaattgcattgaattgttctattattttattatttccttaggataaattctttttttttttttttttgagacagagtctcactttgtcgcccaggctggagtgcggtggtgcgatctaggctcactgcagcctctgcctcccgggttcaagcgattctcctgcctcagcctcctgagtagctgggcgtacaggcgcatgccaccacgcccggctaattttttgtatttttagtagagacagggtttcaccatgttgaccaggatggcctcgatctcctgacctcatgatccacctgcctccgcctcccaaagtgctgggattacaggcctgagccactgcacctggcccaggataaattcttaaaagtgggtttattacctgggcgtggtggctcatgcatgtaatcccagcactttgggaggccaaggcgggtggatcacctgaggtcagcagttcaagaccaggctggccaacatggtaaaaccccgtctctactaaaaatacaaaaatcagtcgg

SEQ ID NO: 103180 - DNA, 1025 bp, Homo sapiens
ggattagcctgagcctataacaaactttccatgatgattcttagattaaaagataatttttttcttgagttagaataagttgcttttgatctgtggctgcctgccccccaacccctataaattatgacatcaggaaacaaggctttttgtattagaaaaaaatggggaaattaatttcagttatttcatgtgggtcattggcagagaaagataatactaaaatcttagagactgtgaaaagagattatattaagcaacttgagtgattacttttttgccagttaaaagaaatgagataatttatattgaagatgattgctatatacagtgctttgcacaaaaggccacatatctctttttaccttaggtaacatgatgtataagctactttcacatatatcttcttaggtcatcacaaggatttgagatcatcatttaatcaggactgttgtgacttgcttgagaccacatgcctagtgtttgacatcatatttcaagaggtagactgaaagttctgcagaaatagggactggtggctgttctctcccttactccctagcagttaatacattgcctggtacagagtaagctgtcaatatttgtggactatttaaactcctgcatatttatttacacatgtaaataagttatagcattgtaaaaccaacaggtatattttccgtagtgagattgttccttcatcttatgtgcacagaaaatattttcgtggaagaggtcttgaattttagatcaacctttcacatatccctttactttctcttaagatactttcatggtgacaaaaaaaatactcttaatgtcattcctttcactgtgtgtgtaactcctgtggcaagactgtatatttgtatgtatgtatttgtttatttagtaggctgctatttataaaggaaacatactcattagttggtctttgcgtacataatggttcccaaaacatggactccatggtttgctgtgagtgaatgaaaaagagcaggtatgattcccctcacctttgtcat

SEQ ID NO: 103181 - DNA, 1033 bp, Homo sapiens
actttgaaggagtcttctgaaatgcagtgttttggccaccattccagctctacaggaatatggtttcatgataaagccaacaaagagcacactggcagcagtccagcagctgactcaccaaggagtaatgatagacactttgaaaggagtgacctgtctcaggatctcacatttcaaagcttcgtgctatgattacattggtagaaggcagccaagaaatctagatgagatcttgcttgtacctcctaagagtaatggtatataggtaggaaggacttccacagtcggatgcaagtaagattttttttcctaacaaccttgtaaaacctgggggtgggaaacaagttgaggattcagaatgggagtaaccgtggtggaagctttccttctacggacctggatgagaacagccttatagtgactgagggtaactcaagaagctcaatgccatattagttttctagagctaagggaatatacatagtttagtagtaagcacaagtatcgtgttcatgtcagacactgtagctactgcttcctgctagaacagaccagaagaaaccaaagcaagaccagaatcatttcagttttgaggaacagaccctttccttactagcattgcacactttaggagtaaaaatagaatgaaagtggatttgcttcagtactctgaaatagttaactgttgattgttttggtggattagagtgattgcagctctgtttctaaattgaatttcatggctatacgttgttctaggtggcaaattaatcttttatcagtaccacaaattgattgttggccctttgcggaaatagcaggaatatgtctttttcattttgttgaagggtagctcagagataaaacatttacataatctgaaaatatttttcagagataagactaagtgactgtgtataccacagtgatagattgatccactttgattattgtagaactttctatttctcagtaaaaagtgctaaacatggtaaaattatgaaggattgcttttagctatttgctgtattct

SEQ ID NO: 103182 - DNA, 2213 bp, Homo sapiens
ttctccagaatgtgcttcccaaaagttaagagtgcttttatttatttaagaaatatgttaatttttcttttcttttcttttctttttttttttttgagacaaattctcactctgttgcccaggctggagtgcagtggcacagtctactgcagcctcgaccttccaggctcccacgaccttcccaggcccaagccatcctcccaatttagcctccaccatgctcagctgagtttttatttcttgtagagactgagtattgccgtattgcccagactagtctcaaactcctgggcttactgtgcctggcccacaagaaatatgttactttttttgagatttttgtataatttgagaacacagattatttgccctactcccccaacccccagtgatacagacctggtttcattgcactgagagaaaaaaattagtttcttaatttacgttgcgtttctgcctttttgagattgagtgctttgacttttctcttgtttttgtatttgctgtatatgtgttgttcctacttaatttcttatatggtttaaacttgcatctgtaaattatttattagctagctttatgacttgggcaagttaccttatctctctgctccttagtttccctctttataaaatgaggataataatattacctactttgtagagttgagtaagattaatgactaataaatggtgaagcacttaaaagagggctctatacatgttggctgttaaaattataagcgaggacctggacttctcccctccattaattgtaactcttcatttttataattttttcataaatagtatgtctctcagcatataacagaactttgtattaaggaataataaatatcaccatatatgtaattctttattataaacataaatttgcttcttgttaaaaacagagtatcattttcttgcctcagatcgagcttgaaagaaattagtagaaagtgggcccttttggccgggtgcggtggctcacgcctgtaatcccagcactttgggaggccgaggcgggcggatcatgagatgaggagaccgagaccatcctggctaacacggtgaaaccccgtctctactaaaaaatacaaaaaaattagccgggcatggtggtgggtgcctgtagtccccactactcgctactcgggaggctgaggcaggagaatggcgtgaacccaggaggcggagcttgcagtgagccgagattgtgccactgcactccagcctgggtgacagaacgagactccatctcaaaaaaaaaaaagaaagtgggcccttttctgtgttttataggtacccacacaccactgaatgtaggtcatcgtttaaaatctgagtgtacatccaaatccagtgcagttatgtagaacaaaacagtttgtatggaactagaagtgttactggaaaggtaaatactgtagttggtagtaaactgatcagttaaagtgatggatcagcaaagatttgggggttgctggtttttatttaacactcagttgtttcagagtgattactcctgaaacaaagttatttcgaacatagatgtgttaagaaatttcatattcctttccacttaaacctcttgagaaaggaagcatttcttcagggagagttagctatgtgagtgctacatgaattttagtcattactgtggcgactatatgataaccaaaagtaggagtctcacactttagtttcaaatttgtgctgttattgagtaaatttttaaaatgagattgccctctttcttgctaaactgtcatatatataagcccattaaattgacttttatgcctcttttccttttttttttttttaacctgttaagactttttttttctttctcatatttacccctgcctaagcaaggcctcaactctccacggaaatctttagtaaaaggcaaaaagatttattcattatgaagagaaaccagagcatgtgtgacaggactttctgtaattataagttagtggttcagtgccaggggttagattttcttaacttttatgtttagtaggattattgataattcctaagttgtatccttaaatcatattttttgaacattagggatctgcgtccaacacttaattatactagtaaaaggaatagaacatgcactggatttcttgtttttgagattctttcattcctgccctaccccaggcaggaggtctgtctgcagtggaagagaatgaa

SEQ ID NO: 103183 - DNA, 2046 bp, Homo sapiens
actccatcatggtaagactaatttaactttttataaatacaaggtttgcatgataaaggctattatagcctacttcataaattaatacattgcattctgcgggcagtgttttgcaccatttgtcctggcttagctgatattcatgttctaattgttcattacaggattttgtgtaaataaataaatgtttagcctttgtaatgggattgttaatagtaccctggatctgctactttaccaattgctccctaatgcctacagttgattgccaacactatctcactgccccctgtaactgcagtagtttgagctttaagatacaatgtcactaattatggattattctgttcttgttctacaatatcccaatatcttcagcaaaggattctgtattggctcccaccagctggtatttactagaatgtggaaataattcaaacaggaggactgtgcttttgaaaacctgctttaacattagaagaggaaaagtgattgtaaatggctatttttcatgtaagggagggattaaattttcatatctattgtttaaagaaatctgtagccaaaggtgtctgtttttagttgggtcattgtttaggactatagacttcggttttgtattcttagtaatattaaccccttcacctcccctgataacccaagaaaagatccttcgtataagattttaaaaattgcaccagaggagccaagtggctcatgcctgtagtcccagctactcactacttggcaggctgaggtgggagtattgcttcaccccaggagttcaaggcccaaggccagcctgggcaacacagggagaacgcgtctcttaaaaacaaacaaacaaaaaaattgcactgggatttgcattaaaagttgcaatacatacctagtatgttttctaatcataatgtgcaattttaaaaaaaagtgtaatttttatctgccttctaatttgagcctttattgttcaccagtaggtttatttcactggaacaagtctttgtgccatatttggcatcaccaaaggaatagtgccagtatttattgacaaatgaggacaaatagtttttccacattctattgccatcattgttactaggtaaacaatagaagcttataaaaatattgtgcatttaatacctttttggtttccttttatacttgtcaaaagtcatttatacataaattgacatactgtgtccatgatatgtatggataagtaagatctttttgtagcttgaatatcttatgagtaaatagcatttcctaactattaaatgggatttgaatagctgtcaagggattacttgatacagagaagttgctaatttattttgaaattgtaaaatacattttcccctctgaaatcacgaaatgcctcatattgctaatgcagtgagtttaagtgtttaatttagaaaaaattagtaactgctggttgcctcatattgctaatgcggtgagtttaagtgtttaatttagaaaaaattagtaactgctggtgttatttggcatgagatgaacctggaagggaagtgttgaggggcatcatctgtacttggcactgtttagaactttctttagaggtgtatagtgctttcttacactaatattccagtgtatgcctgaatagcacttttcttcttgtactgaaaaataagtccatggtgttaagcaggcatctctaaagtggccatctgatttaaaatagcttccataagttttaattaattttgcatgttttagtttctctttttgatagcaggtagtagctctctgaagcattccttctgccttgaaacatctttctttttcatatatttgccgttttcctttgtgagacttaggcttataatacaataaatatttaagtgccacctatttactaggcactgttaggttataggctctgtagatgtagtggtgaacaagatctccgttgttactcagtttgtagactatgaaggaaaaggagtaagggttggagaattactcatgtattaaatatatgttgctttttggaggcaaatgaataaaatattt

SEQ ID NO: 103184 - DNA, 1041 bp, Homo sapiens
acctcttggctagctagagttggacagttttcaattgtgatgacagcagttaaaaattcaaatctgttccttttcattgttgagttgtatgcttaaagaatgcatctgcattttcattcagctttctggtccttgtcgatttttgatgtctgttattctgcataaaactgtgtggcaggcgccagaacttttaagaatctttttgtttacagatggggagacaataacattaacattcattaacattcaaaataaaacattcttatactgataagcagtatgcaggttagctaggtttgggatactgatagatatttttttagtgtagtttacttccaaatgtcttctagaatttatgtttaatatctcaaatacctacacagaataggaatggcatgcttatttatacatgggcgtactcttgagttctaatggcaagccagccttcaaattaagttgtcttcctggaaaagaaacctcttaggcaactgtgaagggagagggataatataaaaaggatggagtttagaaatttgtctttttgtggtaagatctagaaacaaagcatattagaataagcagtgtaaattttgcacctttcaaaaagatactgatgtttttatcatgaaataataaaaacatattattgtctaaaaaaaaaaagccaaaaaacccagccaggtgctatgactcatgcctgtaattccaacactttgggaggctgaggcaggaggattgcttgagcctaggagttcaagaccaatgagaccacatctctacaaaaaaccacaacagtaaaaatgagccgggcatggtggcatgtgtctgtagtcccaactactcaggaggctggagtgagaggatcgcttgagcctgaaaggttgatgctgcagtgagccacaatcatgccactgcactctagcctgggcgacagcgaggccctgtcttaaaacacacacacacacacacacacacacacacacacacacacacacacccccccccccccccccgaggccctgtcttaaaacacacacacat

SEQ ID NO: 103185 - DNA, 1063 bp, Homo sapiens
cagctaatttttgtgggtttttttgtagatgatggtttcatcatgttgccgaggctggtctcgaactcctaggctgaagccatctacccgccttgagtaaaggttttttgatacaagaaatgattataacttggagttcagcttggattctgacaacttactagatttttttccccctcgggagaggatggttgtttcttgcttaggaaatgataatattttagcagcttatctgtgccccacagctggcagagtaatgcagtatgctgatcatgaagttgcatctggaaccctgaaaacttccagaccttaatgtttccaaagagatagaaaagacacatagcttctggtgtgtgtgtgtgtttttttttttaaaatcatgttagttggaggtctcattgaaccaggacaatgacagaattttatatttatatttgttttatctttttcaatgcatggtcatcaatagggaaaaagtcacactaggagcgttgagccctgtgaggatatcacacctgaccctggaatggcagttgtgtaagggtaggaactttgttttgttcattgctgtatttctagttcctagaatagtgcccatcactcagaaaaacacgatgaatgaacatccaccacttaccacagtagctgaatgtagccatgcttttaactctctgctcgtctgttttcatttatagttgacttcaacaacagaggttttagaaaatttgagcagggagtaagactaacctatagtagttttacacagtgggttttggttaatgctcatgattaatttctcttcccaccatagaatggtcttacccaacatgctacagaattctagtttctgatatgtgaaaagttaatagacataagaaaggaaacactaacaagctgaaaaaaatcacctaaaattgtggcggttgtaaatctacttcttaaaattttgcacctcttgaatttttaaaatactgcctctacactcaaatttttctctggatctgtttcttaatattaaatgcatgtgtaaaaaaatctattttaacagcgaaagtgaaaagat

SEQ ID NO: 103186 - DNA, 1050 bp, Homo sapiens
gactataggcatgcactgccatgcccagctaatttttgtacttttagtagagatggggtttcaccgttggccgggatggtctcgatctcttgaccttgtgatctgccctcttcagcctcccaaaatgctgggattacaggtgtgagccactgtgcccagcccacttaattcctttctatggccaaataatttgccattgtttagatatgccacattctgtttattcatccatctgttgatggacatttggtttcagtgagcctagatcttcacgccactgcacaccagtagcctgggtgagagtgagaccctgtagtggaaaaaaaaaaaaagaggaatgaagtactaatacgtgcttcaaaatagcccatcccacctttgggctactttgaataaatctgctataaacatgtatttgcaagattttacatggacatgtttttgttttcttggatatatacctaggagtaagattgttgagtcaaatggtaactctgtgtttaattgagcaactgccaggctatttttcaaagaggctgcactattttacattctcactagcagagtatgaggttacttgtttactttttacatctgtatcttatttactgagtgcatgcattactcgtatatctaattttaagaagtattacactgcttatcagactaacagtaatgactcaatttcttccttttgtactgttggtataactaccactgtggggttcacattttacaagtcaggtgctgtaatgaaccctgaatatttcctaaggattggtcacatctgcgatttgtagtgttttttgtttgtttgtttgtttgttattttacataatacccagagtggtctaatgctctttctagttttaaaaggaacctttagcaagtacttgattctgatgggttgcacagtttcctgtgatcttggctttttcttatggatttggaattcctatagcagttttaacttttctcagatacttaaagcagcacctcttactttgaactattttaactatttcttgtctcctctggactgtaagttct

SEQ ID NO: 103187 - DNA, 1057 bp, Homo sapiens
ttttgcctcccctcctcttttttttttcttcttccccctcttcccccccacccccagacttcaccataagggaaagaagagagccttgttggacactgaagaagggacggggatttctcctcctaatctgggcctcttgtcatggtaagtacaaggaaataagagtaaaaaaaaaaacaaaaaaccctgtgtcctgacaattaagtgaacactaataaattcatacttacccatttttgtttttgtaagaaattatttctttttctttcccagatctcttgtgtcttttcttttcttgtttacttagtagtaatagagtactccaatatacagagcagtttcatttctgttaactttaatcctgtgagctagatgttgtctcttatttttcagtcagcaagtaaatggaatcaagactaaaacatacagttctcggactccaggtttttaattccttttctaggaagtagcgtgtagtgaaaactgtgtgtgtgtgtttgtgtgtagacaaattgtaagatggtaatctgcatatttacttaaaaatttttttaaattgacaaattacatatatattgtgtacagcataatgttttgaaatacatatataccttgtggaatggctaaatcaagctgattaacatatgtattacttcacatagtatatatgctttatgaatttatagaagcaattccctaccttccctgttttgtctctttaaggcagtattttgatcccatagtaggtggagcagccctgcacaccccctcctgtatctttaaccagaaagagaatttaatggacaatttaatgacttacgggccatttcgggcccagctcaagcagagaagatggagcaacaagccagccacattttcatcaatcctgaggaaatgtaaacagtgcttcaaggcttaaaaaagaaatggtcctctgtaatattgtccttcttctaccttgtgatgtttcctagatccaaactgttttatgctgatgcacagagaaggaattgaaaaggctacattaatttcaagcttcattagggacgtatggaaa

SEQ ID NO: 103188 - DNA, 1061 bp, Homo sapiens
cagacagtactcttgttcctgtctgcattggaggagactgtcctcctctttgcatactaaacacaagttgttggaatgctatttgcaactcccagagccacattttggctagacttgatacactgtaagaggcaaatggcccactcctttttcaaggagtaaaagtattcactattattttaccaggtttgccttgaaagcctagaaattgctttttgaagccaagggttgaattaggatgatttaagggataggaggaggatcctcatattatcctgaagatttggcaccctgtctagatgcttttgcttctatctgtctcccttctctctatctgctgttgtacataatcctgtgtccagtagagtctgtagaccagattggcaagggggaaccattccagcttgttcaaacctcaagccccatttggcaaacggggcttctaactgattttttgaagcaaatctgacatagttattatagctttagcatccttgatcactgtatggccttctccctcctttttgatacttttgggtctattctacttagtagagagcctggccagcagctattgccccattgtcttttctgtgcaatccacagtcagcttagaactctagtctttttcaggagcctcattggctgacactaagccataagcccactctgtcatttggggcaaacaatagtctcccactggcattctgatctgtagttcttttctataagcaagaaaagattactgttctggctcccttcagcttctatgtcattgcatcattgcaaatcatagtcagttatagcatctaaaagtagtactctgatcttgtgaattcggtgcctgagagatatattctccccttcttccaaaggtggtgccacctctttgttgccttcatgctatgacatgacttgagaccactgatttagagataaagggaagtcctaattcactttgtagtaaatcacttgagtactgttgatccagataagtttgcagttctatttttgttgctttcccttatagatctttttaattagtcttgttggacacattg

SEQ ID NO: 103189 - DNA, 1078 bp, Homo sapiens
aaaaacagtctgggggaggcactttgaaacaatgcaaatgtccctgcttctcataaaaatttctccataagtttagcattcattgatgatttgtatctgcgcttaactataatggttgcaggctgggtgtggtggctcacgcctgtaatcctagcactttggcaggccgaggtgggggtggatcacttgaggtcaggagtttgagaccagcctggccaacatggcaaatccccatctctactaaaaatacgaaaattagctgggtgtggtggtgcacgcctgtagtcccagctacttgggagtctgaggcggaagaattgcttgagcctgggaggcaagaggttgcagtgagctgagatcacgccactgtactccagcctgggtgacagaacaagactccatctgaaaaaccaaaaaccaacaacgatgcctgaaatgcatttttaaatttaatagctctagaggtcttaaattccacaagtttttactgcattcctctgacctcttctggggtgtcagtaaatattatgtgttggcatactgatgagccaccatgattgggatgagagagaggtttaagtgaccccttggttttaagatagatatttatattgctttttagtcagtgagatttggcttatttttgatagatactggctacaactcacagtttaagaaggtagttgcttattaattagtcagtttttaacattgcattcaaaaaggccaaatatttaaacaaatctttatttttatttatttattttcttgagacagagcctcactctgttgcccaggctggagtgcagtggtgtgatcttggctcactgcaacccgtacctccctgtttcaagtgattctcgtgcctcagccttctgagaagctgggattacaggtgcacgccaccacacctggctaatatttttgtatgtttatcagagacgggagttttgccatgttggccaggctggtcttgaactcctgacctccagtgatctgcccgtcttggcctcccaaagtgctgggattacaggcatgagccactgcactcagcctaaacatatctttaataaattag

SEQ ID NO: 103190 - DNA, 1041 bp, Homo sapiens
atgaacttaatgagtgcatcctactgcattatgttatataagaactttaatttgtttaagacccctgactccaagacccctgactccaagaggtattccctaattttgggttgccagcatttactcagcaagatttgctttctcctatcctgttctctcacaaccacagactgaaaagtccttatctttttaggagagcttttttagtcccttgataatttgagtttcttttagatttcagcaaactcttaggatattcctgagaggtacctcagtctagtcttttaattatgggtggctctgccctgaggtgggatgactttggtccccagacccttccccttcctgatgatatctggtattctttggccatcaggacataaagatatctacagtgttctctgtcttttcgtaggtttgtgatgcaagggcatgtgaggggtaaagtactgacttaggaattaggaaacctgaatttaaatgcgtattctacgatttagttgaaaaaaagaacactgggcaaagaatttatgctctctgtgctttagtttcctttgtgctttaaagtgggacattcatgctcttcctgcccaggctgatccaggtatcctgaagatcaaatctgttaatgctgcagagttcaattcagtaaatgtttaagtgccccctatgtgccatgcttatgaaaacactttggaaattatgcaactacaaggtaatgcaatcataactgtttggctagagattatgagtaagggttgcattttgtttcttcccagtatacacagtccacattgatgttaacctgccaccactcagcatggaatcttgtatttcagtgacttggttgaatgtatgtgtatgtatggcttttgccttttatgtatattcgctgtggagtacaaaggaaaaacttggttttaattaaaaacaaaccaaaaaaaaaaaaaaaaaaacacctcgaggacatccagtcaacctgtttcttttgtcattacctcatgttgttgagcagtggcggtgtatatagcattactcatc

SEQ ID NO: 103191 - DNA, 1138 bp, Homo sapiens
tgtagatatgttctgattctaaatgaggggctataaacactgagcttctgtaccagcatttggaataggttaaatctcttgagtgctgcttttgtaattcattgaatatcttagttctcacagaatcctattaaattttaaagaagtccttccttcttattctggaaatgttttggatgtcatctctttgtaatgtttacattctccatttcattttcccagtttgccggctttttggactctccctgagttgggccaatccagtggcttacagttagaaacttcattccactgaaatattgagattgtaggaagggatttgtctccttgtggaattcctacagaggtaaccagcttgttcatttagtctactaaaggcaaactctgatgcccactctgaatggagagagatggaaaagtatttgctctggcccagtggaactcattacgtttttaatctcaattctcatcactgttgttttcagacacccctagaaaagtcagtcaccaaatttacctgtcattcaagtggtaaggatgctacaggaactagagagtagtgaaagctgaagggatttatgagtcttatcaatgatcagctcagctggaatggggaaagcagccagttgctgctctggccaacaactgtgttaggtcagcagccctggcatctgtggggcttgctgactttgaccaaaagggggaaggtactcttatttgcaaaataagaggctttaggtgaattctccctttgggaagagaagcttaagagggctggttgaagaaaaacttcctttttttctaaattttattctagagggcatgcaccttctaaaattaattctagagggcatgcaccctaggttttccccccctttttctagagatacaagaggatatataaatgaaaaattttatttgcagtttttcagagaaagtctttcaaaagatcacaaagttcttggtgtagtcatccatgcaaaatcaggcaggtttcctggaactgggctctgtctcagaacatgtgtcttgtatcgctgagatgcagactgggttgctgtagtatttgggagctttgtaaggggcgtgtggaagaatcggatcctccaccatgctctgctttgccagcctaggtggc

SEQ ID NO: 103192 - DNA, 1121 bp, Homo sapiens
tccttccacctcagcctcctgagtagctgcgactacaggcatgtgctaccatgcctggctaatttgtaaaaacttttttgtaaagatggggtcttgctatgttgctcaggctggtcttgaactcctgggctcaagtgatcctcctgcctcagcctctcaaagtgctgggattgcagagtgagcctccatgcctgacccctgttagtcatttttttgggtaactttacagggatctccgtgatgttatggtaattgagaaagacacacaggttttgttgtttgttcttgttggttgtgtaagatttctaccctctttaatactgagaggacttgaagctgacccaacacttacctagaattagactgttcattaaggcacttaaaatctattttgtgtgagtacagagagcatctgaatgggtacagttgttgtctcttgttcctcacacaggcaccagagcaatggagctgtcattgcccgctgtggacagccagaggttagctggtggggctggcgaaatgcagatgatgagcatctggtacagtcagtagccaaagcttgtgcctctgactcccgatcgagtggcagcaagctgtcaactaggaacacttctcgagactttcccaatgggggagacctttctgacgtggagttcggtaaggtgctccctggacccatggcaatgatttttatagcatctaagaaccttttcttgaaatggcctcttccttacaagacatagatttacttttatagaagtgaatgtgcagagcttcacttgatgggattgattgaggagtcatgggtcttggcagagaatcagaagaccctttgtttcaaacctgaatcaagatattagtgtgtttgttgtctttcttgccattgtgacaaaaatggagtgtttatgtaatagaggacttgcagtatctgcagaccatggcaggaaatgccaggcttcatgaaaggacaacagatacagaaatgaagtataagagactgggctgtgtgaaccccatgtgtactctgggagtcagttttggagaataaatccttctcatctttcataagaaggccacatagaaaaaaagagaaaaatcctatgtatcaagggttttggtta

SEQ ID NO: 103193 - DNA, 1017 bp, Homo sapiens
gatgtggtctaagctggaaattgaaagcagctgtaccaaggtgaaatttgaatgtgtgaacgcattgttctgtggagttcttttcaaagagatttcaaagccacaagttagataaggcccaagaagtaaagccagagtgagatcgaagtaggcctttcttttaaaaaataatagcttttattttatgtcagtatcttctttacaaatctaaccttcccttttcacgctttttgaaaagatagctaaaattcagtgtgttcctcttattataaaggattgggctaatagttaagcatttcaaaacatttcagtttcgttaatcagaagctgcagtgggtttgttttatagccagtttgcttttaaatttggccatgtgggctttaagttcaacgtatttgtgttctctttattgttactctctccagagtattacccaaactgtgaagttgtgtttatggggatggcaaacattcattctattcggaggagttttcagtctctgcggttgctgtgcactcagatgccagatccgggaaagtaagtccttggccttggctttcattttgcattgctcttaaataataagtttgcttctttccttgaactaagggggaaaaaaagaaaaaaaaattaatttggagcagtctttccttctgtttcttggtaatcttcagttaccagaccagtctctgcaagtatctccttgctgggtctgaaatgtggcagcacagaggaagagttgggagaaaatacagccatttgaaaggttttaaaatctgcagcacagaagaaatctcagcatcaaaacagaagcattaccttactgtttgtcctgggacctttcccttccacgtcatttttagcccaaagaaatttaattcttcagtttctgatgtcccatagtgatacataacctgttttgaactgggatgttttatcatgaaaagtcagaatttattcatcatgttctaaagggtttaaacttgccattaagtcagttccttttacatctgctt

SEQ ID NO: 103194 - DNA, 1018 bp, Homo sapiens
ttaaattcaccgtagttgtcatcagccaagaggatgaagcagtgcctttggggaaagcctgaccggagaattgagcttgctgcctcctttggggattagccatttgcatttgctacacagttccaggtcccagctagcagcgctttcttccctagggtggtatgtagaaggagccttactaaggacccaggagatcggccgcgaactgtgtaaccttggccaaggggtttaactactgtagatctcagttttcctgtctataaaatgaaagacatgtaatcaacactacatgatctaataccctccatatattaaaattcttaaagagctatcagagtcaaaaaagatagaattagccctcacctggtccacataaatgtcttggggattttattaaaggtaatgcttttatgtatttggcagcaaatcataatgctgcactgaagtctccctcatgggtaaaaagcagctgtagcagtgatgggcagctgtaattaggcccccggcctgtgtttggggctgtggaggataggggaatggtaggcttctagtgcaggttgagaacaggacaagggaatggggagtctctcagcagcccctccttggctggcaggttttggagtacagcttcattagtcacagacaacaccaactggtattaaataatagtttagttaggttcaaaagaacctcacaccggttctcttgtttaccatttcttcaggtgctaggagataatttagtatttgttctcctaagccttatcttttagttcctttcaagaatatgtgaggaatgaaataaacaattgatccatcaggaaaaaatgtttctcaggtacctgctaggagatagaaagtcttacgattggatttttacccataacagacttacaattcattaaacagtgggactccctactgtatgctaggcactgtgctgggggtacagttatgactgagacatagtgttagccctctgaggagtcacagtctggttggtagtccaaacaaatcca

SEQ ID NO: 103195 - DNA, 1026 bp, Homo sapiens
aaagtgaaatttctgttttggtcattgttcctttatgccatgagctaaattgtggtggttcctcccacagttcttgcacctcttaaaatggggcagattatgggtaacaaggtattgagaatatagacatattttcctttacagtctatctacttgtaaaagtttttagctacctcaggaaaataaggagtctgtaaaaggatcttggcatgctagatattaccagagtgttctgtggagaagcagctctacctgaaataaccatctgttgggttaaagatgaaagaaaaatcataaagtaccctaaaatatatgcaagtattaattaaacttggggtatagaaggattttacagacttgactttgtaacaccagaggcagaaatgttaagagaaatttaggggaaaagtgtggtttttatatagtgaacacaagaggctaaaaatacacattcaagaaaggcttagataaacgcagtcagtaccattttagtgatcatggaatggagttcagggaattgggaaatttccctaagtgtgtgcctcatcagggatagagccttccaccaaagggcaaggccgggtgggctttctgggaggctgttagaggggattgctttctgtgacaccaggcttaggactgtcacagtctggatagtctagcacaaatggtctctcctggatgcttccctgcagggtttccaggtcctcgtggaaatggagtggctggattttggccataaatttgctgaccggtgtggtcatggggagaactcggatgatctgaatgaacgttgcccagtgtttctgcagtggcttgactgtgttcatcagcttcagaggcaatttccttgctcttttgagttcaatgaagcattccttgtaagtttcttcattttggggactttctcaatttgaaggagggtcagtacaaatgttagtgggccagttctcacatgaaactgtgctgcctcttcagaatttaatagaggtgatttttttcctgtttctgcttttttttttagta

SEQ ID NO: 103196 - DNA, 2395 bp, Homo sapiens
aagaatttgctggtcattgctacatgcccagcaccttagtcatgtttgggccatgtgaaatgctcaataatttgtagaatgaacaagtagttttacaaacatactgtcagctcagacttgagttgtacactgacgtgctcctgcacccagttcatatgctgtggcgcttgtgagagtggctgttaattcacaatctcagactatttatcacggaagctaagaggaataggggcaccaacaacctgtctgactcaggttgttgggtcctggaattggtggtgtgaggaggaggaggctactgcatggcttactgggttccccgtcctgacagagtaaattgaagtgttctcagggatgttaggataaggtggctcagctgagctgacttatcagagtgtgcatgcctgattgcttaatttgtgcttcattggacttccataggtgaaactggtgcagcatacctattcctgcctgtttggaacattcctgtgcaacaacgccaaggagagaggggaaaagcatactcaggaacggacatgttccgtgtggtcacttcttcgggcaggcaacaaggctttcaaaaacctactgtattcctctcagtcagaagccgtatgtatccttcagcctttccactgtggtcagcagaaggaatttggggttggttacatatgagagcctttttgagtagtgactgtttttgtgaagacatctctactgtctctggatggactggttccatttttcccccatgattctgtcctgaggaaggcctgcttctgatggtgctctgatctgtttctgatgactacttgctgagggtggtttggtttaacacagatctctactttgccaccctagacatgaatcttttttggcactgcctccagagcttatttctagcatattctgtcttacgggagaggcacttaagttgcttcctgatgcactgatagctcagaatgagctgccaccaggcccccagcaccctcccagtgtcaataagcaatgatacccaccaaagcttctgtctcagaacagtaaactgtgtttgacattggtatgtgtgtctgtctgattctctgctcacatgaagagctggcaggccctttaagactttgttccccgaaggaatgaataccttctgttaagcagagaaaaggaggcacatagacctatgtgtcagtttcatagtaatactagctttgtcagaatgcatcttagaccctaaagaagtcaaaaggaggctaatcagagttcatactgatttcctggactattaatatggttctcattacatttaagtaatcacagaaaagatttaagctgactgcttgtctctccccttcagtgtgccttctggggaagtaacaatacagcaggaaaatttccttcttttcacatgattaatttaaatgatcccataaaatgggtttgacagtgtttcttgaagccaagcttttgtgccagcaggatggacaatcaccatctaacagaatgactcactttcttaggcagtaaaagcaacaaatcaagctgatgaaagtcagacattgaaggtgacctaagaaataactataatgagaaagggatctaaaaaatattttatattttcatgctctcaagtggctcttaggtgaaaaatgttggctatataaaatgtctagtcctgtattggtcctcttgggatagacctgtatccattggtgctgcttctttgtggagatcctgtcagccctgttgggtattccagctgggtgcttgctcttgatcctcatttccagacatcctagaagacttattggggcatatttaaacctgtgtcctcccccctcctcaggtgctgtaccctgtgtgccatgtgcgtaacctgatgctgtggagtgcagtgtacctgccctgcccatccccaaccacccctgtggacgacagctgtgcaccatacccagccccaggcaccagccctgatgatccccccctgagccggtgagcccagggtgatgccacaggcctgacagcctgtgtgggtgtattcctgtgttgggacgtgtgcagggatggtcagagatcatgatggtatctggctccacagtatctttcttaggtctctgcagttttttcagggaagttatagggatttctgagctacgaggctgtaagatccttgtttctgggagtgagttaggccctgttgcttcatgttgttttgcatacactgagccgctcctcagtgatagagcaaatcctccagtttttctgtgaccccctggtttgtgttttccccagtgctctgtgctcctgcctatttgccatgatttgtcttctgaggcttaaaaggcagatgctgtcagatgacagaaaattttgctttggggccaggcttggtggctcatgc

SEQ ID NO: 103197 - DNA, 1234 bp, Homo sapiens
gcagatggagaacatcttgcaggaggccaccaaagaggagagtggagtagaggaacctgcccacagggcaggcattgagatacaggagggtaaagaggaccctctcttagaaaaggagagcaggaggaagacacctgaggcctcagccattggacttcaccaagacccagaactgggtgatgctgctctgaggagccatctggatatgagctggcctctgttctcacagggcatttctgaacagcagagtgggctcagtgttctcctcagttctctccaggtcccccccaggggagaggattccctggaggtccctgtggagcagtttcgaatagaagagattgcagagggtagggaggaagcagttcttccaatcccagtagatgcaaaagttggctatggtacctcacagtcatgttctctgctaccttcccaagtcccttttgagaccagaggaccaaacgtggacagttctacagacatgttagtggaagataaggtgaagtcagtaagtgggccccaaggtcatcatagatcttgccttgtaaatagtggcaaggacaggcttcctcagaccatggaacccagcccttcagagacaagcctggtcgagaggccccaagtggggtctgtggtgcataggacttcccttggcagcactctcagcctgacacgttccccttgtgccttgcctttagccgaatgtaaagaggggcttgtgtgcaatggtgccccagagactgaaaacagggcctcagagcagcccccaggtcttagcaccctccagatgtaccccacacccaatgggcattgcgccaatggggaggctggtaggagcaaggactcactgagccgtcagctgtctgctatgagctgcagctctgcccacttacactcaaggaacttgcaccacaagtggctgcatagccactcaggaaggccatctgcaaccagcagccccgaccagccttcccgcagccacctggacgatgatggcatgtcagtgtacacagacacgatccaacagcgcctgcgtcagattgagtcaggccaccagcaggaagtagaaactttgaagaaacaagtccaggagctgaagagtcgcctggagagccagtacctgaccagctccctacactttaatggagactttggggatgaggtggtgagtaggctgtggtattcctccatagctgcccaaggagacggcatgctgaggctgggtgccctttgt

SEQ ID NO: 103198 - DNA, 2175 bp, Homo sapiens
gttattcctgtcagattttagtgcctgttctgccttagtaactacaaagtattagtccttccagacgtgggctatggctttgaaggttcagttctttttaaacaaatatttatacccatcctgtggcagatgctgccagtagaaatggagagaagggactggtttctagcactgttgaggagttagctctgatgggggtttgtggctggaaatgggggttccagagggggaggttctcaaggaggtgctttcctctctgggtggacttgactcaggcagctcaagtacaagtgtgagcctggctctcaagtggtcagcgtacattaaaggcgggcacatccagtgactttcagttcagagtgacttggcttttccttcatgctaatgatagtttctcatgttcccagagagtccttctaagaaaaggagggcatcccgaaagcactcagctttaacttagtggcaggcagggttggattgacaggcccactggagcagctgacatacagaattctcattccattttggtcacttccctctcactcactttctggaaccctgagggcctgtttttctactccagagtcactgcacacaacctgtgtatccctctcccagctgagcccaggcccacactgcacttcttcaccccagttcttgatggctgatgcatctgcagattcggcagtcctagcactcggccccacccagagtcctcagttctcccttcttcaccaggccttttcttcttttgggaggagaccaggttcattctgttcagctgtgtttgtttgccaacagacttcaatccccgactcggaaagcaatctggatcagaactgtttgtctcgctgcagcacagagattttctctgaagccagctgggagcaggtggataaacaggacacagaggtacaggctcagcccctgctctgagtgccatcaatttaactgttttgtggttcttctccacccccattcccaccccatacccctggccaaggaagcacctcccagcacagctagccctgagcctctggcaccttagctcctgggaacccacatgaagcctaggatttctgagccagggagactcagcaagctggccctccctcttcattgcctctatgaactggagccttgccagctctcacagtgacccagggtgctgctgcctgctactttatctcaggggagattggagtcccctccagggaaacgatttggacgcctttcttgtactgttgacatcagatctgctgggctggtgccactggagctgatgtggtccttgtgactcttgctgcccccagcatggctctgctggctccagctggatggcccatctcctgtcagtaacctggtcccatctgttttgcagatgacccgttggcttcctgaccacctggccgcccactgctatgcgtgcgacagtgccttctggcttgccagcaggaagcaccactgcaggtaccattgaggggctgtggtagggtgggctgtgtgtggaggttgagggtcggcccacagagcctgcagagtagagggttgtgggtatctcagtgttctgtctgaggcagagccatggtctcatcttcctgtgcctctgaaattggtgtttgcaaaactgcatttggcatctttgttcaaattcagagtaatcactgttaaattctgaaatgtgcaaatggtagcattttgttgtttcccagattggtgaaacaacagccaccactgaaaccaccatttcttattctcagcataacatttcttcccattcaacatggctactatgagcaaaaccagttttcctgcgatggggagggaactattttcctattcctttcctgctccctgaccccacacttgttttcccttgtgccattggtgagcagctgtagcttgggaagtagtagagacagctgaggacagtcttccaatcattaaggttcctgacttctttttccttctgggttagggtagtgagtttactagggaccctttgccccagctagggtgttgactgtctggtggatgttcagtgttcttagaagaggaagtttatctgaatcatgccatagctcacccacacgagtgggtggattgaaaatggaacagtctctttgcctagtaatgatgcttctaggacatgtatctccccaccctgcaccccaa

SEQ ID NO: 103199 - DNA, 1007 bp, Homo sapiens
cctggcctctgtgatcacaagctacacagagggcattgcctaggtgggtgtggccactgggttttcctggatcaggactaacccattgttaggaccatgtattcttacagatctctcttgagcagcattcttttgtatacctgagcagcattcttttgagtcagtggtgaggcagccaagaatccttggccccaaagtgaaaatgacatgtgactctgctaggtagggacaccctccctacccagcttgttcctgggctagagagatgaaagggtttgatctcaaggagctccagcacatgcaaattacacacggcaaagtttgtcttttgaagttggtttccctccgcatacctgctggccaaaactaacattgttctgtttcttctcatctcaaggaattgtgggaacgtattctgctccagttgttgtaaccagaaggttccagttcccagccagcagctctttgaacccagtcgagtatgcaagtcttgctatagcagcctacatcccacaagctccagcattgaccttgaactggataagcccattgctgccacttccaactgaagctcagtgacctgggtgggcagtggccaagctgctgttcctatgacaggcccactcaacctgggcagaccgagaggcccgtgcactttggaatgggagcgtggaaccacctgtacagagtgacagatttgggatgcaccactggattgtagattgatttttctttcctgtccccctactccctccctaccttttccatcctcctcctctgccttcaaaaaaggaaactttcccttggttgtcttaattttttttttttttgatggaagaccaagggttgccaggcccactgtaactgccgagctgcctgctgtcacgtgacactgagggatggcttgtttcttccgggtgggaggatggtggtcagagccaggagtatggagatctgagaccgtgagcagggaagaaagccagtgctaacatgcaaccattcctcac

SEQ ID NO: 103200 - DNA, 1044 bp, Homo sapiens
tttgtggaggtaggtgtggggaaggttggagaagagttaggtttgtgctttgtaatcttggcatccatgttttgtgcctgccctccctcttggggaggccatgcttgactctgctgaaagctgctaactggtgacagggtggatcatggtgaggactaggggtaaggtcagggaatgcttaagctctggccctgccctgtattcctcttccccttggtagcagttccctgaccaagggcaaggtgtgtctcaggaaggtggttctgtgcatgcctgggtgtggttaaggcgtggcccagaaggcttccctggtgctctcagtccaggcaaagcccagagcatctgagcacgtctctgacttccagtggcaacacagtttgaacgtggtgaaacagggtgtagttcttttccacattctgtgtcatctagtcgtgcaggtagggaaaaagttggtctaattgaagattgtgcatttcctagtgacaggtgccaagaggttatgatacgggtttcttgggtctgatgtacagtgtgaataaatgcttgcagctcttagctcttttttgatcgatgaagcacttttttattaatattttcctttgttaaaggaggaaccgtaactctccatagctgtacatataacccttttctcctaaagaggagtcagtcagtgctcctatatttttcattttttgtcaaagcaagaagtaaatactttagaattgttaaatatataaataaagcaaataaagttgagtgttccacatggtagcatttgctaacacttcctaattctttgccctgtggtttatcccctcttcgtcccttttccctctcacacagaagtgtttgagggcctgctgggaaactgacctttggcaaaggaaagctacagatagccttccgactctagaccttggcaaggagcctcaccatgatgttcaagcactgaacgcatttcctcagtgattttgctcctaaaatctcccaggctaaaagagggcaaagcagtcagggatctgacctggcagctattcctccttc

SEQ ID NO: 103201 - DNA, 1042 bp, Homo sapiens
ggcagggcagacgatgtctgtgcccgacattggagggggccgtgtgtggtggagctttggggaagtttatcttacctgggtcagattctccccagccattgaggttttctgccaggatcgatgcctggtacaggccaagaggtgagagaggtggggacaagacaccccgccccccttgacctcagctcccctttcactttagtgaggatttgccaattaatccctatggactttagttccctaaacagagggagagagtcttgaacctcaggattagccaatcgccaaaatgtgtccgagtacgcagggcactggacaggctgtgcagtacatcgtgtactcagctggtagaaatgaggggtggttctggcccctaaaggggtttttaatctcagcaggatcataatctaatttctcctccattggaccatcaatctgttgaggtaggaacagtattttacatctcgtaatcctgcatgttgttgcctggcacattgtagttgcctcgtagatgttgaatgaatgaataattgaaatagcatgaaaaagatattaaaaagtcaaaagagcatgaacaaatactcaattaatatagtggaagccattttctctgaatgagcacaggtaggggaattaccagggccaaatggaatttgttaaaatggtgaataatttattgaagcaagctctgttggaaggtctaagtaattgggcgaactttggcaaaccaagttcccttgcttagcctcactttccttttcttttttcttttttttttgtgagatggagtcgagctctgtgccaggctggagtgcagtgacgcaatctcagctcactgcaacctccacctctcgggttcaagcgattcccctgcctcagcctcccatgtagctgggactacaggtgtgcaccaccacgcccagctaaatttttttatttttttttatttttagtagagacagggtttcaccatgttggccaggatagtctcgatctcttgacctcgtgatcctcccacctcggcctcccagagtgctgggat

SEQ ID NO: 103202 - DNA, 1489 bp, Homo sapiens
gatggtttatactatattaaacagatggttgcagaattttgtgaatatactaaaacccactgaattatacctattaaaaaaactttaaaggctgggtgcagtggctcatgcctgtaatcccagcactttgggaggccaaagtgggcagatcacttgaggtcaggggttctagaccagcctggccaacatggctaaaccccatctctactaaaaatacaaaaattagctggatgtggtggcacacacctgtaatcccagctactcaggacgctgaggcaggagaatggcttgaaccctggaaacagaggttgcagtaagctgatattataccactgcacttcacctgggtgacacagtgagagtccttttcaataaataaataaataaaactttaaaatataaagaatgagctagactgacacaacagctagacacaattttgctctcatgttagctcacagtaggtcaggggatacttaaagacaactatggtacagtatatattgcaaagggcacataacccagacttcgtaatagtggtagtgggaattaggaagtcatcccttaaggaaattttactaagccatatgatatggtttggatttatgtctccacccaaatctcatgtcaaattgtaatccccagtgttggaggagggccctggtgggggttgactggatcatgggggtagatttcccacttgctgttcttgtaattatgagttctcatgagatctggttgtttaaaagtgtgtagcacctcccctttccctctcttcctccttctctggccgtgtaaaacatgcctccttctccttccccttctgccatggttgtaagtttcctgaggtctccccagctatgcttcctgtgtagcctgcataactgtaagtcatttaaacccctttctttataaattacccagtcttaggtagttctttatagcaatgcaagaatggactaatacaccatatctatgagatgagtaggaattgggaatggaggaggatgtttcaggcagaaggaatattgcaaaatcctgagagctagaaggaatatagtcctttggggtaaagaaggtaagaatagctggtaaataaaagtataagggaaaatagagctgaggctagggaggcatgagtcaaatcttgaagccatggtaagagttttagattttatcctgagagtagtggggagccattgaagtatttcaatctgggaaaatgcatagtcgagtttgtaatttaaaaactctggctgcaatatacagaacagactggagaaggagaataccagtgacaggaaattggtggttgcagcagtacaggcaaaagatgagactggttgatttaaagtagagatgacaacaacctggctaaagtgaggagttggacacatttgagatatatatatatatatgtatgtgcagggggacagggtttcactcttgttgcccaggctggaatgcaatggcgtgatcttggctcact

SEQ ID NO: 103203 - DNA, 6219 bp, Homo sapiens
tatatatacacatatatacatatatgtataaaatttaattttacttttataaatgtcaattcctaaggaatttaccaaatgctaatattaacctgcttgaatcctttctcaatagcaagtgtcctgaatgcctcagagttttcaatggtaatattaatttaatctaggccatccatacattgcaaaaatatggatgtagtaatgccttgtgttctaattggctgatgctattttcagagcttgattccctagaaatgacatcagaatgtctatgatcatagagaaatttttaaaaccctactaatttagaaaactatttagttttattaagtaagttttaataagtaagttttattagttttattaattttattaattaaaaaagttaatttaaaaattaatttaaaaattaaaaagtaagttttattaagttttattagttttattaatattagtattctatactaatatagaaaactattctagaaaatcatgatttctcttatttattgtgtctaagactaataactaccccagtagtgggtagtgtattatggtttaatgggctgggactagatcttaaactcttagagctactttgtttcccattttattttttgaaatttaagggggacaactgatgtattagatatgaaggttatagtctcaaatcaagtaaagatagcttggaatctttaagggttaaagaactattggtggttttcagtctcatatataaaatattgtaaaagagtgtcccctagtgcccctctgaagaaataatttgaaagaaatttaatattaccacctatttataatctctatcaccaccttgtggcagtgttcgcaaataattctgccctcttgggaaaaatcttcaagaatcttgcattaatggatacacaaaaaccggtcacaggctatccttggtgatccagaatggaatatctttaaagaagttattttacaagtattttggtcagaacttcataaaaccttgaaaagaagccccagttgaaattaaattaagactttgtaaagaaaagggaaaatttgctgctgcttctttttttttttttttgagatggagtctggctctgtcggccaggctggagtgcagtggcgcaatcttggctcactgcaagctccacctcccgggttcacgccgttctcctgcctcagcctcctgagtagctgggactataggcgcctgccactatgcctgtctaatttttgtatttttagtagagatgggatttcaccatgttggccaggatggtcttgatctcctgacctcgtgatccacccgccttggcctcccaaagtcctgggattacaggcatgagccaccatgcccggctgcttcttttttatatcaacaaaacaataagggtgaaaactagatgtattttaaatattaacttttttattgtggtaaactgtaatatgaaactcaacacctcagcttttctaagtgtacaactcagtgacactaagcacatttgcaatgttgtgcaaccattatcactatccatttctaaaaccttctcatcatcgtgaacagaaactctatacctattaaactctttattccttctaccccaccagcacctggtaacctctattctactttctgtctctgtgaatttgcctactgtaggtacctcatataagtgggatcatataatatttgtccttttatgtctggcttttcacttagcataatgttttcaagatttattcacattgttgcatgtatcagaacttcattcctttttaagattgaataggggtcgggtgtggtggctcatgcctataatcccagcacactgggaggatgaggcgggtggattgcctgaacctaggaattcaagaccagcctgggcaacatgacaaaaccccatctccacaaaaaatacaaaaattagcgaggtgtggtggcaaatgcttgtagtcccagctactcgagaggctgaggtgggagaatcatttaagcctgggagcgggaggttgcagtgagccgagatcacgccattgcactctactgtgggtgacagaaggagaccccgtctcaaaaacaaaacaaaacaaacaaataaaacaattgagtaatattccattgtaaataccacattttgtttatccattcatcttttaatagacattcgaactgtttccatcttttggctaatatgaattatgtggctatgagcattggtgtacaagtatctgtttgagtccctggtttcaattcttttgaatatatacctagagatggaaatgctagataatatggtaattctgtttaactttttgaggaatgccattgctattttccacaatggctgcaccattttcattcccaccagcaatgcataagggttttaatttctccacatccttaccaacttactattttccatttttgaataatcatttataaaatttttaattgacacacagtaattgtacatatttatggggtacagagtgatattttgatacatgtatacaatatgtaatggtcaagtcaaagcatattcatcaattcaaacatttatcattctttgtgttgaactattttaaaatatacaataaatcattgttaactgtggtcactctacagtgctatagaacaatataatttattctcctatctagctgtaattttatatccattaactaacttctccctatccaacctcctccctgctgcccttcctagcttttaataactacttctgagagctcatctgttttagctcccagatgagtgagaacacatggtatttatctttctgtacttgacttacttcacttaaaattatatcatctaggttaatctctgttgctgtgaatgacagatttcatgcttttttaaatggctgaataatattccattgtgtatatatatcctttccttcctttctttctttttctctttctctctctctctctttctttctctctttctttcttttttttttttttttttgacagagtcttgctctgttgcccaggctggagtgcagtggtgcaatcatggctcactgcactgcagccttgaactcctgggctcaagtagtccaccttagcttcccaagtagctgggactataggtgcgtgccaccacacccagctaattttcgtattttttgtacagatagggtttcaccatgttgcctaggctggtcttgaactcctgggctcaagcaacctgcctgcctcaacctcccaaagtgctgggattacagacatgagctgccaccccggcctatattttattcatgcattcatctgttgatggacacttaggttgattccatatcttggctattgtgaatagtgctgcaataaacatggaggtatagatatctcttccatatactgatttcttttcttttggataaatacccaatagtaggattgctggattatatggtttctattttaagatttttgaggaccttccatactgttttccataatgcttgtactaatttacattcttaccaacagtgtataagaattttcttttctttgcatccttgccagcattcgttattttttgttattttattttattttatttcatttcattttttgagatggagtcttgctctgttgcccaggctggagtgcagtgacaagatcttggctaactgcaacctccacctccccggttcaagtgattctcctgcctcagcctctcaagaagctgggactacaggtgcatgccaccacacctggctaattttttttttttttttttgtatttttagtaaagacaggatttcaccagactggtctcaaactcttgacctcaggtgatccacccaccttggcctcccaaagtgctgggattacaggtgtgagccacctcgcctggccattttttgtccttttaataatagccattctaactgtggggagatgatatctcattgtggtttcaatttgcatttccctgatgattaatcatgttgagcattttttcatatacttattagccatttgtatgccttcttttgagaaatgtctattcagatcctttgctttttttttttttttttggcttttgagttgcttgcacttcttgtatattctggatattaattctttcttggatgaatagttttcaaatgttttctcccattctataggctgtctcttcactctgttggttatttacttagctgtgtagaaactttttagtttgatataatatcatttgtgtatttttggttttgttacctgtgcatttgaagtcttacccataaaatctttacccagaccaatgtcctgaagcatttttcctgtgttttataattttgagccttacatttaagtctttaacatattttgagtttatttttgtatatggtgagagacaggggtctctcattcttctgctgtggatatgcagtttctccagaaccattttttgacaagggtatcttttccccaatgtatgttcttggtgactttgtcaaaaataagctggttgtaaataggcagatttatttctgggttctctattctgttccattggtctatgtatctctttttataccagtgccatgctgttttggttactatagctttgtagtatattttaaagccaggtaatgtgatgcctccaactttgttctttttgctcagaattactttagctgttcagagtcttttgtggttccataggaattttaggagtttttttccgtttctatgaagagtgtaattggtattttgacagggattgcatttgaatctgtagattgttttgggtaattaatatgatcattttagcaatattaattcttctaatcaatgaatacgggatgcctttccatctttttgtgttctgttcaatttctttcatcagtgttctgtagtttcattgtagcaatctttcactttcttaaatttattcctagctaatttttttggtaggtattgtaaatgagatttctctcttgatttctttttcagctagttgaatgaataactattttaatgggtatgaagtataaacattaacttctgagttgaatttgcaaataagttacaactgaagttagttcaagaaatgtttttgagcctttgctatattgttacactctgagggaataacaaggattaataatatatattgagtctctaggtgatttacaatgtattttctcctctgaatatatttttgaacaaataaataatcttataattttcattgagtgggtggaaaaattcatccagagaccttatgccaaaattatagataaaaatgtttattaaacttatttcccaatgagtatggtcaaattttaattatatagttctcctttggaaaattaacaataggtacttttttcaactcaaattcattttatcgtttagatagagcctgatagaattatcttagcattcattcttcctttgctcttcaaaatgtagcttggtaaatttctctctgaactgaacaatcttgaaaacagtttatacttaactgtctttgattttaattttttgtttgcttttagactttttcagtttcatttttgggcagagtaagagaggaagcattatatttggcaaggtctctaattaattaattattttttaataggttggacttgttgaaataatcctgatacattcctacaatggccactgctcagctttctcactgcatcacaatacacaaggcttctaaggtatttgttaagaattaaaagaaaatcaatgaccatttagtgagttagttcagaattatgattttaatcttttgtgtgtgtgtttttaagcagcagttttatcagttaattggcacataatattctgggagagtatgtgtacattttaactgcctaatagaccaaggaccagaaaattaaaataaatttctacaaagttacttactgggtgcttgtttcatgtttatgtaatatatttaggtcttctagagtaaaagaaatcagaaacaaaaagatgtttaaagagaatggttcttggttagacattcacttcctaaagtgttaggaaacttgtgttgcacaccatggtgtaattataagaacagaaggggagagcactgagagaaacttggatgctaggaggtctaggggagcatcccagggccaggcatatagtttagtttgtctcatgacattcattaatgcatcctttgtttattcattgagactaaatattatgtagtat

SEQ ID NO: 103204 - DNA, 2127 bp, Homo sapiens
tgaaatcccactctaaggtacttgaactctctcctggatgaacactggcagtatcatgataagatttgtatccttgaaaattaattctgatggcaatatggaagacaggttgaatgaaagaatcgttagcaaagagataaggggctactgcagtaatcaaggagagaattgagtatgtcctcggtcaagccagtggcagtgagcagggaaaggagaaaatagatttgagaactcttttagagagaattaatagaatttagtggggtatgaaggagagagaagacaaagatgaagctgcttctagcctggatgactggagtagtgctgattcactagtctgagaatgagacttgggatcaggttttagccaggggtggcagagataaactgagtttaagggatctacaaagtggtttaggtgcagatgttcaggaaataaaaatatagaactgggactcagaacagaaatagggacctgaattcctttttgtataggctgtagctgaagctatgaaactagatgagattattcaagaagacagctataaaagagaaaaagcctgaagacagaatcctgggggataaccaatatttaaagagtagaacaactggaaaaaataaaagagactgagacagatatgtacggataggtgaaaaaacaaagtagtgttgtggcaccttggagaggaaaagagagtatgtgggtaacagtgtcagataatataaagaagttacatattatgaggaatgagaagaggtcaactataggattgtacttggtgactttggagagaatagtttagaaaggaaaggaggaaaatccagattgcagcggggtctgaggagtgtatgagagggaagaagattatataatcatagtaaaactccagtttcatggatcattgtgaaataaattgttttagtcttgaattacttgggtaattgtttctgccttctgctctgccttgcctatgaagatctaatttaatgtaatattcaaagcgctatttctttttgattaccttcaaagatatcaaatttgaagtcctgagaaatcttttcatcatatatgtggtaatgatgtgctaaactgaatatattaaataatactaatcttttttcacctccgttgtttttccaggaaacagttttcccatcccaaatcactaatgagcatgagtcattgaaaatggtgaagaaactttttgctacttccatctcatgtataacatacctaaggggcctgtttccagagagctcttatggagaacgccatttggatggtaaagttaaactaactagtctctttggctgttgtagcccctttctctatttagcaggaataaacctttcacgtctcacaaagtgtgctaattccaacttaagggcctgttcttcaagaccaatttgctaatccattttccattttaattttactgtgtgtagtgattttacttataggaattactagttcctagctagacgccaggtgacagatggaagaaaaaagaaatgtttggacaagtccagtataaaagcaacagctagatcaaaatctatttgaatgctgtagatttgcgctacgttgtgcctcaattgaatttattctttaaggtacactttagcattgaggaagttcaaaggaaccaggtgaaaaacttttctccctgttaacgtatataaaaatactggggataaaaaagccaaactcacttgttgattaacatggatattaaaataattattattctaatcagttctggcttttttctcaattgccaggtcttctactttcattccttttgtttcagtgctcttaaacttatcatcttattgtcttatactacaagctgtttctggccccttttcttctcttattataaaaacaagtaccagccaggcatggtggctcatgcctgtaatcccaacactttgggaggccgaggcgagtggatcacctgagttcaggagttcgagaccagcctggccaacatggtgaaacactgtctctactaaaaatacaaaaattagttgggcattatgctgggcacctgtaatcccagctacttgggaggctgaggcaggagaatcacttgaacccaggagacagatattgcaatgagccaa

SEQ ID NO: 103205 - DNA, 1108 bp, Homo sapiens
ggctggagtgtggcggcatgatcattacaggattacagcttcgaccttccagcctcaagtgatcctcctgcctcagcttcctgagtagttgggagtataggcatgtgccactatgcccagataatttttttaattattttttttagaggtgaggtttcactaggttgcccaggctggtttcgacgtcctaggctcaagcaatccttctgcctcagcctcccaaagtgctgggattacaggtgtgagccaccacacccggcctaaacccaaactcttaatatgatattcctattcttcttaagtataaaaaggtagatttcggataaaataaatatttgagaataatccgtgtgaaattttttattccttccttttcaatgagagggagagaaataacagggaaatgactgatatttaggtgtatattttaagttggtcaatggagatagtctcaatactacctcataattacttagaattctacagcggcaaagaaaggacacaaattgattttggagccaactcagttgtgctacattgtagaagggggaaaatccttactgtaatcgaaattgagaccaagctacttcttaacataggatttatttttaaagtagatgtttagagatccaaaatgtttttataagctataaaactaaataaattacataaataaaatagttaaaggaaataccctatttagcatggacaatttcagtacagcagtcatttagtagataaaaatagactgtgtttctgtttttgtagacctcagtttaaaaatcctccgagaagataaaaaatgtcccgggtcactgcatattatcagatggtaagtaatagaaattctataaaagttgaacaacattatttttatcatggctgaaattacccataagactttatttagtaagatcattttttaaaaaaccatttcttcttttctactttccctctttctttttctttttctgtttttgatttttttttttttttttttttttttttttttgagatggagtctcgctctgtcccccatgctggagtgcagtggcgcaatctcggctcactgcaacctctgcctcccaggttcaagtgattctccgcc

SEQ ID NO: 103206 - DNA, 2219 bp, Homo sapiens
ggtgtgagccactgccctgacctactttccctctttctttttaaaaataattttctaggaatttgtaagaattattcaatataattttaagacactgatttagctttttgaaagaaaattgacttgtataaaaataaaaactgtgataaaatattaaatatatacacctattatgtacccacacagattttaaaaattgataattcatcatatgtgtgtcagtgtactaaacatgggatccaaaaaaatttggttcactaccacaaaatagctcactattacttataaaggtctatcatcatattaaaagttgctggaagtttaaaaaaatgattaaatgggaaaggtaagatggttatcaacttaatgtacatcaaagcaaaaagtgcaaatgaattctgtacttggaatttttttggatttgcatatggtccaattgacatcaaacatttatttcttgacaggattcaaggttgttttgatgctttggaaaagagatacgtaagaatgtttttacacttacactggaatcaaaggcttgtcttttattctttaaaaaaagaaattagacatttattttgtttttgtgtttaacagtataagtgtctacgtttgcatccataaactaatttcttatcttatgtctttattgtcctgttgttgtctcctttgcatcaattagaaagaaaactcattttttctcttttacatactcacattttttgaccacagagtttcctctgaagtcactggaagagatccacaggatgtgggacaggagagacaagaatctggcatttagtgcattgaacaaatttagaatagtggtgattcaatttgcagatatgaaaggaaaaaattgacttgaataattggtttttattctgtcttagttattttggtaactatattttgttcataagtataatctattcccttacaatagctagtattgtacctcaaattttaaaaaaatacagcttaaattttaagtgcatctgatctttcatgctgcccaagacagctatgaagggtgtacaaaatggaggctctagtcctagttgaagagacaagatgtatataaatgaaatttctctttttctttttttttctgtgaagcttttattatgaacagagggcagggcaaggcagggggctcagtccttggcagcggctttcctcatggtggccaggacattgcgcagctcctcctacttcctcttggtgcggatgtgtgttcccacctttttcttgatgaacttgaaggcccttttgtccttggagaccttgagctactccatgggatgctgcccatacagggtgaagccacacacctctcagatcatatcccgcatgaacttggtgtgtttggtcaggcacctgcgatggcagctgggcctgggcttgctcacattcttggtcaccttgtggcccttgttgaggcccatggctgtaggataaagcagaaccatggctgctgctctccagtgacagccaaggcctgtaagtatttgaaatttccgccactgcttttccccactttctccatctatgtcttctttttactcctcaattcctgttcctttaagaaatcttgaggtcaggaagccttacactggattatttagcaaattcatacatttctatttccactgcacatttgttacttatgatttattcaacactgaccagagggacctagggatacaaagataaaacagaagtgggaaagagcttgtaaccatggcagaagataagtgaattcatatgcagggctgatgatcagctgttacatactgactcagctgtatctgctcttaaaatattgaaatatttctgtattgaatggtgaatagctacttttctgagacctcatgtggctccccatcaatatcctccccatcaccttacagtgtctcttttgggatctctccagaacactccaaaatccagtaaccaaagggttaatatctagtccgaacgttgcttccaggaggccagctctagagccaaattggcatcctttctgattggccagtatctatgtcatattgggctttacatgtttatttattaatttttttgtgagtgtgtggcagagtcttactctgttgcccaggctggagtgcagtggcgcaaacttggctcactgcaacctccgcctcccaggttcaagcgatgctgctgcctcagcctcctaagtagctgagattacagaa

SEQ ID NO: 103207 - DNA, 1306 bp, Homo sapiens
gcagtgagctgagaccatgccactgcactccagcctgggcgacagagcgaaacttcatctcaaataaataaataaataaataaatgaaaatagtttgagtaaaatcagatttgagtatctagagatcttgaaaggtgttcccctgtaagagcatgattatttctagttatgaaattttgtgtgattttttttttttttgagacggagtctcgctctattgcccaggctggagtgcagtggtgtgatctcggctcactgcaacctctgcctcccgagttcaagcaattcttctgcctcagcctcccaagtagctgggactacaggcacgtgccaccatgccttgctaatttttgtatttttaaagtagagatggggtttcaattttgggtgatttttatacttattttgtactttatattatgcttgaattcttcaaaataagtacatatcagtgttgcagataattattgtaaaaaaagagactatattgtatatagctatctagcttgtttccttattcgcattctcaatccctcaccattccaacccactgtccacactgcatactttcagaaacccaagtctgatcatgtcattcttttgcctaaaaattttccacagcttttaaaataaagttcagggtccttcacatggtctgcaaggcctgtatgatccctatcttcctgtccagggcatcactgtcattcccatgttcaagccacacaaagaatctagaacatgccaagctccttttacctttgcatatattgttcctcttgcctggaaacttctctcccctgccccatacaccttgcctggctaactccaatttatctgtcaagtctcagcttaaatatttacttccctagggaagtaaatacttccctccctgacaccctcctccctagcctagatggtccctttatttcatgttctcatagcatcccatgctgcttcttcatagcaatgaacacaatgttaatgatgtagctatctttgctatttttttgttgtttaacgttgttctcccctgctagtctaaatgttccctgagattgggaccatgtctatttttgaatgaatgcataaataaatgaactcaattaagtaatgtatgagtttatatgcagtaatcaaaatggccacacagtggcagtaaagttttagtcctttgatatgaaattatggttctgaaattttttttcttttctctttctttctctcgctctctctttctctccctccctccttctttccttccttccttcctttcttctttttcttcctttctctctttccttccttt

SEQ ID NO: 103208 - DNA, 1072 bp, Homo sapiens
gctgggattacaggcgtgagccaccatgcccggccctctctttctttcttatagggtttcactctgttgcttaggctggagtgcattggcacaatcacagctcactgcagcctcaacttccaggcctcaaacaatcctcctgcctcagcctcccaagtagctaggaccacaagtgtgcaccactatgcctagctaattatttactttttgtagagatggcatcttaccatgtttcccaggctggctttgaactcctgggttcaaatgatctgcccaccttgggctcccaaagtgctgggattacaggcaagaaccactgtgactggcctgaaattttctgatttgtattctagtttttaaaaacaattatcattggcttgattatatttctatctctatatgttactctttcaagcagagataatctgttcatagtagtgtatatgtagagaggacaaggactttatagacatataagatgtttttactttagtagattagtttcaaatgggacactttttgaggtacttgttgcatatttaattatttagtaataatgaattattttgtataccttttgcctccagaactagaatataactttttaagggtagggatagttatcttttttgtgtccctctcgtctctagcagagccctgtgtacgtaatggactctcacttgaatgagtgaatagttagtacagttggccctccatgtatcagagcattctacatccacagattcaaccaactggaaaatatttagaaaaaataacagtacaacaataaaaataatacaaataaaaaatacagtgtgacaagtatttatatagcatttacatggtattaagtattataagtaatctagaaatgatttaaaatacagttgaactcattacacattatatacaggtatcaaaatatcacatgtacccccaaaatatgtacaactattatatatcaattaaaaaatgctagtctttcagaaatggagagaaaaaaagaaaaaattataggaaagaatcagttttcagatatctaggaaattcccctttataatgcaaaaaaatt

SEQ ID NO: 103209 - DNA, 2454 bp, Homo sapiens
acagtggctcatgcctgtaattccagcactttgggaggccaagatgggaggatcacttgaggtcaggagttcacgaccagcctagccaacatggcaaaaccccatctctactgaaaatacaaaaattagccgggcattgaggcgggcatctgtaatcgcagctactcaggaggctgaagcaggggaatcccttgaacctgggagacagatgttgcagtcagccgatatcatgccacaacactccaacctgggtgacagagtgagactctgtctcaaaaaaaaagaaaaaggaaaatacagtatctgtagatgtgaaacccagatatggaaggctgacttttcatatactccctgaggtacttgagtacacatggattttggtattcatagggagtcctggaactaattccttctcagatactgagggatgactgtatcctttttcttctggccttctggatatttttttcctacccaaatctttcgaacctctctgaaataatattttaattagtctattgaaaagaatgataatataggtgcaagtatgtaataataatagtttttttttctttctcttgaagctacgtatggcagtactgacagtaagtacacactcatttaaagaccaagcctctgtctctatttcattgtcttttggcaagtgaaacattaaaacagtactctccctcttcctccctgactttttttttttaatctgtcttggaattaaaaacataggatctatcagaagtttaataaaagattatgaattgtatatttctttggtataatacatgggaaaatgtataggctatactatctgcttcatttattggctctcaggattttatttttttagttactttacagactccaaattttttgtttttgaagtttggtagactcttttgaaattttgtatacctctgagtttaacatgttatacatagttaagaatagaaaatgagaagataccactgagagtcttagatctatgatttattgaacaaattttaaaccataatggattatttagaatttatttgtagcttagtcatggtaattatgaatccttcattattaatttccttttattcagtgttcacagaatattctaaagactctacattcacaaaataagcatatcctatctctagcttaaaatatatgtctgtactcaactaatagaacacaaattgaactctatataaaaaaggtatttgatgaggagtaatctagtaaattccagaaattaaatgatgtttattttcccttatacagctttacacagatcccatgggatctgaggtaagaacacacacaaacgtataggtgggtagtatatgtatattatattttaagatgtttttctgagttgaggctatagattttgttactagactaccatatgagcagaggaactaatagtgggctctttcagtatattttactctaaacttgaccaatctcttattatgagatttttcaaaaactatgtaagggtattggggaaaaaaggcattgagaagaactgagcttattccctaacctgttggcattaagagtctcttaatgtataaatgtataaaaccacatttttttcttaaaaattttttaaatttaatttttatgaactttttttccgagtcatataaaaccacattttattatttatttaaactgattatgaatcttttctgtttatggccttttgggaaaataaatgagatatggcataactctaattttcatttttgccaactaaattctccctcttttcgtgtttttatagattttcagagctttacctctttacttctctctttagatttcttccctctgtttagggaatccgactcatcttcaaggccaactatgttcatatcttatatgtaaacctctttggctatttggtctatactaacttctttctttaaattctttttccagcagaaccccacaatttaacactctcaattgattcatattgattacttaatctcctcaaccagattgtgaattcttctttttttttcttttttctttttttagatggagtctcgctctgttacataggctggctctgcctcccaggcttctagcaattctcctgcctcagcctcctgagtagctgggactactggcatgcaccaccatggccggctaatttttatattttttatatttttaatttttatatttttagtagagatggggtttcaccgtgttggccaggctggtcttgaactcctaacctcagtgatcttcctgcctcctcctcccaaagtgctgggattactggcatgacccagcatgtctggcccagattgtgaattcttgaggacaagagtcttgtctcatagtcttggacacataatagttacttgtgccactttgaatgtggctgtgggacagaaattgagggagaaactttctgttctcttctcactt

SEQ ID NO: 103210 - DNA, 2224 bp, Homo sapiens
gaaaccagtgttttttgggggtagtgaaatgctaagcaagttgagtttaattacaaaaaaagtattacagagtgggaagaaatgcaggcatatataataatgaagttaggaaacaaaagctggttatgtggtaagttttgagctatcatttatgacccaggaaaaaatattttgaatgtttacagagtgttccccttatgggtagatagtgatgcctaacctctacgtgttcatggtatactttttattactaaaaaattcagtagcatattgggtaatactaaaacactcaaaggagcccaaacaaatcagtaataattacaatgtaactactactgtggtatagcaatgttcatagggcctaaaaagcatccacaagttacattattttatgattgctatttagcatcaagtcactgataaaactatttagctccctgatctcattctcttatgtactcaaaaacaacattctaacataaacatcgtctttggcattcatctcatattgtgccatgtttcttgagttatatgcctggaagtatatcctttcctaaacaaaattgcacaaacaataacaatgtttatatatgcctgaagcaaaaatacactagacagttggattaaaatttgcagcactcttgtgaagagtatgtcatggtataacaattgagaacctctggcttaaatcaaacaagtgtgtgtccctagttcagaaggccaactgagttttcagcattctacaaagttatggtacttctgtgctataagttttgttctggttgctccatctcatgaaagagatgaccaacgaaagtaactaagcatctaagtaaactaagtactaaagtagtgaagagtgatagtgtagcttttctataggaacacactacaaaatgagtagcaagtattagtaaaacatgtaagccaaaatgtaaataagatttacacagcttaatgcatataagaccatatagaattattatatatgaatatggtgaaggcataaatcttatggtttcactatctattcctttgtgcctgtttaccattggaggtgatcaatactctttattttttatttttttaagagacaggctctccctccatcacccaggctggagttcagtggtgtgatcttggctcatggcagccttgaccttctaggcccaagcgatcctccaacctcagcttcccaagtagctgggactgcagttgttcgccacaatgcccagttattttttaaaatttttgcaaatgtggggttatgttgccccggctggtctcaaaggatccccttgcctcagcctcccaaaatgctgggattacaggtgtgagccactgcacttggccaacactcacctttaatagattgcctcataaacttaactataagtagtgtccatttctagccacaatatacttttagatactttattttagaaaaaaatcgttgtaggatgaaatcctaagtaagcatgaactctaccttggccaaatatttattcattcagcaaatattaattgggttccttttatgtgcctagcactgttcaaggtataaaaacacaggggtgaatgggataggcaagatccctgctctctagaagcctacgttcttatgaggtaggataaacaataaataaataaataaaaattagtacaaacaatttcagatagacatagtgctatgaagaaaattttttaaacaggtgatgtactagagagtgctgaagtggagaatgaagaaggagggattggatggctgtgttagattgggcagttcctaggaggcatccctgagaggctactgtttgagctgagatgaataaccagaaggagtcagcccatgcaagtctgtgaagggcaatggcatgtgacaggccaaataacaccacagttaacatcacaggcattggcgtcaaatcgcagttctaccacttactagctacatcaataatgagactaatgtctacttcagagtgttggctacacaaggagatgaacttgtgaaatatttagggcagtgcctgaatattattattatcattaaccggagaccacatgttccagaatatagctgtgcaaaggccctaagacaggaaggaatcttgggtgtttgagcatagaaaaggtgccatgagcctggagcttagctgagtgcaagggaaagtggccagagataaggttagagaggcagacaggggacagatgggtagggcct

SEQ ID NO: 103211 - DNA, 1026 bp, Homo sapiens
acttttggctgcagaacagagaatgagcatcagatggacttgcaatttgctttagagatagacctgaaaagtcttgccaatgggttggaatgtggagggagaaggagaggctgcatatgttgctgctgctttggcctatgtgactatatttagtatgattcatagaaaccactgatgagcagttcaatggttcatctttattaggcaacacattagtctgaaaagtgttatatgaggtgttaagaatagtgcctgctgtaaatatactttcctagataagccagagtcagactgaagttaattaaggattagcatcttctgtaaaacaattataactataactcttttattagttgcttcagggatcaaataataaagtgtaaataaaattatcaactactaaaacaacctactcttgttacaatttaaaaaaacaaaagatcactcagagcattaaaaagctagagttgattgagaaacatgggcaggcaggaagaatgagcattgtttgcttggcagagcaattacacccagcattggctaagagaggactctgttcatctcgcctatctggagtgaacctgttgctataggctcctctaatctcatctgtctctcctattgtatttacaaagcagttttctgaacttgatttgatttctcaagtaggctgtcttattcagaaaatacttttatcttttaaaattaactccattacaaatcaatctccttagagtttaagcatcatgagccaattttcccaagatctgatcacctgtaattaagtttcatgttaaggtttaagatcagcagagctgggaggcttaaagtaacagaaacactgagactttttctgatcagtctgacatcctcattttcacattgtcaaggatcaaatactgaaccagatgaataaaggacattttttgtgttctgttttgagcttatactgtttacttgtcattagtacttctccagctctgtggacatactgtatgacatatctgggccaaacatttgcttcaa

SEQ ID NO: 103212 - DNA, 1034 bp, Homo sapiens
cgtagacttctagcttacttagaatgaaatccaaaccccttaccatagccaacaaggccccatagtctcctttatcacctcatttcctgggttctccccctcgctcactggtttccagccactgggcctcctctctgaccctagaagaggcatccctccccacttcagagcctttgcattgctgttccctctgcctgaggcaccccacccccaagatctgcacataactgacccttgaggctcagttcaaacctcacctcttcagcaaggccttccttggcccttccaaaccaaagcagcacttgtccccttcatgtacctctctatcacagcatctgcttcttgttcacagcacttacactatcggaattagcttatttcatttgtttacttatttactgactatttcccctactggattgtatgtatattccagaaaaacagggaccttttctgtcttgttcaccgctgtgactccagtgactggcacaaagtagacattcaatacaatatttgttacatgaatgaatggtttctcaactgtttccactgttgtttacctagtttggttagatatttgactctgtgattttgtttttccagctttaaaatggtaataatagtatctttcatctaatttatttttagcatggaggagaaaaactaggttgtctttatatttggaaatattactcttgaataatgtgatactgtgaaacaaacagctatataggaagtacagtagatatacagtgaaaatgttccttacttatgatcaggtaagattctggatttcttttctaaattcttttttttctttatttcctttggtttttgtagaaggtgactgagatgtaccagttcaaattcaaatacacgaaagaaggagccactatggattttgacaggtagaatctaactgcttaatgaacatgagaaataaataggattgaggtaaacataagcttcttgaggccagagaaaggccttatacttctttacacatttccccacaaaccctacagaaaaccact

SEQ ID NO: 103213 - DNA, 1036 bp, Homo sapiens
ttataaaaaggggctgcaacaattgtttacattcctgaaatccatggattaagctggtgggaatagagaaaatggcatgcagcacaaaggtagaaattatgtcaataaggttgcctacacgctattgattgaataactccataaggctctgtctagccattaattcaaagtttctcaactgctatgcctagatagcgatcctttccacctcgatatagccagcctgtgcctagggtagataatacccttggactatttgcccgtatgcacaaatattctcatttgcttaccccagtatgtcatataaatatcatttccttgtgtccttgtatgaaaagattagaaagcactgcagtttccttatgaagtcgaaaattccaagttttaggttactaatgggttaaatagcaaacacaaggacattgaagagcaacgtttatttttctcccagtagcttttggattcagacctgccaggggggatggagagctaagtattgctgatgagatggcacagtagtggaaggtacagatgatggtgaaaagctctggatagtagaggaatccaagtaagggggatggatgcccttgaaaggaaagactgatgagagacatggcctaattttcaattttccctactattagctctggctcatcatttgccatgagcttgaggacttttctccaagattcactcccttgattatccttccatttgtaaaacctacagacagcactagaatgtgaagagaaaatcagttccaaaaatgagaattaaaatattaccttttattagctaacatttgtataatactttacagcttatacagcagcacttttcatacacgttttctcacataaaaagttacctttactctccaaaactcaaaaatatacactgatggccagattaaactcttttgttctgaaggcacatatgccaagaggtaagctgtaaaacaaaaatggccaaatctttcacatgctaaggagagaaggtgatgcatattattaatttcctagagaagaaatatagg

SEQ ID NO: 103214 - DNA, 2285 bp, Homo sapiens
gagtgaggaagggatacttttgcgagataatcagacggtagaaagtcccagagctggtgattgattttatgcttgagagttgtagaaatgtctttacgcttatctcacaaatgagctaactgacctagagtgtgtctaaatgacttgaccaaggtcattcagctagttatcagcagagctgatattagatgccaggtcacctaattccaaattcgttgttcttactgttgtggtatatgatttttttcaaatcaaatttttaaaaagatcgtattttaaatgcttttagggaatttgctacttaagaaattctttgtatatacattgcaaaaagtaccatcgctcccctaatttacattctaaaaaagtctcaaaatatactaatgtttaatttatatttactcacatagtcaaaagttttgttccttttgggatagattgccactattgtatatgatcaaaaagtatgcttttttttctgtgtagtcatagcagcagtacaagctttgaaagtggaacaaacaatgaagatattaagaaagccagtgttctactgatccgtaaattgtatatactgatgcaggaccttgagccacttcctaataatgttgtacttactatgaaactccactactataatgcaggtaggtagagaactttaggcaaattcctccttaagtgctgagctaatattttctataagtaaaaggattttgcaggcatctgaaagagaagtctgttgctacacatgaaagattaatcggatttgttgtattgaaactcagttttcatggctttttgcccttttcatttcgcagtgaccccacatgattaccaacccctcggttttaaagaaggggtaaattcacacttcctgctgtttgacaaggagcctatcaacgtgcaagtgggatttgtctccactggctttcatagcatgaaagtaaaagtcatgacagaggctacaaaagtgattgatttggagaacaatctgtttcgggagaacagcactactgagatcgcccatcagggtctagactgtgatgaggaagaagaatgcaatgaccatgtaaggcaaagctttagagattttctatcgtgtcagttaaacacaattgatatttttcagtttctacccagggcatgcacgtggagtgtgccagctataaaaactgaaacaaaactagtctctgacatcaaggagtttttaatctaaaaaagtttaatcttctaaaaggaaatatactttatcagatgaaattgtccataactaggaggaaaaagattttctaatatatttattttattaaagatatcataaatttagaaaatttgaggttttctttcctttatttgtaaatgacataattttagggttgaaaaatattctaggtatttattcatactcattggaagtataaatcagttcttgatactgagataattggatgggaggagttggggaagataaattttatggataaacccgagtcagcgtgaaaacaaataatagttaacttctggttatgtggaggaagacaagctttggggctaactcactggggaaagtcagggggttggtggggttggagctagtggagccaaacagtcaggtctctgatccctttatcctcccatttccaccaatagagacttggagttagattcttgctagggtcccattatgccctaggtaactccacacccttaactggtggttgtctggataataatgttaactgtatgacaacattgtgttaaaagggttctgagttagacaaaaaattttcagtaggaagggatgctataagatcttttcaggagatattttaagattagaatgataacttgtttgcttaagataatttgagtcttatttaaagataggtgactgtactaggtaacttctgaaggttccttctagttctttaactctgtattatgtttaatacattgaaaagaggttctagttgttctagttttaattcaattaatgtaaataatataaccaaacaagtaacagattgtttttaaatttttagtgctttctcgatgttagacataaaaatgactttggattttggtgcaattttcctcttccaatttcacccaaggaagatatagctaacatagaaaggggaaaaaaaatgaaggttaagaaaagaatgtttcagctagttttttttgttgttgttcttgttgtttttgagacagggtctcgctctgttgcccaggctgaagtacagtggtgcaaccatgactcactggtgcctcagcttgccaag

SEQ ID NO: 103215 - DNA, 1030 bp, Homo sapiens
ctcaggttatttatcttttcctcaatggtttaaaaaatatgtgcttagtaataattctttttcactcatttatgttgcaatatttttttcatgtttgtggctcatcttttcactttctttttcttttcttttttttttttttttttttttttttgagacagagtttcctcttgttgcccagcaggcctgagtgcaatggcacaatctcagctcacggtaaccttctttctcctgggttcaagtgattctcccgcctcagcctcctgagtagctgggattacaggcatgtgccaccacacccagctaattttgtatttttagtagagacagggtttctccatgttggtcagggtggtcttgaactcccgacctcaggtgatccgtccgcctcagcctcccaaagtgctgggattacaggcatgagccactgtgcctggctcatctttcactttctttaagaggtcttttgagcaatgtaagtttttaattttaatatagtctaatcttttcctttaatatgtgcttttggatatccttaagaaatcctctacctaaggtcattaataatattctcatattttattctaaaagttttaatgcttttctttttacatttaggtttataatccacttaaagtttattttcatttatggagtgaaatagaccagactttcttaacacttttaaattcaagaataataaacatacagtaaaacatatgtatcagtgatacagctcaataaatattcacaaactgaacactagagctgggatgagggtgatgcaagcaaggtgcctagggagcatattttaaggaagatctcaggtgccaagagtaaggacctccttacattttgccccctggacatcttgcttgctttgtctttgtcacaaccctactgaataaatatgtgaaatcagcactcagatcaagaaatagaattcttccagaccctgagaaacccccagtcttattttacagtcactattctgctcacaagaatattgctatcctgacttctattcgca

SEQ ID NO: 103216 - DNA, 2824 bp, Homo sapiens
aatttataatttttgtctatgatggatagaaatgctttgaatattctggaacatgttttttagggaaataactacacatttctggtgggaatagaattactaggagtagaattgctgggtcaaagggtatgtgtatatttagttttaacagatagtgcaaaatagtttccaaagtatttgtgccaatttacaatcccaccagcaatgtatgagagttgtggttgctttacatcctcactaacccttggcgttttccatcgttaagattttagccattctggtgggtgtgctgtggtatgtcattgttgttttaatttatttaatttaatttattaaactaattttaactaatgaagaggagcacctttttatatgtttattggccatgttgaatattttcttttgtgaagtatctgttcaaattgtttgctcctaccctgcctttttttctcttggattgtctttcaatcctactgatttgtaggagctctgcatatatattctgcatataagtactttgttggatacatgtattgtgaatatcttcttcaaccttacgagttgttttcttaatgaggtgttttataaacagaagttctttttttttttttttttttttttttttgagacggagtctcgctctgtcgcccaggctggagtgcagtggcccgatctcagctcactgcaacctctgcttccctgattcaagcgattctcctgcctcagcctcctgagtagctgggattacaggcatgtgccaccacacccacctagtttttgtatttttagtagagatggggtttcataatgttggtcaggctggtctcgaactcctgacttcgtgatccgcccacctcggcctcccaaagtgctgggattacaggtgtgaaccaccacgcccagcctaatttttgtatttgttttagagataggatttcttcatgttgcccaggctggtctcaaattcctgagttcaagccatctgctggccttggcctcctcaagtgctgggattataggcgtgagccatcacgcctggcacatctttgtctttttctatttctctggtttggtttgtctttctgattccaaattgtacttccataaatgtatagacatgaatatcctacaggtaccttagattcaacatcttcaaatggaattttaacttctgaccaaacatgcacttcctcatcctaggttccttatcttggtattgcaccatcacttttctaagcaacccaaccaggaatatgttcaactgttattttctcctcactttctacattcttttggtacaccatttccatgtgttttgcctttgaagtatttctcaaatctagcgctgttaccactgtgctgattcaggatgtcatcattgctttcttggtgatagttgagtcttctaactgggtctctttgatgtcatcattgcctctccagtttgtcttccagggtgccagagagtgaggcactcaaatatttcaaatattttaagttgatttattttgtgtaattgcaaagggcagaatgagaaccagtagatgaaaattatgttgattttggctcaatagaaggaagaattttctctttacaaattttaaagcaatgttattataacattaaagtaatttaaaaaccaatggaaatcttccgccgtcccaccatcctatcaatactgtttttatttttatatgtcccatcctctccagtattttttcattgatttatatatttgtatatggttttaatcatggtatatgtgaatttattttacttttatacttaacattattgattttgtaaatatgttccactttaatctttatatttttaattttaatgacttcttgttttatttaggcactctaccatttccctactttgaaacatttaggttaattcttgattttgctattataaagtattataataaatacctttgcacacatgaaagcatttaaaaaatttttctacgaatatagtatcaggagtgaaatttacagagcttcaacatttgtatggctctcaaatgagtagtaccaaatcattttccagaagctgccagcttctccacctcctcagggtggattttctaacaatgataactacttaaacctggttgccttgtgtgggggtgagctccagtgtcaccagctgtgctcaagtgcagatatacacgtgtgttcaagatagagtatatgattagggtgttgcaaaagtaaaatcatgatttagagggaaggttgaactagattgacctctaagatatctttcatgctaagattgtctgggatattttttgaatccctattaagagaataatgccctggccgggcgcggtggctcacgcctgtaaccccagcactttgggaggctgaggcaggtggatcacaaggtcaggagatcgaggccgtccgtcctggctaacacagtgaaaccctgtctctactaaaaatacaaaaaattagccaggcgtggtggtgggcacctgtagtcccagctacttgggaggctgaggcaggagaatggcaaaaacccgggaggtggagctggcagtgagccgagatcgtgccactacactccagcctgggtggcagagtgagactctatctcaaaaaaaaaaaaaaaaaaaaaaaaaaaaaaaaaaaaaaagagagagagagaataaataatgccctgctaagcactgtgaggaaaataaagacatataagatatagcctgtgccctttagaattgtggctgaagagataacacctacataatgtaataaaaaggtaatactagagagtatatgaatgatagaaataatattaactaaca

SEQ ID NO: 103217 - DNA, 1052 bp, Homo sapiens
cattcaggcattcagtatacatgctttcacttaattccttgattccagtaccataatcctgcctcaactgcactttgtattccattatccaaagactttctattaccctctatagagaataaacctctgattttatcctagggtggaagaggaacaactgtttggccctgcaaaactggggagggaatctgaagattccaactgtttcataaatgtgtttcagttggtctttcttattttagctcctctacctaccctctctatctcctcttccaaaagtatctgatgctggaaattatttagaatgacgtgcatttgactggtcctcggtttggtccactgctggtttaggtttcttgggtctgctattttagttatttatcttgcatctgcttcctggcttccaaaatttcattgtcactgtcttttcgcttgttctttctttctgtttgtttgtttgtttgcatttctgccttttaaagaaatgtcttttcctgtcattctagaggggtttttggaggaaacaaaataaatgtgtgtgtcaatctgccatctttatccagaagtcggtaaacatatttataaaaacataaatatgtcaagagttagtttataggacaagcaatgcagttttctttaaacattttggtctgaagtataaatataatactactttaattcatacaggatttctgagaattggtaaagtattgcttaagaatttcaacatgaaaaatacttcctaatactataaaaatactataaaactatatttgaagaatttaagtataaatggcctcagtaaggaatattagctcatagtcctccacttggaaataaacccctcagctgtgttgaagaccattggagataataaatgacattatctgaaaatatttgcatgttttaaaatttcttactcatattatatctttttagaggttgccagaacatcactagtctcagtttaggaaaaaaaatattaataaaagatagtttgaaagatgacatagatactttcataggaattgataagaacacacagagagatc

SEQ ID NO: 103218 - DNA, 1841 bp, Homo sapiens
gtatgctgtcgacttccatatgtgttatcttgagccctgatcatccccaagagctccagttctatatctttaaccttctttcgggcatttgtgctttgagttaacactgtcatgtcaaatccagtatgctcgtctttttattcaccactgccttcccttttccacacatagaacaagtttctctacccagtttccccccatctcagcaccacctttatctcagtgtcttaagttcagaatcttgaaatcattctcctgcattatcctcatttagtcaagtatcagaattcccctaagccttccctttccagcctgttcttactgccaaaactcaagtccagaccttcatcctctcctatctgaattactaccacagccttgaggctctcccacagcctcctggatcctagataccactgccatctactgttatttaaatatgacttttattctatcgcttccctaatcaaaaatatctcatgagtcttatttccagcatcaagtctaaacaccttttcttggctttcgggctgcttgtagcctggctccaccttatctgtcttattacccaacatcttccccttccttgagttaggtcagttttctcactgtcacaagaactggccaagttcatttcttcccccatatcttaacaagtgtattttctcttgtccagaatgcctttctttccattggcccaaatcatatccattttgcaagagaattgtctatgcttcctgtgtccaattccctgctttctgttctctttaacccactttaatcaagcttttatcaccaccactttactattcaagccataattcttatcactttcctatcattagtcactttctcagtctttcccatctcagtaaacgacactatcatttacttagttgcttcaaacctaaaagccatctttagttcttctccctcaaaacctatatccagtccatcagtgagtctagtgagctttccattcaaaatatatttcaaatctggccacttctcactatctcactgctaccactctggcccaagcaaacagtacctctccagtggtctccttgctttcatttttgcccttgcacagtttatttcaccaaagcatctctaaagatgtcaatctattcatgtcacttcactgtttatggcttttaaggccatacctgatctgctctagcccaaggctctgaccttaccttctttcaatttccccttacttcctcgtctctattttctctggccttctttctgtttctacaaaaagctaagctttttgacacctcacttacacatggacacatttcagaatagtcactagataggttagaaaagaataagtgttttcagtttccacaatatttgtcactaaaatatgtattgtattaacaggaaaaacttatttctaaaatctacatttttgtataagtttatttttattttgaaataatctcaagcttacagaaaacctgcaagtacacacaaatcatgttttattttctgagccatttgctttatcactcctgtatactgtactatgtaattcctataggcaaggatattctcctatatattcacaatataaccatcaaaactgaggaatcagctttgattcattactgtcatctaaccctcagattcctttcaagtttttccagttgtcccagtaatatccattatggcaaaaggatccaggttagaatcatgtgttgtatttagttaaatttctttagcttcccttagcttggaacaggtcctcagtccttccttgactttcatgaccttgacatgttttaatagaacaggccacttattttttagaatgtccttcaatttgc

SEQ ID NO: 103219 - DNA, 4088 bp, Homo sapiens
cctgaggccaggagttcaagaccagcccgggtcacacagcaagacctgcatctcctaaaactttttaaaaagttagctgggtgtggtggcacgtgtctgtagtcctagttactccagaggctgaggcaagaggatcacttgaacccaacagttttaaggttgcagtgagagctatgttcacaccactacactccagcctgggtgacaaagtgagaccttgctttttttaaaaaaaaaaaaaaaagaaagaaagaaagaaggaatatcacagaattggtgctgagtaatctttacttccttcaggtggcacatgattttgatttgtcccatttcaattatgttttatttggtcacttgattaaggtggtgtctgccagccttctccactgtaaagttattttcccctttgtaattaataagtagtttatagaagagtacttagcaactatgtaagttatcctgatcctcatcaaacttcccatttattcacttatttatatcagtatggactcatgggtctttattttatctgttactatcattatttattttgatgctcatattctctaagatgttgccagtgggagcctcttcaagttggctcttgtattctttgacatgtccctctaattaagcacttccttacatcctgttacaagctgttccagactcgtcttgtgttttccctgttccagtcctggaatcagccatttcttcaaggatccctggtttttcagtggttccttctaatagccacaatgtggtttctctcagtggacagaactagagaatatatgtatgtacacaacacacacacacacacacatctatatttatgtatctatatgaaaacccatgatttcacacctataccatcaatgccaatccaatgctgtagaattcattctagctttatcactttctatatttgtaatttttctccatcagtgagagaactggctgccattatcattagcttattaatttatttgatcagttcccttaaatgtaaccaaactcccatctttgccaccttccttgtacacatatagacacccatatcacacctctaggactcttgactctactccccagactgcctcctcaccctgctcaagctttgacactctgccttgggccttttccccatgtagatgaccctgcttaccctgctcaggctccaactctggcattcccactgtgggtcacccacacttgtgatgccctcgttactccatttggcactgactccccaagccatgctcgccctccacatggttgccctcctcacactgcacaggctctgatacagatgcttagcttgctctgccccacctgacattggctttaggattgagctgtttctcaagaattgggaaaaggaagaagtaagaccatattttatttagaaaatgcttcctacctagtgtagctttcactatgagttgagaaggctgtaacatttctgttccctttgacctaaaaaagcatatattattagtattcatctgccttaaatactgtagcaatcagtggaccaagagccaaatcatttttgaaagaacacctaacctaaatgaatgtagaaacaaaacaaccagataaaaaaagaaagatttcttcacattttttcatcttttgttcaaatgctttggtattatggacacagtctcggaatcactgttaagtgctaatgattaataagttcatgaaccttacattttgaacagggtagtttctgatgcctgacgcccttggatcaaaattaattgtatcttttaaaactgagaaatgaaaatatttagtcacaataacattactgtcattcagtcataccacaagattttgcaaggcaatatctacattgaattgattgtcccttgaaactttagaactaaaacctctgcaagattgtccttgataatcttttcacagcaataaaagcactgacgaagagtcagggcgttgtcatcaaagagactaaactgctgcagactacaactttcccaggacaaaaatattcaagtttgcctccaaacctcttcaagatataaactaaccattccaagaagtagctttttcattcctactgttactctaaattgtctgagaggcaaatttagccttttttctaaattaagatatgttattattgggcttttgtttaattctaagccaaaatatacccaaactcccactacattccttggaagctgtagatgctgttgaagtgctctcttggccacatctcactcctttaggagtcagcactctccatctgtatcctcttggagaccatgaaagggaaaacagcctctgtgacttctccaaccaggtgggtcagattagctttacagtccacttacaaggagactaacaaagctcctctgtgggtgtttgagcacattttacaaaactgctgatgacctcatgagccaaagaaaccaggtctcacattgtggactaagcctaaatattaatactactttatatttatgtagtgtcttttttccaaggaactccagcctctttacagacattatgtcactaatcctcaaagcatccctgtttggtacatggcaaatattatccccctccctttttttttttttaacagtgatggaaacttgcaagttggtgatggaacccagccccctggttcttagtctatgcactataccataaaaaaagtcagacgaatactttttcaagctattcattgcttcttgggtgggatttaagaggatgtcttggcttgtatgcatttcagttttcagtgtctctagcttctgtgatcctctttttcttcttcattgtaagtcaagcatgttcaagcatatttctcttccactgttgcatttatgggaacactagaagtttgtaactgagatttgaagtgaaagacttcggtattgaatatgtaatttcacttgtcactcagagatcccttatacttctcataacctaaaagaaattagattttttaaaaaaattcaccatgccagcttagagcacatttcatttatagcaatcacattttcaccaaaattaggtaatgttcaactaaatacaaccaatttgtgttgaattattaacatgtaccagatattatatcaaacattttcaaatatatgatcttgttttacatatattaacacatatgtaatattccatgtgaacctgttagatttaattcttaagtgtataaacactctcctagagtagggcaaagaaaaaaaaagaggcattaatagaaatatggcctcagttgttatatccaataaaaataaaaataaaagagctccctcaattctctcagtggaaatccccagtgtaaatatttccacaaaagaggaaaatgtgggtaacttctaaaaatcaccaggagttagcttcatatccacaaagtaaaaaaaaaacaaaaacaaaacttaaaagtttggttcctacataatcaacaactatacaaagcataaggaagagaataaaacacagccatatctaaggatgacaaatatttcttgatttcacttggttagacccttcctaatcaggattattaaaaccaggaattatgaactgtagtggtatagcttgctcactctttctttcctttctttctttcttttcttttcttttttcttttctttctttccttctttctttttctttctctccttttccttttccttccttccttcctccctcccctcccctcccttccccttccccttctccttccttccttccctccctccctccgtccctccctccctcccttcctcccttcctcccttcctgtctctctctatctctttccccctccccttctctctttctctttctttctttctttccagggtcttgctctgtcacccaggctggaatgcagtgacatgatccacagctcactgcagctttgacttcctgggctcccgcgatcctcccaccccaggcttccaaggagctggaaccacaagcgcacgccaccgctcttggctgatttttgtatttttggtagagatggggtttcaccatgttgcccaggttgatctcaaactcctgagctcaagcaatctgcacacctc

SEQ ID NO: 103220 - DNA, 2205 bp, Homo sapiens
aaatagtaaagcttttgaaaatgctcattttttttttctgattcactactgaagaccagttgtgagctgcaggagggcttttattatttttcctatttttttgtgtatatgcaaggtccttagttttttcctctccatgttgtttccaaaagacttccttactgactgagcttcagcacactgctctggcattctcccagctctaagttttcatgagtcagggaaaatgtgtgcactctgaaaagaagcttgtcagacatgctcagccagctgacatgaagtccctctctccattcttcttttccatccacattcttacagcctactgcttgtacctttatttagccctgacttcatcctacctgtgttggatgttagttagagtttgttgtttacatatctgtgttccttactaccttgaactctactgcccatccctgctgtcctgctgccactgtgccctgcccttatcaccaccatagcacttagcatggtgccttgaatcttctgcttgtctgaccctcctcttttacctttccattctttggttttctttcattttctttagtcaggaggaaaatatgtattctctagatggggagaataactggaggaatgggaagaaagctcacctccgtaaaagaccaagagtggccctgcagttagttctgttacttggtcacaaccctccatttcctcatttactcttactgtggccaggcctggcccagatttaataaaacaacttgaagagggtgatatcatgaattttattccagttttaagtttttagtgatgcagttgattttgaaatgacaacagtacagatggtttttgcaaggatgtaaaagaaactagtaacagtgattgtcttttagaaggggacttgaatggttctgggatagcagggaaagtttcactatatacctttatattaccttttgaattgcatattatgtaaatgtattagctattgaaatagatacataaaactaacaaaaatggaagcaattaaataactatagttgaactaaattgatgctgtagaaaattctgttaattacaacaaagtgtttgaatatattttttcaaagctagatcaggaagaggagaggtatgattattctcattttgtgttagaaattttgaaaatgtttcatcatttcctgcataaataatatgaaaattaagtttaggtgcatgctccttatataaaacttatcctcactctgaacactcaactacttcactttaggggttttctatttctcttcaattgaatttagggccaatttaaagtgaaaatctgacttcttagtgactgtatcttgcaactctgcctctgccttgtgtggaggaactttactggggaggccagagttcctaagtgttatctactttggtctctccttcctgccagcaagagtaggcagttatgacctgaggtttagatattgcaccaatagagatcttccatcttagacaattttcataccaaagtggtctttttctgatattttataggacctatctctatagtcatttctgtacttacagttatgctatgttcctctcaacacctgctaaagcacttatagaggctcatgttcaagcaaatgacctacatagcaagtctgtgagaagcagggtattgcatttccaattctgtatctattatctgttcatctcttttttgaagaatcagcaaatgtatgtcaaactttagtacatctaatgacaccatcatgtcattgcctgtaaatttcctctattcatgccacaaaccaagaaacaactttttcatttttataattacttcaagtatgtgcttgagcgtgtttatgtatttaatgtatccacctttaactaccacggaattcataattatttactcaggcatttgaaagtaagaaagtaactgacatttttctattgaaaagtatttaataatattttagaatattttataatttttaaaagcctaataaacattatttttttaaatgttcttttttacctttgcaaataaagcaagattgcaaataaaaagatttttacactaacattttttatcactttgaaataaaggggataaaagagattaaagtaataaaaatgttgattattataaccgtgtcaagtaatagaaaacacaatttaaacaataaacacactgatatgaaacttcatatttttaagtttaat

SEQ ID NO: 103221 - DNA, 1157 bp, Homo sapiens
ctgtcgcccaggctggagtgcagtggcgcaatctcggctcactgcaacctctgcctcccaggttcaagcaattctcctgcctcagcctctagagtagctgggattacaggcacccaccatcatgcctggctaattttggtatttttgtagagacagggttttaccttgttggccaggctggtcttgaactcctgacctcaagtgatccacccgcctcagcctcccaaagtgttgggattacaggcgtgagccaccacgcctggcgatttgtggacatcttaaaatcacaaatgcaataatattgtcctttttttaaacttacttttttcacttaacatacgtcttacagatttttccctattagtatacttaaatgaacctcattctttttaactgtggcatagtaatccttagtattaaagtgttctaggtttatttcaagttttttatattgatgaacatttaagtttttactttttcttaggaacattgcttcaggaatgtccttgaacatgactctttgtgcatatatgggagcatttctctaggatagacacctagggggccagaagatatttgaagtttttgattatctggatatagtcctgttcaaagattgtattacctcagaaaagatgcttattttttatggttttgtcatttttataaatcatgtgctgattttcttttctttttttgtttttttgagacagggtctcactctgttgcccaggccacagtgcagtggcacaatcttggctcacctcaacctctgcctcctgggcacaagcaatcttctgccacatcagccttctgagtagctgggattacaggcatgtaccaccacgcccagctaattttttgtattttttgtagagatgaagtttctccatgttgcccaggctgttctcaaaccactgagctcaagtaatccacctgcctcagcctcccaaaattctgggattacaggcatgaaccaccacgcccggccatgtgctgacttttatttttatttttatttttatttttgtgttggtttgttattgtggtaaaatatacataatatataatttgccattttaacgatttttaaggatacagttcagtggcattaagtgtattcacattgttgtgcaactgtcaccgttatccatttc

SEQ ID NO: 103222 - DNA, 1442 bp, Homo sapiens
ttcctcattgaaaatcatttgaccatatacatgagggtttatttctgggctctttactctactccattggtctatatgcctgtctttatgccagtaccacactgttttgattactgtaggtttgtagtaagctttgaaatcaggaaatgtgagacctccaactttgtttttcttattcaagattgttttggtcatttggagatccttgagatcccatataaattttagaatgggtttttctatctctgcaaaaaattttattgggattttgagaaaggttgtgttgagtctgtagattgctttgggtagtattgacatcttaaccatattgtctttcaatctatgaatgcagatgtctttccatggtctcatcattttatacattttatatgttgcttaagagggtcttcccaatgctaaagttataaataatttttttctatattttgttttaatagatttgtagtttgggtttacatatttgtttccttaagttagctgggatatttcccccagtatgataactttttcccattttattggtaccacctgaatagtctgccaattccctggtaattgaaatgccacctttttcataaaccatagcataggtttgtttttagatttttctcttctatttcactgatccatatatctactcttgtgatataatttttaattacctttattttatagtagcttttgatatctggtagggtaactgtttcccctcattcttcttctttttgtttattccctttatttttattattattattctttttctttattcttcattcttcttctttttttattctctttattattattattcccctcattattcttctttttcattattctttttaaggttttcccatatattttctctttcagatgactattagaatcagcctaacaagttccaacagacatattattggaattttgattgagattacatttatttgatgaattaatcttgggaaacttatttttataataatatgcctttgtgttttgaggaaacattatttctagtatctatattcctattatcaccataatccctaagaaattttctatttacttgtataatattcaagattgccatgtagaatagctctgtccaatagaactttccatgataataaaaatgttctgtatctgtgatgtcaaataggtagccacttaccacatgtggctattgagcaccagaaatgtggctaatgcaactgaggaagtaaattttaagttttatttcattttgattaaatgtaaatggccacatgtagctaatagctatcatattagacagtacggcttttgaatgtatgaataaatgtgtaactgaacacttttgtaagtagtagaggtagtgtagcaaagaattattgatacctactgtgtgaaagacattgtgtaaagcattgcagagaggc

SEQ ID NO: 103223 - DNA, 1030 bp, Homo sapiens
acatttagggtccacctgcataattaagaagaactctccatttcaagatcctttattacatctgtagagacgccccccttttatatttttgccatgtaaggtcacattcacaggctgcagaatttaggacatgaacatctttgggggctcattttttagtgtaccacaaatatccaatttgcctggagttagggattcctgtggcagtaggaattatgataactgtcagtcactgaatgacttgcacatgtgagaggttataccaagtgctctatctgtgctattccatttactcattacaagaacattgtgtaggcattaggagacgagggatgaatctaaggtgactgttttccacctttgatgactaggaaatgatgatttacagaaattgtagagtcatgaggaaaaattggttacaaaggaaaaacaataaatttgactttggctgtgtttagtttgaagtcccaataggctgtgcccaaggaaagatcaaccccaaatagaaacttaagggccccacgaagaattcttatagtctcttctataattttttaccttgttttcccctttgggttgaagaaacaaattataaggagcactaaacttgaaatcagaagacttgggttcaaaacttgcacttactaaatgtgtgaactagataagtcatttcacttctctgagcttcagtttctacatctgtacaagaggaataaccactccccctcccatcacacacagttattgtgaggaataaatgacataacatatgtgattttttagtatatagtctgttgtaagcattcaaatgtttcatttgaaggtaatatgtcttaaagctatctggatcctaagtaaaactctacattatttttacaaatctatgatcaactgcttttcccattgtccaaatgaccattctatacttttaccacttaagtgttttaagtgccacccaagaccaatttactccctttctaagcagatgacctaaactctacttcatagaaataattaaggccatcaaaca

SEQ ID NO: 103224 - DNA, 3666 bp, Homo sapiens
gtcaccggcattaccagaaacttgggtaatttttgtcatgttttactcctttctttcctttactatacctgtgcttattccaattaatgatcaagtcatggtagggctcaggttcaggcactcattctgtctctcctgagccctctatccttttaatgttttccctctaacttcactgcggcttttggtcttgctcagatcattcattttctgaagtagcctcattgcttctcgtcttactcctctccaatccacccttcacactgctgccatagggatctttctaaaacagacctactcttggaacccttcagggctctccattacagactctcattacaaagtccaaactttaaagaatgacattgtctgacccagcccaccactcccacacccttcctgttagccccattgagctatacccaattccccagaggtatcctgctttatatccctgtacctgtgctccttctgtctaaaatgtgttatctgcaaccccatttcctaatgctgtttgcctggtgaatgtctgctcatcttgcattacttagttcaagcttcatatcccttttgaagccttgccaggcctccccagaaagaactgataagatctttttggaacccctgctgtaccctatatatgactctgtcatttcctctgtaacctgtttgtttccccgtaccaggccttctttgaggacatgaagtgtcttgatcagctttgtatctttagtgtttaacacaatgtctggcacagagaaggtgcccaaaaaaaatttatcaaataaatgaattaattataaaacttttaaagttatatgatgccttagagaagggagtaaggaagaacttatgtaacaacttttggagataaatggaaatatctgattatgagcctaagaagaatacacatttacctcctaagtagagatagtcatggtccagaactctggtcacaaactacagaagataaagaaattaattgaatgggcaaacccctcataagtcccagtaaaacatgagacacttcccaatgcgctcttgatgtgatttcctccatccttagatccagttcacatagtcaacacctggtgaacatcttcatttggatatctcacatctaattcggaatcttaaaaacagagtcaattatttctccatctatcttccccaccattttcccacctctcactccctcaacttcttctatttccaatcttggtcaatggcattaccacaaacttggataatttttgtcatgttttactcctttctttcctttactgtaccaacatatcaagaaagcttacagctccactggtgttggacataagtattctctcaaagcatttgctttcttactgcttattcatcacaatgttaacataaacttcatttacgttaatagcatttattttataattactgttgatctacctttcattgtgccaaaaatataaatgttaagggaatcaaaactaacatcagtggtataacttacttttagggacatagatcctttgaaccatggaaatctttgatctggaaactgccaaatccaaagattctagacataaacttaactacaaatttatactggtgaggactggttttctcaagagaaaacattttgccagatctgacttgaaaaataattttgaagtgagcaaaattcactacactcaccccaggcacacaactcactgtatttcctggctgcctggggctgccctctcccgtggttccccatgcaggtctacctcctcatgcaaaacaagtaccgtgccctgaactgcctttcctgtgtcacaacatatctgtcttttttccaaagcctgtgaggctctgcttttagtaggctgacacttggagaccacttggtaaattcacttacactaacataatattaagtaaaaattccaggggaatttacatttttaacaggagtatgttggatgcataatacctaaccataagagctaatctaataaagggacatttcctaccatctcatatattttccatgtcttttcatgtttcattgtctttaaacatattgaactttctgcctagaataacctccccctgctcccaccaccatttccagtctggtgaactgctgctcttccttcaatacccagctcaatgtctctcttctaaggagccttctctaaattccccagcctgagttggtccctccctctggacttctataaaactttgtgtacttgtctcaatttctttagtcttttattcactcttcaaatgacttcaaggtgacttctaccctcaccaatccaatgcactaagtaaaccccatgtggtgaaatcaagtggacatatttgagtcctcatcttccttgccctctcagcaacacctgacactattgaccaccaccttttaatttctccactccctcttcttaaaacccccttcccctgactttctcaacatgacagtctgctagtcttcttttatctctctctttctcagtctactttgttggctcatcctctaactaatctctaaatgttagatttctttaggctatgtcctgatccttttcccttcccacactctgatctttcaataagcaaactcttccacacccatggcattagttatcctccgtatgcttatgactttcaaatttacatctccaacccagacctctttcctgaatttcagacttccacagatagccactgattcagcatgtccacacgaaggttttgtaggcactccaaattcagcaggttcaaaactcccattgttctcgacctgagagaacagcaactccatccatgcagttagccaaactagaaactgggaagttattattgacccatctatctctctcttaccatggtatccaattggccatcctcctgactctacctgccaaatatatctctcaattttaacttctctccatctccactgccatgcaagttatcacctgtctaccactataacagactcatcacttgtatctgcttgatgtctccaatacatttctacactgcaggcagagtgctctttgaaaattcattcatcaaaaagtatttattgaacctttactatgtcaaggcacttgctagatagtgatacaaatgtaaccaagacatgtatgttcctaatctcctagaactctatacagttctgtgattgggagacctaacttatgtgggatggagagaatttctctgaggaaataatttttttaatctgggatctgaagaatgagtaggaatcaactaggcaaaaagggaaggcaatggaggggaaagaacattttaggcagaaggaacatcatgtgcaaaggtttagaatcaagaggaagcaaggtatgagaagcaagatatgaggctaggcacagccagggcctgaggagtcataactctaactgggaaatactcaggaggtctagtagctcctcaaacagcctgccaaattagattagtgagtggaggtgtgagcatttttctgaggagagagtgcatagctttcatcagggtctgtgacactttccctcccctgaaaatgtaaagaactatgtctggggtatgaaagaccatttttggactttgtcctaaaaacaatggatgacattggaaagtatgaagccaaaaagtaacatggccagattgtaaaattcatggggc

SEQ ID NO: 103225 - DNA, 1043 bp, Homo sapiens
ttaattagatgctagcatgagaatgatggagtagtcatggatgattctctgatttttaacttggacaccttgggtgagtgagaacgaagattgggaacaggcttagagaagcagatgatgaattccaatttgggcagactgcacttgagttttctttggaatacccatgtggagacttttagtcggcagttggatacacacatggatctgaagttcagaaggaagatctaggctgtaaacataaatgtgggggtctttgcttatgaatggtaattgattcctagaagtggatgagatcactcagggagggtgtggagaataaggagaaagacagccaaagacagaactttaggagaacattcaagtaacaagcatttttaaagggagcgaataaaggaataagtgattaaaaagagtcatttagaagaagggatcccttctaaagcttcccaaatactgctaccaaatcagctggctatcctatttgtgcttaaggcaaagcctactttttggctccccaaatggagaatgtgttactaaaccaaagatggaaagtagggcaacatcatatacagaaagcatatcttcagggcttttttcagatacatatgtggatactctactcctgaggctctattggtaaacagatcatagtagcgtcttgttagtctgcatcaagaaacacttaataattaaaaagaaacactttaaaaagctgtatgtttaaaatataatatgaaaagtattagaagtcatttgatgatcatctgatgttcagatcaaccagataatctttctagcctgcctgatgagtggccttttgcttggcttgttggctttggcgtcaagtgtacaaactcagccagttggaatacacctgaaaaatgtttctcaaatgttcctttgtgtggataaatttgttggtttatatagtgtgtatatgttatttgtctatgttaagaagtgtcccctggctgataacatacttgtttttcagcccacaaattttctatgaaccattgagagttcccaggcctcactat

SEQ ID NO: 103226 - DNA, 1980 bp, Homo sapiens
acatagacccaatgggaggacatcccagggatgcggatttggcctcaacctattaaagaattttcccccaatgctctagcaaattgcctggcacatggaaggcaatcaacatttgactgtttttgatagcaatgaaaactgtcagatggtgactgcttctggctgtaatgagttccttatcaccggaagtgttcaagactagttgtgcaagatgtccattcggataagaattgaaccaactgaatactgtagtctcttctagctataaaactcagtgacacttctataaatagttgaatttcaatggagattttagagcaaaggaacattttatcaatcctttttccaaaaggcagcaaagtggttaaaactgagggttctggagttagacgttatctgggttcaaaccctggtcaccctacttactagctgtatgactctgttcgacaattttaatgttttacttgctatctctgtacatcagcttccttatctgtgaaatgggggcaatagtagtgtctttctcacagagctattgtgagagctcaatgagttaatacaggaaaagcacttagaagaatagctggcacatagaaagttaatgttcaataaacattagttatgaggtatcatctgatacccttgccacttctacagctttttacgtcttttcagtatgtggagggaggtcctttgtagcataattgaccctgaccttgttttttcctaaatcagatgccagccatggccactgtgattaaccagtggactttctatctcctaaaagcaagctttaaagctaaacaagcgacagggctggtgacgtgcagtttatgaaggatctgccaatgaaacacaatcatggctgtggacaccctaaccctgctatgtgcctgacaagtgatagataaccagtaaatatttgttgaatgagctgggtgcagtggtgtgtgtctgttgtcccagctactcaggaggctgaggcgggaggattgcttgagcccaagagtttgagaccagcctgggtaacacagcaagattccatctttaaaaaataaacaaataaacaaaaataaaatatgtgttgaatgaatagattaactcggtagggttttattatttttatttatttatttttgatcaggtaatacattcacatgatttaaaattcaaaaggaacaaaaggatatataaagaaaaacctccctcccacccagtccctcagccatccagtttccttccccatagggaactaacataaacgctttctcatatgtctttccagagctattttaggcataaacaagcaaacatacttgcttacgcacatttatttctttccctcccttttaaacaaatggctcatatactgttctaggcatgattattgaagtagccccagaaatgggagtgagcatgggtacgccaaggaggaattaaaaaagaaagagctcagggacagaaaaatcaaccaggagactattgcattaatacagatgtaaggcgattagagcctggactagtatattaaatgggataatcagggaaacaattgtttgaatgttttttaacttacactggggtaaccactatatagagtatttctgtcaccccagaagttcccttgtgtccctttgccgccagcccaccctccccaggcccaggcaccaactcctctgctttgtcagagtttttcagctttcgtgttacaggcctgcatgcccgtggtgggacctccactcagcagagttaatcacaataccagtcaacatcagtggcacttactccaggccagacactccattaagcacctacatgtgctcattcatttaatcctcttcaccaactgaagcaggtactgcttttatctcaatttctgataagatatctaagatacagagaagttaaatcacttgatgaaggtcacacagttagtacatagcaaagtcagaattttgaactcagaacaatcggcttcca

SEQ ID NO: 103227 - DNA, 1115 bp, Homo sapiens
aaggaaattatataaaggtcataatactaagagaaaagctttaaattgtcatttccaataggacataagcctcctaagaaaaaaacaaccttgtgtgtttttcttggggggggaggcatatataaataacaatcaaaaatctttttctttcttgatttaattttaaaggtgatagttaactaaatcactttaaaatgacttcctgctgctcccccaacctcctcaaaattaagaatacaacaaatatttgcataggtttattattcacatttaatcatgaataattcactttgtacagacagctgggtaaacaagagatttggagtttcctttttctagaatatttttccattggctgaaaggaaacagcatcagtggtgattttatatgattttcagtgccatcttgttttctctcctctggataggagacccctcctccctccctccttctgtccttttttttttttttttctgtttacttatttctgccagcttttgggctacacctcatcaacataacatttttcattacaaaatgaaaaaatagctcaatcattcagttttttattctgcaagacaacataaagtgtttgtttctcactttccacaatattagagtttttttaaactgtgggtttgcttttgtgtgaagaccctcttactgatgggaaaatatctttcagaactaattctgcctcatcattacctcctccatcttttcctatcagccattaacaatttcacaattatttgactgtctgccacaaagttggttctcatttccctctgcacctcccaggcctacgtgaggaagtggagcacgtatcactgaacataggtttacccaaggctatcaactcttgggcaaggggggcataatttaccaaaggtcaaggatcctttcagttctgtgaacgtcattaatcaaattgcgatagtataacctgtggtttaggagacaataaggcttgccataattcatctacgaccaaagaaggggttgggggtgggggggtcatcgtatatctttgggaaatccctgcattttgtcatggcctctgggaagtaagaattttcgacacccaccaaatgtcaagcatccactctaactac

SEQ ID NO: 103228 - DNA, 1138 bp, Homo sapiens
agcctgggtgacagagcaagaccctgtctctaaaagaaaaaaaaaacgaaaaacaaaaaagctgtgtttcaggatggcatttgggtaaagaggtcaaacactctttcttttaagagcctgggacatttctttttcttcttcttgcttcctaatcagtggtttcttgcccttcataggagcccagggcacggagtgtctgggcctggaatgcggacatgtgtgggagggatgcgaaactgtgctggcagccccaagaaaagaatcagtctttgtcctcatcttcacatgcacctgtcgtcccaaacccttgacaaacattgtgtcattcaccttccaaacctctctgcggattcagcctgggcgggcgggagcacagtgagccacattctctgcattcccgcctcctgacagctcctggtaccacagccgctgagctgggatgtccaaacattccaactgactcatccgtgggtgagcaaggccgacacgaggggacgggtggaggctgctggggctctgtctctgccgaagtccctaattcagagaagaaagtggggcgggtgggggaattgccgggatatgggccatttcccttgaatgatgctcgggtgtcacttgaggtgccaggaagtggtggcagttgcagcacagtggccctggtggaagcctgggctcagacctcacatacctagatttgagttctggctccatggtcagaattttgtaacttcatcaaaactctctgagattggccgggcagagtggctcatgcctgtaatcccagcactgcaggaggatcacttgagcccaggagtttgagaccagcctgggcaacatagtgagacttcatttttccaaaaaggaaaaatattagctggggatggtggcatgcatttgtagttccagttcctggtaggctgaggcgagaggattgcttgagcccaggagtttgaggctacagtgagctatggtcgcaccactgcaccctaacctggaaaacaaagccagaccctatctctgaaaacaaaacaaaacaaacaaacaaaacaaaaaataaaacaggccaggcgcggtggctcatgcctgtaatcccagcactttgggaggctgaggcaggtggatcacgaggtcaggagtt

SEQ ID NO: 103229 - DNA, 1027 bp, Homo sapiens
cgttctggtcctagccgagctccagtttgtttcgtgtcccttctgtctcaaggacttcaatcatgaaacccacgtgtgtgccagaaggacagaaacgtcccctccgggatgctcccaccggctgcgcagctggctttccgcggaaagggcggagcccagggagggggcgcgtcaggggcggggcctggaggagtcagacggggtggggtctatccccgagccagtactaaaaaaggcggagccgttcggggcggtctcggtgggctggctggaaagcgggatgaggttctggcgttaggaggaggcgtgaccacccaataggcttctcttcccgcggggcgtggccgtcaaggagccggacgccgcgcctggctgggcgggtcagcctcgcagcgggcggcgtggacgcggcagcgcagcggctcctttaaggctcgggcaccacccccgccgccccgcctcccgtgcggcctgggtctagttggcggcggggtcgggtccgcgcgagccgcgatggagctgcacatcctagaacaccgggtgcgggtgctgagcgtcgcccgtcccggtctctggctctacacccacccgctcatcaagctgctcttcctgccccgccgcagccggtgcgcgcccgggttcgggagcgcagataggggctgggggctctgctctcgctccgggccagggtcggaggattaggatcgccgtaaggcaggcaggcaggcgggcgggagcgggtggggaggactctccccgtccggccgccatccggcctgggggaccgccgcctatccggccccgtgaggccccctcccaggggcaaagcgcaaacagcctgggatgggcaatgcttaactcagtagtgtcaaatgggggcattcctacctggtcactgcggggagctccttccaggacgcctcccttcatgtcagaggggctggactagggggtccaaggtccgacgcccctggggctgtcgccgcgggtgtgaacctctcctccctccaggagtggaggggtggag

SEQ ID NO: 103230 - DNA, 1240 bp, Homo sapiens
gccaaggctatcttggatgcagaacctggtccccggcctgccctacaaccttcaccatccatccgcctgcccctagatgcccccctccctggctccaaagccaagcccaagccacccaagcaggcccagaaggagcagcggaaacagatgaaggggagagggcagctggagaagcccccagccccaaatcaagccatggtggtggccgctgcaggagatgcatgtcccccacagcatgtgcccccgaaggactcagcccccaaggactcagcccctcaggatttggctccccaggtctcagcccaccaccgctcccaggagagcttgacgtcccaagagagtgaggacacctacttgtaaccctggcagctaaggcctccagggcggggtctccatataactacacggttcatgaactgacattccacatcctgcccaccctctgagggccaagctgcctggccactgggctgggctggagtctggctggtccaacacagattctgcctggtccaacacagattctgcctgagcctccttatttattttctttacagtggcactcaggctggcccagccagggcaggcagaagctagggcctggggggtggggcctccttcagccccctcctcctgggggatgctccccagggttagggtgctggtgtgaggggaaagggtggggtgttctttgtgtaaaatagaaacatggttttgtacagaaataaacagccttgtatagagagctcgtgtacagctaggggctgggaagggggtaccaccttggtcaccttggtgctcagcatctcttctctttgccctacagagccccttctcctgggccccagcccagcaccagagcctctctgagaggtacctttgccagaggacatgccaagtccctggtcagcccccattcttaacccccattttcactcaccccatccccactgccttatgtctaccttctgccacagatgagggacaccagggctggagctcagtgctgggcagagcagggcgtgctccctaggccttggtcctcacccacccaccaagggggcagggactcctaaggaggaggtttcagggtcttcctccttcaagtcctggcctggatgctacctcaggctccagtaagtttctgagagctgattctgggttggggtcagggacggggcccggagtggagcaccacgaatgtcctcacaggctcagcccaggccctcagggagggggg

SEQ ID NO: 103231 - DNA, 1048 bp, Homo sapiens
ggctggacaccctctgtggcccctccaggcccttctctcatagtaactcctgcccaggttaaaaactttccggccttctgttgccttgaggctgaagtcccaaggcctgccagggttaggtctcctgggttacaatgttatcccttctacactgactttcatctcagcctctagctgctctggtcactttgcagaattgaagttcttccagggcaccaagttcttccctcccttcgccttggccttgtcctaggctaaaatctgcttggaagctcccttccccgtgctgtcccctaaaaacttctcttgtccttcagcttttagccctcagggagcttccttgaccctgacaggcgagaccctccagcacatgcttgagagcagtcctgctccagccttgttaggggcattcagcctcctccccctcccctagcctcttttgctcatgtgcccttctcaggataagctccctccaggggaccagctggctccgctttgctcatcattgtatcctagcacctggcagaggcagacaccctgcaggcggtagctgcctgagcctgctgggtgctgggtgctgggtgctggggtgtagtctctgccctggctcctgcagcccacggtcatggtcccgtggcctcgatgtctccctaggaggcgatccagctggacggggagatccttttctcgctgttgcagaaggtgtcgccggtggcccacaagcacctcagccgtcagaagatcgacccgctcctctatatgacagaatggttcatgtgcgccttctcccgaaccttgccctggagctctgtgctgcgtgtctgggacatgttcttctgtgaaggtactgggctgggcttggggggagcacccctgtccccagcagcccacagtggggcctctctttgcagagaaaccccaaaaagcttccttgtacttactgcccatcccccatgcaggggtcaagatcatcttccgggtggggctggtgctgctgaagcacgcgctgggctcccctgagaaggtcaaagcctgccagggccagtac

SEQ ID NO: 103232 - DNA, 1970 bp, Homo sapiens
cctgcaggcaacttgtacttaaaccaacactcccatgaaggtgcctgggccacacctttcagcacattctggttcctctggtgaatactctgcttccctgctcagccctctgggcttcctccttatttattttttctttcttttttaaaaattgaggtatgaatttacatacagtaaaatgcatagatcttgaatgtgcatgcagttcagtgagttttgataaataatacacatccatgtaaccaacatgcagatcaaggtagagaacatttcaaatgaccaagaaaagattttcctttttgtaatggctttgttgttttgtaaaggtgcacatactgaagcgttcacagaagttcaaagaaaagagtaaaactttgttgaaacctcggcacccagagaagtatctgaggttaatggtttgacagatgtcatgtccttccagaaagagctctgtgcagatctcacacacacctggcttcctggatagttgacgccacctgcacagggaggcatgtagctgaggagctgggatggacggctttgagtcagacctggcttccagtcccagctccaccatttttctagccagagttaaataccttgacatgaggccttgacattcagttttctcatctgcgaacagggtgtaatgataggtcctatctctggaggttggggagcaggatcagtaaggcccacaggtaccctgtgcccagcttagcgcctggctcagagaagtgggaacagctggtagctattgctcagagaagcagccttctgtcttaaggatgtgacataatgtatctgactcccgaatgaaatgtctagaggtccttccagccgcagctggagtggacactcttgccctcatcggtcttcctagagccaggtttaaggtttccagggcccttccctccttgcccctttgcccctgcccaggcattccttacctgagcttctcttcctgtccttgggaaggcccagtctgtgatgggcttgggtgggcactgcccctggtggagggccccctcccctaatccctgggcagccgtgtcctgtcagcaaagcccacctccatcctccccagcccctaatttgtgcccttgcttctaggagctggacatgtcccctggggaccccaagtggctggacgtgattgagcgtgacctgcaccggcagttcccattccatgagatgtttgtgtcccgggggggccacgggtgagcaggctgggcctcatgaggtgggaggtggctctagggcctgtctctaaggggtctaaggaggtacagtgagttcagggctttagaagctcggtgcccccaactccactcttagcatttccctttttttggtttgagtctgatgtgtgttctcagcatctcctcttacctctgggggggctttcctcattgactccagagtgctagagcttgtccagcctggccctcttccggaaacaggttttgttggcgagaaagagggatagagggaattgggtgagtggagggtatgcaggggagagatagggcaggcaaggggaccaagacagatgcagggacaaagctggcccggccaaggggccatagctgctgagtgaggggcccctacttccagccctgacatagctttacatcccgccctggccctgctccctgttttctctttgagcctctgccctcccctgtcatgggggagaccttccccacctccttccttctgggcacgtgagagtccatgtgctccagtaggagactgaccccttggtgaccacaagcagatcaccttccctctcaagggaggggcagattctgaggctggctggtccactggggcataggtgaaggccgtgggtagcagagtcaccccggtcatcactgctctgcccggcctctccacagccagcaggacctattccgtgtgctgaaggcctacacgctgtaccggcccgaggagggctactgccaggc

SEQ ID NO: 103233 - DNA, 1033 bp, Homo sapiens
tgggctcagctgtccttttgattttcagattcgtctgcggtgccaaaagggcatcccgccttctctgcggggccgtgcttggcagtacctgtcaggaggcaaggtgaagttacagcagaaccctggaaagtttgacgtaagtttcccttcctttgccctgccctcccttccgcatctcttggcgtcctccccatggcggcaatcctccatgtgctcacctgaacctcacaggatgagcagtccatgaaacctccagtcatgtgcccaactgcccaggccccagcaggccagaccggcccagtcctgggtacctgtgtctcctggagggtctgtacaactgaggctccagccctgagcagccctcagtggaatggccagatttggtaccccctattccagctctttctcttgatgaccactcaggttttgctttcctgggctcagtaggctacctccctgctcttggtcatcaggaggggacactcagaccatttccctgactgccttgggccctgtgccctgggcctatgggggcttgactagcaggaccacaggtccttcagtgtctcccggcctcccatcctctactttctcctgccttgtccaagcctggccagcacagcccacctgtgtgtcttgtggggtcatcagccctaggagtagcagagccaaacccaagggggctgaagggaactgcccaagtagctcaaggggtcagacgccagtcagtggccagagagggtgccctctgttgttatccctcctcctgtcccgatatccctcctgctgctccctgccccatggctggccagagtaaaatacctctccattcagagctgggcagctcctccagcctgctcccccagggaactatggggaagcagttggattccctggggttgccccggcttacctgccagatctggccgcaggcatcggggtttctcgcaggcccttgggactggtgacaggcagacagtgagacagagcagagctgcctaccaccagctctttgttgacatatctcatgctt

SEQ ID NO: 103234 - DNA, 1242 bp, Homo sapiens
agctgggtgtggtggtgggcgcctgtaatcccagctactcgggaggctgaggcacgagaatcacttaaacccggaaggcggacgttgcagtgagccgagatcgcgccattgcactccagcctgggcaacaagcgcaaaactccgtctcaaaaaaataaaataaaaaggggagaatgatgttatagtagggttattacaaaaggtacatgtgataaaggtatgtgaagcattgagaagaaaattgtaagtagtaaataatctacgaatggtaactactgttgctgatattattattgttgtagtgatggtttttaatgtaatattgggctctgaagggttactgtcacttggagaagggagaagaaagggcattcagttagggatgagtggatggtgagggataaacatgtgtgtgcctggtatgggagaattgtatggcctcaaaagcggtgttgagattacggtggaagttactaggacaattttggcataaggtggggaagaaagctttagcagtggaaactgtttaacaatagagtgacttcacctggaggtaaggaaggcccatccctggaggagttccagcagtggctgagccaaaagaaactggtctcacttgtctcttttggcttcagagactccctcagtctaccttaaggaaggaggggttttctggaggatgagtgaggccgccagatttgcgacatcccccatgggccatttgtggtcccttatactgggccagcttctctctcactagcaattggttcctgccctctccactgtcaggaggaagcctcctcagggcttctacactgtcatactattttcagggacccctctggccccagcttcatcccacagctcctctgtgggcctccttagagggtcaaattcataagatagactgtacaagcatatagcgaaactgaggatcagagaagaaaggggacttgcctaatgtagaaaggatttctatatcagacagcagttggatcagatgttttctaagatcctgactgagttaattgaaggatatgtgactcttctgatttaacaacaaaaaaaatagatagcctgcaatgtttcaggagtatatcctgtgcctagagacatctacctgcagttagagagcatgtggtacgctgagtgctgggtacagccagacctccagtgtcttccttctcaccatctccaggtagattaaactcctctgctgttaaaggaaaagccattcagatg

SEQ ID NO: 103235 - DNA, 2098 bp, Homo sapiens
ggggcggacgggcccacacctccacccgccacctccaccctccggacagactgacccgctcccaggaaggaccgactgtgccctccttccagccgtggaacagaatgacagactgccccaaacccacccctgccgccaagaccttagggatgattgtttctgccaccccgacaggctcccagatggctggcgcccccctccatagacactcattctccatctttccccctcccacaaacccacagacgcccttgtctccccgcctcactgcccccacaccaggagacctcagaccgacttcaggactgactgccccgcccccaccccttcccaggacagactgaccctttcctcgaggcatacagacctctggatggacagacattggtcacctccctcccctcagctccatcctgggacagacagtcccttctcctcatggaagggtcggagaagggccccctatccgctcatacacagcttcctccactggcactggcaacaggtgggcaggtactcccccttcccagcacgtacagggcgacagggagccccaccactaggacagaccatcagctccagcagccacaggagccagtagatgggctctgtgtatgtcctgtgtatgtatgcgcctcctcccaagggcagatcttgggcgtgggacgggggcaggcagggagacagcagggtccctgctcatattagcaccccccgatgtcctatcccgagagcacccagacacccagctagcagacagagaaatgtggggcagtggaacagcaccttgcctccaagctgggccccatgttgccccacagaatcccccgagcccaggcctcagagatcatgtgtacaggctggcggtccccttaggaaagatggactccataccccactcccatcccagctgtcctgtcacgtgagaccagtgttgtgcacagaactgacaagactccctcctgatgtgtgctttccatcccaatcaccagtaggagctcctggggccctgccatgaccctactccagagaatatcctttctccctttctctgaccaattgagattgtccaaggtcaccccagactctctcatgacttatggaagcgctttaactgtctaagaacccctgtcacttccgggattttccccagccctaaagcctcttattcaccaggcctccttcttccttggagaaatccaggcccctcccctaaggggagttccctctcacccactggatctgtctcctccagtatctccctactggctcacagcaggctaggtttagtccaggactcagagagagcacccctcattctgaaccctcaccctgactgatgctttgtcacagttccccagggattcacttgtgagaacttagtggggacctggagtgttttgaattgaggagcagtcacctgggattaggacccagggaggtgtgtggtcttgagatctaggaaaggagttcccagttgcatttatgggaccttggaaggaagagctcagatttgtgggagaatgctagggcatgagagttcctactacatgcttatcaggcaatcaaccagatcttggggtgcagagcaatgtgatatattaggaaaaggccaaacttaggaattacacttgctagctttgtgaccttgggcaagatcctgaatctctgagcctgtttactcactgtaaagggcgacagtaacacccacttcccaacattactctgggggttaaatgagtatatgatacgtgaaggtgcctggcacagcgcttgtcacaagtagcggcccagaaaatgttagttttctttctttccttctaagggtctgagaaatgaagagaaaaatgagggcatatctctggtatttgtgggcagagtgaggccccagtggaagcacctccctttggctgtagtccccaaccaggcagccagacatctgtctttcttaccccacaaccacaaacccgggatgtggctctgcagacaccctctacatggctgctgtctgtagggctggggctgaggtgggatcccagctccagtcctctctccttccctcactttctggagcctgtcagtcaacctaaaatctctg

SEQ ID NO: 103236 - DNA, 2591 bp, Homo sapiens
ctcccaggctggagtgcagtggctccatgttggctactgcaacttccgcctctcacgttcaagcagttcttctgcctcagcctcccaagtagctgggattacaggcacgcaccaccacacccggctaatttttgtattttcagtagagacggggtttcgctatgttggccatgctggtctcgaactcctgacctcagatgtgatcctcctgccttggccccccaaagtgctgggattacaagcatgagccactgtgcctggcctaccgttcttttctaagtcagaggggttgcccaagcactgggtttataggcttagatcgggcagctttccccgagcccagaggacaagagttggggccctgagtcaccctcatcccatggaaccagcctcctccctgcacaccagaaaagctgctctcttgtcaggacacctggtttattttctctttctatcctctgcctctgttttgtgactgtacaggtctggatattgagagcagcttgaagcagttggctgagcggcgtactgacatcttcggtgtagaggaaacagccattggtaagaagatcggtgaggaggagatccagaagccagaggaaaaggtgcggctaaagtggaacctagtgccttctctgccccccgtcttccatacttggtcttagttccagaagcattgtggctttgctttcacttgcaggtgacctgggatggccactcaggcagcatggcccggacccagcaggctgcccaggccaacatcaccctccaggagcagattgaggccattcacaaggccaaaggcctggtgccagaggatgacactaaagagaagattggccccagcaagcccaatgaaatccctcaacagccaccgccaccatcttcagccaccaacatccccagctcggctccacccatcacttcagtgccccgaccacccacagtaagccagcatctaccctggaactgacttttttagagcttcattcttgaggtcggacactgttggctgagaagtgcagctgccttttagtggggcctgagtgttgggtgggtcagtttgaaagagaaagagccctttaaatgcaagtgggaacctctctcttgatctgtttgtggaggagggttggaacagggagggaggtaagtggcaaatatgagaaaccagttggcgtcagagaagggctgcagggcttattgggtctttgaggactgttggcttgtctccaggagagacttagtcgaggtctcggcctcttttttttttttttttgagatgaagttttgctcttgtcgcccaggctggagtgcaatggcatgatcttggctcaccgcaacctccgcctcccgagttcaagtgattctcgtgcctcagcctcccaagtagctgggattacagggatgcgccaccatgcccagctaattttgtatttttagtagagatgaggtttctccgtgttggtcaggctggtctcgaactcccgacctccggtgatctgcctgccttagcttcccaaagtgctgagattacaggcatgagccactgtgcctggccaaggtctcagcctctttagtgactctttcagtgtttgccaaagtagcaggtcgagtttgacccgccaagtcccaagtagagagagtgtcatcctcgggctctcagcagctcagttcctattggacgcccagtgtaggccacagtttctcagtcccagggggccaggacgtagttgtctaacctccatcctcagagctgcaggcagccagttgccaactgtgtgtgaccttggagtccaactttggcttcctgtaatctgtgggtctctttcctgcacagatgccacctccagttcgtactacagttgtctccgcagtacccgtcatgccccggcccccaatggcatctgtggtccggctgcccccaggctcagtgatcgcccccatgccgcccatcatccacgcgcccagaatcaacgtggtgcccatgcctccctcggcccctcctattatggccccccgcccaccccccatgattgtgccaacaggtcagtatctcttgcatcattttccaggccattagttcagggaccacgggccaagtactgtcagcagagcagtggctgatgctagtgccagctgttccagcagggtatccagcccagaggagagccctggcttcccattgaaagatccgcaaccctagagctgggagccaccgttcctggtagaaatgagaggctgaaatggtgtagccagtgtctgtgcattcagggatcaggtccccaacaggctcagaggcctgagaaatgcttgttgcttggcactagctccatccatcagtcctgcccctcctgcagtcctctgctgtccaatctgggcagcctcccaggtccccttgccagggaacctgctggctgccagacttagcagggaacagcacttgacacctctgactagaggaaacctttgcaaccttccctctcaacttctcatcagccctgagtcctgggccccttctgccctctcatggggctgcttattcttgtctttgcagcctttgtgcctgctccacctgtggcacctgtcccagc

SEQ ID NO: 103237 - DNA, 1334 bp, Homo sapiens
atgccatagtttggaaccatacttccattctgttccgaaggaggcgctgactttgatgaaagccctggaggtggtagcctcatcaggagcagaccctgcttcagcgtagcaccaagctgtttcccatctctgcaggtgtgttaccgagtggaatgggccaaattccaggaacgtgagaggaagaaggaagaagaggagaaggagaaggagcgggtggcctatgctcagatcgactggcatgattttgtggtggtggaaacagtggacttccaacccaatgagcaaggtaggtctgtgaggagtgactccagatggggagccaggaactcagacttcccgggaaacctggtgcaggtgttcccagagagcagtagaatctctcagagggctttatcagtgctgtctcctccctgctcccaaaagacttcagttctaccactttgcccaacttagattcaatacgtacttgccagaccctagatgggcctctggagatagctggagagaaaacagacatggccccagcccttggggagctcagacagggcaaataggtgggtctttgataaggaatacctttgcctctggctcaccctctagggaacttccctccccccaccacgccagaggagctgggggcccgaatcctcattcaggagcgctatgaaaagtttggggagagtgaggaagttgagatggaggtcgagtctgatgaggaggatgacaaacaggagaaggcggaggagcctccttcccagctggaccaggacacccaagtacaagatatggatgaggtaagctgctgggcaggcctgcaggatgaccttttcccctgaagccccaggaggtcgaagtgctctccaccagtcagatccagctcccctgtgagccttgaaaggaggcgtgggtcctgaacaaggccatacagctgcccaagtccaggcagcacagagcctctttccagctccggcaacaaagattcattcataggcaaggatctaaaagctgtgctgacctgttctgtggccgcctccctggcccggacagcctgctctcactgcctcgtgccagccctcagggaactcactgcattaccctgttctgttttgagctctcagctgggctccaagctcccagagcttttctaaatgtagcccacgcttcctttcaggcatccctacccccttcaagccaggccctctaagcaggcatggagtctccagaaccagactgttctcccccactcggaaataatttgtgcacagcctgagaagaaagggcccctgtctgtgggaaatgactttttctctccctcccagcattgctgtgtgagc

SEQ ID NO: 103238 - DNA, 1068 bp, Homo sapiens
ggacagtgccttgcatcttccaagtgtttctatcttatcagatgatttggtcagagatgtacagtatcttgtccaaggtcaagcagagaaatgaagagctgggatgcaaacccagaagatattcctctaaaagctgtcccatgctgccatggcagcacacaaaaaagggtgggattcagttctgccaggacgtgtccggcacctgtgatgggtgtggcattgttcaaatctcttgagggagcctatgggcccaggagaagggactgattttcataacggcagagtcagggaatgtgctcggcactcccagagagcgatggttaagggaccggtgacagtccagagggcagcctgtctggcccaggttccacaactgtcagcaaatctagatgccaaatccacagaggacatacaactgggagggacagttcataggtcagatggcaaaattgatctgaatctggatctcaaaactctttgaaggatggactgaagttgactgtaacaagaggaaatttgatagggaaggatctaaggtctctcctctccatgtatgcaatggaggcttagcagtggcacaggtgaaaaggatttggggggtttcagtgcctataagctccacctgagttaagggtgttgcctgttgccaagaaagttcttaggctgggcacaatgtctcatgcctgtaatcccagcactttgggaggcccaggcgggtggatcacctgaagtcagaagtttgagaccagcctggccaacatggtgaaaccccatctctactaaaaatacaaaaattagccaggtgtggtggcgtgtgcctgtaatcccagctactcaggaggctgaggcaggagaattgcttgaacccgggaggcagaggttgcagtgagctgagattgcaccattacactccagcctggatgacaagagcgaaattgtctcaaaaaaaaaaagaaaagaaaagaaaaagagagttcttagacaacacttggggctctgcgtggctcttagagcacactctgagggggctctggaaaattggaaaacactcaaagggaagttatttgc

SEQ ID NO: 103239 - DNA, 1042 bp, Homo sapiens
cccacactcatctacaaatgttcacagagagcctactgtgcgcagagaccctgcggagctggggatgcaggaagcattagacgtggatgcacccctgagggttcagggtgcacagaacgtctgtcctcgggcataagtggctctacgggtaccgtgcacagagcacacagtgactcaggaagggggaggccatcaggccaaactgcagaaccaaagccatctcagatgtcatctagatccacccagtcatgtactggaaaagaacacagagacctaggcaggaagagtgactcgcctagaccacaattctggcctggggtgattatctcagtttggaaaactctaggtccggccctaactagctctgattgctctctggatgcacagtgcaatcatttggcctggactggaacgggcttctgaagtaggacagcctgacaagacttcctgctctctgttccctgcagttggggaggaaggtggagaccatcaccataatttatgactgcgaggggcttggcctcaagcatctctggaagcctgctgtggaggcctatggagaggtgaggggcaggggtggggaggaaggggacagagggaaggggaggaggagtagacccctctcctaggctgtcctgtgggatgggtgaggcaatgggggcagattctgagcctgctggaatcaagagtgattttgtttccacagtttctctgcatgtttgaggaaaattatcccgaaacactgaagcgtctttttgttgttaaaggtaagttgggaatttcttgtgataaagccagatggaaaagaggggtcaaaaacatgactgcggcagatggagggtcaaacagtgagccaaaagagggggtctgaggacatgttcagaagactgctgcccctgctagtgtgctggctcacgcctgtaaccccagcactttgggaggccgaggcaggaggctctcttgagcccaggagtttgagaccagcctgggtaacacagcaagacctcatctctataaaaaagttaaggaaatgagctgggta

SEQ ID NO: 103240 - DNA, 1026 bp, Homo sapiens
actacttcctcctgcgctggctgcgaggtgaggcttgcaggggtcaggggacgcagaaagggagggaaggaaggagggtctcaggagaggagtgggagactttgagggaatggagctgtagggtagtaaagaacacaggcttgccgggcccggtggctcacacctgtaatcccagcactttgggaggccgaggcaggcagatcacctgaggtcgggagttcgagaccagcctgaccaacatggggaaaccctgtctctactaaaaatacaaaattagctggcttggtggcacatgcctgtaatctcagctactcaggaggctgaggcaggagaatcgcttgaacccgggaggcagaggttgcggtaagccgagatcccgccattgcactccagcctgggcatcaagagtgaagctccgtctcaaaaaaaaaaaaacaaaaaaacaaaaaacacagggtctggaatcagcctgctctgactagaatctgagctcccctgtgtatgagcacagcacaaaaccccactgagcctcagtttcttcatctgtcaagcaaggatgaggcaacaggtgggcacagagtccaggtgaggttacagttaacagccaggacatcctcaggcctctggcctggccagcccttggggcagatgttgcagagcactgttttcagtacttgcctttgggtgtacctccagttccccgaggacagggctctgttgtcccctaaaggaaccgaggtgccctagtgcactgagcaggtgcccagcaaacacttaaggaagtggatttagcgaatgctagagaagcagtttcttctaggaattacagcagcagtctaaaaaaataataacaagccagatgcgatggctcacacttatagtcccagtgctttgggaggctgaggcaggcagatttcttgagctcaggagttcaagaccagcctgggcaacatggcgaaacctcatctctacaaaaaatacaaaaattagccgggtgagctgccgagcacctgtaatcccagctac

SEQ ID NO: 103241 - DNA, 1094 bp, Homo sapiens
ctgtgctccaggctgagcaacagagaaagaccctgtccctttaaaaaaattaaaaatatattgtcagatgaccccggaaagaaggttcttcctgttgtacccctttccaccagctcctggtgaaggttctagtggcatccagctttcccaggtggtgtagggaaatggggcagttgccaaggctccttccagctctgggagtttaggattctcttatctcgagatttgtgggcccatgaaataatgttgttaaagcagggctagcgcatgttttctcaccatgaagtgggtcaggtagatttttttcctgtgagaatttgtgaccttttcttgaagctctgcttttaagggatatagctttgagttctgtgccccccaccctcccttctacacatacctcagcctgaccttcgccttccccctcacaggccaacaagctggcggagaagcggaaagcccacgatgaggcggtgaggtctgagaagaaggccaagaaggcaaggccggagtgagtgcctgcggcccctcacagggctgaggccagcccctagcagctggatgtggcagaggcaggccagaggacctaagtgtgatggaccagagtcacttctcctcctcctttctccagccagccctgacccctcatgctctctggctgggccagtgggcagccctcgcttcccttggatggagctgccctgctggtgcctggtcagagaagaggcctctgtgcccagcctgattctctgctcccaggagccagtgacatgaggtgcagaggcccacccagccccctacctactgcccccattcatcctggctttccacagccccctcccacacagttggacccgtgattctcagggtgctgtgatggggtgagggtagggggagcatttgttattaaatgactggacttttgtgccaattgcattttgtgtccatgagccttcctagggttggaggaggcctacctagcactctatgctgcaggctgggccagccctgggtatttactgagacagagctgggcactgctcagagctctctggatgtccaaggacccctccaggtccagggatgccaaaaggtag

SEQ ID NO: 103242 - DNA, 2166 bp, Homo sapiens
cattgggatggtgtcagtttccacttcttatgaaacagtgtgtggaaagtgctcggcaccgcactgagcacataggaagtgctcagcagagggcggaactgccgtcattttattactagcttagcacagaaggatgggcagtgggcagatctctgctgagccaggattgaaggatcctggggtgaggagggggtaattgtgtcctaagagggtgagtttatgggctgggtggccagcaggtcccagggagctgagtctcaggacaggcagctcatgtctgtgtacccgtgtgggctctccctgtccctgtaggagttttggtggggaagtgtcctgggacaaatctttgtgcattggggccacctatgacgtcacagactcccgcatcacccatcagattgtcgaccggcctgggcagcagacctcagtcattggcaggtaggccctcaagggtcctcgtccggatttctgggtatcctgtctcaaaggccctgcgatgcagcaggaccctgagttgccctctgtgactcgtttttgcctgccactctgcgccaggtgctacgtgcagccccagtgggtgtttgactcagtgaacgccaggctccttctccccgtggcagagtacttctctggggtgcagctgcccccacacctttcaccctttgtgaccgagaaggaaggagattacgttccacctgagaagctgaagctgctggctctgcagcggggagaggacccaggtgagcgggatgggactgggctggccttgacccctgggcccacgctggctgtttcccttagctgccaaggtggaaagctccagggaacaggcagtaggagcagaaagccctttgaagtcacctgtagaataaggcttaggagaagggacatctacctcctggggtcaggtgttatttgacgttcaggatgactgagcagaagaacatgctgcattgtcatcagagtttacattggaggcgacagagctcaggactgggggtcttggaatttcctctgatggcagctgggctgtggggaggtgcaagagagggccacaattgggacatccctgaactgcccatggctaaagacggcagggtcagagaggatggggcctgggcctgttgtcaccctgccagagagacagtagattcccagggcattcagaggacattggctttctctaggaaacctgaatgagtcagaagaggaggaggaagaggacgacaacaacgaaggtgatggtgatgaagagggagaaaatgaggaggaggaggaagatgcagaggctggttcagaaaaggaggaagaggcccggctggcagccctggaagagcagaggatggaggggaaggtagggggagctgcaatgcggggcttggcctgggaagcagccctgcttggtgcctgctctggcctagaaggtcaggagccagaggactgtggaggtcgggagaacctgcccccataagcaccctccttgtgtccccagaagcccagggtgatggcaggcaccttgaagctggaggataagcagcggctggcccaggaggaggagagtgaggccaagcgcctggccattatgatgatgaagaagcgggagaagtacctgtaccagaagatcatgtttggcaagaggcgaaaaatccgagaggtgagttcttgccacccacttgagatccaggtgtggccaccagacccaactgcacaggtgaacttatgtggcttggggccctcctctaggcagactgaggctctcctagccttttcctgaggttgcctgcctggcccagcccagcctttggggcccccgacctgggccagtgtaggcgtcttggtactgccatctccggcctgggctttccttacggcttccgtcccaccccgcatccggcttcctgagtctgctggggtctgcaaacagagccttcccggcagactcaaggactgggggcgggggtggcgggggggagctttgttaaacttctatctgttttgtattttcttgttcatgaagccatatatgctaattaaaaatacaaactcatgcaccctggaaccctgtgatgagtgatgcagaagtggctcacagccctgcccttggaatagagcagcctgtagtaacagcccccaggtttctcttgtgcccataatgacccgtgtttg

SEQ ID NO: 103243 - DNA, 1601 bp, Homo sapiens
tggtgctcacacgctagcccagcagcagacatgcagcaaagattgtagactaggtgatgtagaaggcaggagctctggccaggtcggaaagtggtctgtccgagtctgagctagacctgaaggaagtgggagagccggagcagggaggggagggccagccagtcttcggagcagcagggaccagggtcccttttctcactcttttatgggggtctggcactgacttccaggatgcgtctaacccttgggacccctatccagagcctcacttgtggctgggaacacttgtggccggaacgcccctggtgggaagatccatgccaccccttccctagggcagcgccttaagggcagagccttcttgaggagcttggggtctttgggtaggtcagacaccctccactctgtgggttgtctgtccctcctttgcccccatccctgcacccacactgctcatgcatctcttgtgttccccagcacccgacagacgtggactacagggtcatggccaccttcaccgagttctacaccacgctgctgggctttgtcaacttccgcctttaccagttgctcaacctccactatcccccgaaggtaggaccccagcccagtgccttctgctcgccgtgcaggggccacagcccttctctgtccacacagaggcgaggggctgtggctgtcctctgcctcctgaccttccctttgcctactagctcgagggtcaggcccaagcagaggcaaaggccggtgagggcacctacgcgttggactccgagagttgtatggaggtgagaggctccaggagcatcatccggcatctcccaagggagtggtctctgtccccaacacctctgggggtctggttcagagtgggggtggttatggctaggtgggtggtctcagcctgcccttggaacccacacctgctgatgcccaggactgtcactgctgcccctccccaccctggccacatgcccgcatgaggtcccccactgcaagcagcccccttctctcctgtagaaactggcagccctcagtgccagcctggcccgcgtggtggtgcctgccacagaggaggaggccgaggtggatgagtttcccaccgatggggtgagcactgcactgccttctggcaggagggctgggaggggtcgtgtggggggtttcccagcttagggacatttgcatcctataattaggtgttatttgatggtcaaagcaactgagcagaagaatgggctgaattgtcatcagagtttacataggaggcaacagagctcaggagtggggccttggagtttcctttgaaggcaggatccaggatctagaaggaagctggagtggacgttatctccagccctggccctccagtgggggtgggcagccctggtggtgcgaggcctggcccctttctcaacaggagatgtcagcgcaggaggaagaccgcaggaaggagctggaggcgcaggagaagcacaagaagctttttgagggcctgaagttcttcctgaaccgagaggtgccccgtgaggccctggccttcatcatcaggtagggaggctcaagggcccgctgacagcattggttcggccatgctctgg

SEQ ID NO: 103244 - DNA, 1678 bp, Homo sapiens
tcataagtgctgctgaggggaagcagcccccaccccgctccctgctccaccagggcagcttcggtttcccattttccattttggacctccctgtagagtgtctgtgcactaaagtttccaccttcaaagagagtcatagagcccctgactccgtctaccgtcgtgcaccacaaaatccgcacgtgggtcaaggctgggtctttggtgagcattcggtgtcttgaggacccccatcgggacttctctggtcctcagagcctagtgggcgcatcctggttaagtggttcctcctaggggctgtggtcagctgtggggaagctgctcctgccaggtcaggaggtggcagtggtgaggcctggcttgaggaacggggcatctggggtgggataaggagatcagggtcccccttggcacccacgctgaacaggccccatgtgctgcctcactggccatgcaggtatcccacgttcatcgatgccctgcgggacctggacgatgccctctccatgtgcttcctgttttccaccttcccgcggactggcaagtgccacgtgcagaccattcagctgtgccgccggctcactgtggagttcatgcactacattatcgctgcccgtgccctgcgcaaggtgagcctgggactgcccggctggcatcccaccctgccccctctcctgccaccccatggtcttcacccagatgtctcctcctctcccctaggtcttcctgtccatcaaaggcatttactaccaggccgaggtactggggcagcccatcgtgtggatcactccctatgccttctcccatgacgtgagtgtgcctgtcgggaggggacgggcttgtgctgcctcctagacagatatggatgtggaggaagggggattttgctgtccatggagtttagcaagtgctgggttcccaactgttgatgaggggtgaggcgcggcagaatgtgccacacagcatcctcattaagagcgggagcctaagctagccctatggcagcacctgccagctgcgtgcccttggacgtgttcctttcacctctctgtgcctcagttaacagtgtctacacccttaacagtgcctggtgcttggccttttagggccgaataaacagtgagaacagctatcagggccatacccagcctgcatgcccagcaccatgtggtgccaccacggggacagtggcagagccctgccctcgaacctactgggctcctcgtccctgctttgctgccgatagctgccagaccttggccaagtggccttgcctcccttctctgcttcccccttcctgcctctctgccccacaggactcggggactgggagagaaggggaacggtgagcacaggagaagcacttagcatgtggcactgtttcctacatatattgttttctttttcttttaaaatagagatagggtctcactatattacccagactggtctggaactcctgagctcaagcagtcctccaatctcagcctcccaaagtgctaggattataggcgtgagccacagagcccagcctttttctttatctctttgaaatcctgggaattgttggcagggatccactgagagaaaccctggttttgccctctcatggagcttctagtgccccgcaggtgggccaggctctcctgcctccctgtgctggtggcctgcatttagc

SEQ ID NO: 103245 - DNA, 1049 bp, Homo sapiens
gtgatgctgctaaatacgctatagtagtcccccacaacatagaatagtctgacccggaatgtcagtagtggtaaagttcagaacccctggactggtaaatgtctgtcatctttggaggctgatggcccaggaacactgagctctaggatggctcgggttggcttcatccaacctggctgtgggctgtcacaggaagtgccctggcctaggagctagacagctggtgttcgcatcccagctgtgtggcacatgagctgggtggccagagggtatttcctagcccgagcaggtccccatcttcagaagagatgatggtagttcctgtcctgcctgtggcacacagtgttaggtgaaataaatgaaaaaaagccacacacgaaaagcaagtgcctggattcatacacacaccaagtgtggtgatgtggttgtggtgatctcatactacaccatccccagctccttagctagagccagagcttaagaaagaaaagcagttggcccagaaatgctggtgctgtttctacagaaagcctgggttcttggttttgtctgtgaggtggagagtgaggaaactacaaggcaccagagggggccagttgaggccgccacctctgcaccaagaaaccagacagctgttctgctgcctcatcagaggtctctgcaggcctttcttgcatcttggcatgggtttgaagacctggcagacttctgactcgcagcagtgagtgatgctatctggggctggaaggaccttggcaatgtctggtctcatggattttggagtcttttttgaaatagcagaacccattcttttttttttttttaacccctgcccccactccccccaacccctgaccagaacccattcttcaaaaggaagcttcttctccttgaagactgggcatttggaaaaaagaaaatagaaaaagtaacaaaaatgatttttgaaaaggtagcttcctggaaggcagtttggatgccagcgtctctggcagctgctgtggctgcgggagagaggcttgaagctctgtctgtccgcttgggctcaa

SEQ ID NO: 103246 - DNA, 1062 bp, Homo sapiens
gaagaggtcggttagtttggaggacctggccccaaaacaggactccgttgcatttttctgggtgtctcagtgtcacacacagacccacagcttgtttcatgctgatatagtctggtgttggcaatggaggccagcctttctcatcctgtcagtgtcaggtcacttggcttctgttctcagttgaaaaacggagctgctttgctgtgccatcctcccatgtaaacgtgtggagttgggacatctgtgcattgtcaaaaagggtgcctggtctagctctgctggttaacacaccaggcttggtgctccttggagttggctcttttgctcatcctgggcagaggggtcagtgacacaggcacatagccgtggccagcttcaggaggcatgagagtccttctgccctgcgtttccatcttccatggaagaagttgtccaggagacctgagcctcagcattgaggtgttttctttctttcttccaggtgttcgtccggaagctccggaaggcttatgggaagagcgagtggaacactgtagagcgtttaaaggacaataagcccaactacaaactcgaccacatcatcaaggaacggtgagccgggctttcctcaggacactgctgtttcttcatttactgctggtctctgccctagcaccagggatacaatagggaataagaccaagaccctgctcaaagagcttgcaactttttcaaggacacagaccaaaaaccaagctagcaaattactataatgattacgaggtttgtagttacaggcttgtcagaggggtctctgaagggagacgtttgagccagcccgcggaagcacaatccaagcagaggccatggcaagtgcaaaggccccatggtgggagagccccagggctccatgaaggcacgacgggtacctggtgagacgtgggaagcatggctagacacctctcgtctgaactgttccttgcccagccttctcagactcagttcactgcaacctccacctcccaggttcaaacaattctcctgcctcagcctcctgagtagttgggattacagacaccacca

SEQ ID NO: 103247 - DNA, 3548 bp, Homo sapiens
cagtctcaccctgcccctcgggaaccgcttctcagcagcggcagccgaagtctgacgacgcttagcaaccgttaccttgacaacgcaatcctatcgcgcaccatggagtgcggcgcccctctgcatcccagaaggcaccgcgctgtccctaagccttccgcccctctccgtcccaacatgcaacgaggctcacagtcaatgaatcgtcatcagggtgattacagaaaagcctgtatatccacgtttgttttaacacttaaagtgtttgtaaccattgtgagcgggaaagatctggaaagagtgttctcagtgatttttttcagactatagttttaaatcttgaggaggaaatccccatctttccctggacttgtacaggcatctcattgggcagcccgcacaaacagacagcgtggggtggggagggtcctcggggtccttggcagggcacgtgcgggaggaagtggagctccctgtacgcgcggccctagtcggctcctcaacgtggagcgatgggaggccttgagaagaagaaggtgattgggaaagacggtggggattcccgaggggtggggtgcgggggcggcagagcatggggtcgactcttttcccgggctccgtctcgtggagactggaaagacgggatcgacgtgaccgtaatcagctgcgagaaggggtccgagaatggacaaggatggcagtattcgtttagtgaaatccgagaacgaactccagagttctttctgtggagagggctgtgaaagagagttgaacttaccaagcgtagcttcattccaaaagcaggccgagccgtgggaccactatttaccgaaagggtgataaacattacgtagagctcaccgttactgcaccgttacattagttggttagtgttgtcttggaagttctcttcgaggcataacatttcggctgaaatgggaaagatcagaacgtcttggatgggttctggggcatgggagtgcttagcgagcaggcctgacaagggaaaccaagtgccaagatcagtaggcagggaaggcttgctgtgtgtaaggagttggaaggacattaggatgactcgcatgtaaaccaagaaaagaatggcatctgataagattggggttggacacgtactgtatcgtgcaaggcctgtaagcttggattttattctaagtgcagtaggaatagtgtagagcttggattttattctacgtgcagtaggaaaaaaaggaggagtaacacgattagagtttttcagggagttcttgtggctgtatggagaatcggcccagtgacatgaaaagactgggaagggaatgggaatgaggaatatatagttggcttaagtgtttctttcagagtgaaagtttctattgccagtgttcttaacccaacacactacattgagtatccagtgctagccatcggaactgcaaagatacaagatggaaaacctgcccttgagttgcagatgtagatatgtaacaaaatcgttacagtttttaaaagctgggtttcagagccagaatcaacaaagatgagtctttgttgtgggaaggattgtcttgtgtgtagtaggatatttggcaacatccctgatcctttacctactggataccagtagcacccagcaaccaaaaatgtctccaaacattgctgaactctcctccccccagcacatacccagggagtaccccattgagaactatttattcccttaacatttataaggataagcatggtgacagagataagtgtggcataaggtaatggaaaacgctataaatgaaaactcaacttcttaaggcagtctgaaactcatctttatacctccaagacttagcatgggcctaatacctaatagacaattaatgtctaaaggaaagaatgaatgaagggtatgtttcatgactatgatgttattagtaaacgtacctgtgggagactaacaggtttgtctctttagagctgaacctagccaaagaggcccctgctgtcttagtccagaggaagatcttgtttggaaacgacatgcttgttagcttgcagggtatttgttacagtgcactgattgtctctatcgagggatacagaagtgtgagggatacagaaatgtgggtgtgaggcagcatcttagcaccacaggcatccagatggttatacaagacaataggcttcttaggggcaggtagagaccaggctttttgtctttattgccttcatagcatctagcttagtgctttgaccataatagaggacctgttattgtctgttgaatgaatgaatgaggaaggggagaagctgtgtggcttagagcatgctttttcagccagggtaataccaccctcaagggaacaaaattggttgaggggcagtatcttagctattacaatggttgtggctccccaaggactacattacataaacagacctacagtatatctctggtattaacattttatggggcatagggaagaaagggtgatgggtgagggaggaagggggtgtctaataagtctcctggtagtggtgaagaggttataatgaggaagaaaagaaggggaaaagattaggaacactggcttagctattaggcattcaggtactggactcagacctgagtttgaatcccagccccaactcttaaaaagctgtgtgctttttaagagttgcatgggttattttacgagcccgttttctcctatgtgaaatggacgttcggacagcacctacatcacagggttatgggaattaaatgaaatgtgtgaaaatcactaattgtaatggccaacatttagagctagtgctaagcacttggcacagcaccctatccgtagcagcctcgcagccctcagcatcatgcagatgtatgtgttccctatgctgacagccgcaaggatggtacaggagagctcatccaggcaggtcggctccttccctgcagtgtttcctctcctagactcatctcagccacttatccagagtgatagttgcctctggaactaggcatgcccagagtttgatgtcagtcactacaatcattgctaatggagaattgtttttttcctctcccagtatgaacgaggctcggccaccaactacatcacccggaacaaagcccggaagaagctccagctgagcttggctgactttaggtgaatatagagggaccgtgggaagcccgggcagtgaattgcacattgaaaactcagctgcatccctgtcttacctgagttgccatacccattctggggttctggtattccttctctttctcaccgcccttgctttagtgagttgtgtttgctaggtgtggtccaagggaaaatggaggagaactgaactggattgtcaggatgggctagctgggctgggatgggctgggctgggtccctgccatccatcccctcctatctggtagaagagacccctgatcctgcaactaggggttctcattcctcatagagtcaaaataagacttcactgtggcctgtgggccctgccctctggcggtccctggcctttgtggctcacctggcccacttttt

SEQ ID NO: 103248 - DNA, 1050 bp, Homo sapiens
ctggggaatcttgaactggggtttggggtgcaaatatctgcactgagtcacttaattgcacccagcctcattcctttatctgtaaagtgggctaagaatgctcccctgccttcctcctcggtgtagtacaaggaaggatcccatgacacctgctctcccagtttaaagctctatatgtatgttgtgaaattgacagggatcgctgcacaaacgctaatgcaaagtgggctcctgtgcttccttttctctttcttcttcttttttttttttttaattttcttctagagatgaggtctcactatattgcccagggttggtttcaaactcctagggtcaagcgatcctcccaccttggcctcccaaactgctggtattacaggcgtgagccactctgtctggctcctgtgcttgtgaatgtcaacagcaatcagcccttagctggcagggctgggttggtagggcgagagctcacccaaggctgcttttattaccctgcgtgaatctgcctggccccttccttctaaggaggttgctctgtggttgtcagtctctccctttacagctggatcctgatctttcagtttctaaccctgtgctgactcatcgtgctggaagtgagagcccggggtgaggtcagggaactcccttgcgcgtttcaagaaaagggaaaaggaaagagaggtgaggaggggggcagatgaccagagagacacaggctgagagagactgagacagacccagagagcctcacacattgagtgacagagacggagaaatggagataggcaccaaaaaatggttctcagtgacagaaagggaaaaaagcaaccccccagtctctcttaacatctggtgagaaaccagccatgtgctttggtctgggcccacacagcaaaggattatgtagggtttcatgctggtggatggtcaccttatagcaacaggtatctggggctgtcgggaaaacagacacgaggttgtgggacccagacccacagagatggagctgttctaggagctctggtcctcgttctggtcccctgggatatg

SEQ ID NO: 103249 - DNA, 1059 bp, Homo sapiens
cctgggtgatagagtgagaccctgtctcaaaagaaaaacaaaagatatgttgaaatcctaaccccttgtacctgtgaacatgactttgtttggaaatagggtctttgcagatggaatcaagtcaagatgtcttttgggtgattcctaatctaatatgtctgatgtccttatgagaagagagaagtgtggacttatgccgggcgtggtggctgacacctgtaatcccagcactttgagaggctgaggcgggccgatcacgaggtcaggagatcgagaccatcctggctaacatggtgaaaccccatctctactaaaaatacaaaaaattagccaggcgtggtggcgggtgcctgtagtcccagctgtttgggaggctgaggcaggagaatcacttgaacccggaaggtggaggctgcagtgagctgagattgtgccactgcactccagcctgggtgacagagcgagactccgtctcaaaaaaaaaaatgtggacttagacacacacacagaggagaccaccaggtgaagacacagacagagaggggaaggtcatgtgaagtcagaggcagagattggaattatgctgccacggccaaggaacacctgaggctaccaggagctggaagaggcaaggaaggattctcccctagagccttcacagagaatgtggccttgctgacaccttgattttagacatccggcctccagaacggcaagcagatgaatttctgttgttctaggccatgacatttttggcagccctaggaaactaacacagtgagtaagactccttcccagcccaggtgctggatatttttcagggagacagactctccaatggagccttatgagtcagtgtggtgagtactgcgagaaatcgagaagtgtatgatgaagactctgagaagggccttccaccaagcagccttccagccccttgctggggtggcagctgtcaaggaagtctccttgggggagggaaggctcataccccatgttcagagatgagcagaagtccaccagggagcgaaagccaggctatctcaggccccgtgagtg

SEQ ID NO: 103250 - DNA, 2982 bp, Homo sapiens
ccgtgctgactcccgggccaaggcctccgaggaaagcctgcgcacctccgagaggaagctccgcgagacggaggagaagctgcagaagctgaggaccaacatcgtggcactcctgcaaaaggtgcaggaggtgagcccggcagccttcctgttgcagctggaccacctggtctctcagggaggggggcctgggccctgttcctgttctcacaagaatctatccactcacaggaatctatggttctcaccctggctgcacagcaccctggcaggagggcttgagatggtgtggctgcctggtcctcagcccagccagacccatagaaccaggctttttccctttagacattccgacgtacaacctggtttgagaaccctccaagccataaaaacgaagttcttttccacatgacgcccagatgggattgggtagcccagaagtggggagcaccccttagcctgttggcccttcatccaggcaataagcatgagggcctgctctgtgcctgtcctgtggatacagaatgaacaagacaagccagagaaggttcctgctctcacagcctgccagtctggtggaagagagagaattactgatggtggttcataaggagatacagtaaagtgtggggaggccacttgactagggtgttcaggggcttaggcatttggagacactggaagccagtcatgcaaagagtgtgacacgagcattccaggcagaaggaagaagagcaggacttgaggcctgagcagggacttgggggcggtaggggcagaggcagggcttgaaagttgtggggtttgatcccgagaacagtggagatcactggaggggtgtggcatgatgcagttttcagtctcagacatgtacctgcttggttggaggaggcctggaggggtcaaagttagaaccagagcctcctgtgaggaggctcccacagttgtctgagacagtggtggcctggaccttgggcagtgacagagaagggagagaagtgggcatatttgtagtatctgagggaaatatacatctaagacaattgggaacatggggtagaggcagggtgggcgtaggaaatctgggcatcatctgtgcacaatagatgagggaggggagagtgattaagacaggacagaagcctgacatccagggcggggtgggaggtcagggagaggactctgggctccatcccaggagctgagagaagggtggaaaggtgagccccccaatcactttctggcccccagttgatccctaccctgctctattccaggacatagacatcaacacagatgatgagctggacgcctacattgaggacctcatcaccaagggggactgaaggcaggagagagagcagctcccctgcccacctgcccctcaaccctgtagctgcagggggaggggacttcattcatgggttggtggtcgcaccttggtttgacttacacgggacatttgtgtttttggaggaaaagataccctgattctttgaatcttccttaagtttataaatatttattttttaaaagaagatgctgtgcctgtgagaccatacttttttttttttttttttttttttttttttttttttggtgactgcaaaggacagagaacctttccactttggccatactgggttgctaagccggagccatttcagctcctggctcctcaagataacggcgagtccagtgccatcttggagaagctccaggggcagggctgacttttctcctacaggaggaacaatgtggggatctgagggatgggagggagacttccccctagagtggtggtcctgctgggggctcatatccagggacccaaaaggggggctgtgtaggaggttccacattggaggggctctctctctcgcagctgtcagagttggtcctggctgtggcgtccaaacagcttgagggaaaaagatcctgtctaaccacctcatctactactcaagttctttctgaaggagggatttcttcagttaaccatggacagtgaggtttctcaccacagtaacttgagtccaggttgagggggagacagatctgtggtaaatctctgacttgggcagcacactgagtgtggaaccccacaggactccttagggaaggagcttgtgtgtgaaagaacccctggggctgagctggtgacctccatgtgtgggtgcagcagggccttggatggtgccaattgatctggacagcctgttgatgcttttctacttccacccttcggcctggccccactgagccccatcaaggtgcctgaagagggggccagtgagatcccgtggccacagggactccagaggcatctctgcaggaagcacaccatgccttccctccatgttccatcacggcgccacaatctgtgtcccttaacttctcagggtcaaagacaaaggcaagcgttgctgaattttctctttaatggccattggaagagtctggttcagtttttcccaactctcttcccactcgtatttggggcctctgggttttctgaaggcacaaggactgtgactttgtaccactaacctgtggttcaaacctgggtgtgtttctggcatctccctaacccagatcagcaatggccaccctgctcctctgaggtcagcagaagactgggaagcagaggtgagggatgcaggccacactggaatgggaagtcttttccccactggatgtgcctgtctggtgggttttggaccttcccagactacatctctaggagaggcctgtttggagtagtacactgagagaccctggcctcttctgctggaagactgtccaagtcttggggtttcttgagctggtgattcctctgccatcctgctctctctcttcatctcaggcagcatggggtccacttttgtccccaaacctaatgttttaatccaaatgcaaattggttccacatttttactggagggtaatcagtttttaaaattcacacacatgtaatcgaaa

SEQ ID NO: 103251 - DNA, 1543 bp, Homo sapiens
agaaaggtgagctgggggagtgacttggcagcctgtggcgggggtgggagtgggagtggaagtggagccccttaccagcagcaatttaccaaaggctcattgaatctgtcctgggtctgggctcttgtgcagcagtggatccaagtctaatcccaagcagaattctgaagggatcacccctttgtggttatttttaacactaattccttggtgttcactcctggcggtcacttgttctcctgctttttggcaccctcatagcagatggggaaggagaccatggtggctggtccctggtctctgtgtccctggtgtagtgggggcaagcacctaagtgttcctgtcctccaaaccctggggactgcctttctcgatgtggcccaggccaagtgagggactctacgctagttttctgactcgcacctctgtctacattgtcagataaagggctgcacgtggaggtgcgtgtgaacagggagtggtacacgggccgtgtcacagccgtggaggtgggcaagcatgtggtgcggtggaaggtgaagtttgactacgtgcccacagacacgacaccaagagaccgctggtaatgccccaatcagggaggagcagtggttcctcgaaggaggtatccccggcctccctgccagcagcccatcctgggagcccgggtcagacatgacataagctgtgtgtcttccacagggtggagaaaggcagtgaggatgtgcggctgatgaaacccccttctccggaacatcagagccttgatacacaacaggagggcggggaggaggaggtgggccctgtggcccagcaggccatagctgtcgcagagccctccacttccgaatgcctccgcattgagcctgacaccactgccctgagcaccaatcacgagaccatcgacctgcttgtccagatcctccggtacatgtgtcttttgtcttcccaccccagggccagcagcagctctctgcctgctccatgccattctgaattactgtccctgccttctttaggaattgtttacggtacttcctgcctccaagtttccccatctccaagaagcagctgagtgctatgaattcagatgagctaatatcttttcctctggtgagtctggcctgaccttcgattccacactcttcattcccccacccctgcccctgcatttgttgtaactgttgtgattatgattgttacgcttgttgcagttgctagctctcagctgtgtgctccatctcagccagcctctctcctgctgaaagaagaggagagtttatgatgtgggaaaaaaattggcttagctggatatgactctggtgtgcagaaagccaaccccttcccaccacaggtgctaggagttgagtcatcccttagggatagcaggtgtagtttgacattttatgacaagcatacccactttcttctgccccagtagagggagtaaacctgtcccaggcaacagtgaagagctgaggctcgaagtgcatagaacttgactctcagaaggaggtatagagaaacttgtgatgtgtggaca

SEQ ID NO: 103252 - DNA, 1571 bp, Homo sapiens
ttttttaggaacctgtgcgtagacctcagcgtcctcggtcgccccctttacctgctgtgatcaggaacgcccccagcagacccccttctttgccaactcctagaccagccagccagccccgaaaggctcctgtcatcagcagtaccccaaagctccctgctttggcagcccgggaggaggccagcacatctaggctgctccagccacctgaggcaccccgaaagcctgccaacactctcgtcaagactgcatcccgacctgcccctctggtgcagcaactgtcaccatctttactgcccaactccaagagccctcgggaggttccttctcccaaagtcatcaagactccagtggtgaagaagacagagtcacccatcaaactctccccggtgagacgcttgtcctctttaataccccagcccagtgtcagtagtgtaggaatggaattgtgcagtgtcacagctgtactgggggagccttcggaagatactgaatctaaagctttgctgctgcccctgaggacgggaagccttgatagctgaacggacttgttggggccagacagcacatcggttgcctgtacagcgagctcttcactgttgcctccgagttttggtctgccacaaacttgagtcacctccactggctctcgaagtgtgggcttaggtcagtcatctggtgacagatagcctgagtgggctgcggcagtggtcggtggttcttggggaggtgacagctagttggccaggtagactaaggtgggaagggaattgagaagcttctcctatgatagctttgagcaaaaatccttatggcgcaggggccagtgggttgcctgtgtacattccaagtaatgtcaggcagggattgcagggagtacagctcctcttggaacgactcctttaggctagatgaaatcttcctgctccttagaggctgaacagggcccctcacatcctcacgctcctcttgctctaggctacccctagtcggaagcggagtgtcgcagtttctgatgaggaagaagttgaggaggaagctgagaggaggaaggagaggtgcaagcggggcagatttgttgtgaaggaggaaaagaaggactcgaatgaggtgagtggttgaggtgaggttctcaaagcctctctctctagggcctgcagcccccaccagcagtctgcaccccccatcagcagtctataccatccaccagcagtctacacaacccaccagcagtctaccccccccaccagcagtctgcaccaactctgtttatattcgtgtcatgagccttccagaagcctagtgatctctcaaggactctcagttacacaagtgactaaacatggtgccaggtagggtcttgagtgagactggcttctggcttaaccacaggcctgaagtcacacagacgtacatcagtgaggcttgaaacacatgtcccttgcctgctgtcttgttcgtaaaggtagcagaagggtaggtaccttggacagtgattttggagtgtggctctcaacggggcttggtgatttaaactgtagcacaggaagtcgtgaagatgatggctgatg

SEQ ID NO: 103253 - DNA, 1337 bp, Homo sapiens
agctcagtcttgaggctttgctgagtttcacctgtccctcttgagtgagaaagaaggtcatctgtcctcccaggcctctccagctgcagccaggccaggctcacttggtttggtaccacatggtttctggtgtgcgtggatgactgagccaggatcttgataaaaaagggagaggggctgggggtgttaagagtccagcatattaagtttccatccttcctggaatcagtgtccctgagaagaattagtattctctaaggataggcagagttggagcccgagtgaagatctttgcctacaaagtctggggcatcattgtggtgggcctgtgaggaacccggattacagatagagttggtgggcgtggctgatatgtggggtttttttgctctctgcagatttgtgtctgaaatggagaaccctccccttccagctgagttctgtggaaaaagattaccctgacacctgggtttgctccatgaaccctgatcctgaacaggaccggtgagcacattgtctaacaaggggattgtgggtacttttctcccctgcccctcactgtgtttcttgaggtcagtgcacataccttacatctctgtcttgccacacctaataactgcccaagaaataaaaatagatgtatgtcctgcagtgtataagattaattctgtgcattgggaactctgaggtggttgctcttgtgacagacagtgtagactggctgaagagaaaggtccttgccgagcttggcgctctgtttgccacgacctctgtagtaccttgtctctacaggtgtgaggcttctgaacaaaagcagaaggttcccctgggaacattcagaaaggacatgaagacgcaggaagagaagcagaaacaactgacagagaaaattcgccagcagcaggagaagctggaggcccttcaggtacgtgggtcatggtcagtgggcaaagccagcctgtgtcagggctctgcctgtgacaggaaccttcagtagctttcctgttccctcaggctcagttttaccctccactcacccgcgttgtttgccaaagctttccaaccccaacctccaggtccacgtgtactatttgccaacagtgttattttaagaataacaccttgcttattcttaagaaaaaatgcttatatacttcaaagtggtccaattcatttagaatgtataaaactctagaaaataaaaattctgccttagaggtaaccatcattaaccatacatccttccaacttgtcatgaactcatgaatacctacacataacacacatatattttttaatagaaatagggagataatgccatgtatatgttttatatt

SEQ ID NO: 103254 - DNA, 2660 bp, Homo sapiens
caagtagtgtgggggtgggccgggggatctggcaggacaaaagatttctgtttctcaggaacattggtgatcatcttcaatctcaaactcatggataatggagagccagaactagacataatctcaaatccaagagatatccagatggcagagacgtccccagagggcacgtgagtgtggctgggaagggagggaggccctggaactggcgtttgtgctctcaggagatggcttcagggaaagaggggagagcacattcattgcccagtgttctgtggtagggtagtatgtagggccagctcagttgcctgtggggtgcctgtgctgaggacgtgagaggggcgggatgtggtgctcacactaagggagcaccagttcagggcagcagcagaagtcagtacctaacatggaaaggtggagagcctgcagagaggatgttgtgcccttggtcaggcctgttgtggagcaggtgacagcacttctctgtttttgccctctccaggaagccagagcggcgctcgttccgtgcctatgccgctgtgctctatattgatccccggatgaggatcttcatccatgggcacaaggtgcagaccaagaggctctcctgctgcctgtacaagcccaggtaggggccagtgccccttggcctgctgtctcccatgggtcgaggatgtggccgcgtttctctggggcattgttagagggatgctgtataagaggctctggcagtgctgactacgtttgggactttaagttgcctgtgattggtcacagggtcagttctgggtcctagaggagggacagatcagctgtggaggtggctggctaagctcattgagtatgtgtgcctctgtgacagggagggtgccctgcctggctcagtgagctgtctgagtctcttggctttagggccaaggggcctttagacactatataggaaagcagtgggcttggcttactcctgaggtttgtttctgctgtgggatgaatgacaaccctggtgaatggtgaggttgcttatcaaagacagcaggaggctaagggcaagtggaataaggaactgcacctttttgctgaattgagcttggatttgtctcatcatgaggggccaggacagcacagcttgggaggaggcaggaaggcagggtgcttcctgtgcttgggtgtgccacctgccccactgctgcgtgggccatcagcttgctttttctactgatcaggatgtacaagtacacgtcaagccgtttcaagacccgtgcggagcaggaggtgaagaaagcagagcacgtagcaaggattggtaatgccactctgggtgcaggagttgggggggtgtgcatctggggtatgctgcttgtgggcaaagtggggttccaggaaaaggctgagtccacaactcagggacaaggctggtctcctgaagcatagttcagttcctttgcagcccctttcactacatgccaactccctcagcatttcttctttctacactccactttctcttcttctgccatttatagggcctaaaagtgtcagctctttggcttatcccaattgaagaatcccactgagttctctggtgcaaatacttgtgaaattgcttttcctgacttcagggcaaacatctcaggggctctctcgctgttcagggtttctcagggtttctcggctgcttgttggagagtgattggctgaagacttctttagcttccagctcaagctgagtgttcaactggttgccttaggtgttttttttttttttttaaacctgttctggttcatttgtaaagtttccttggggcctccgtgataggtttgaatgccagattttccttctgtgactgactgccgtccaggcacagaggctgccctcacattgctcaccagccatagctccccctactctttttttccttggtggtgtacacacttcgtgtccagtactgtggatccaggagggatgaccaagagttttgaacctttgcatttcttaccatgttctcttctgggtttcagctgaagagaaggcgcgggaggcagagagcaaagctcggacattagaagtacgcctaggtggagacctcacgcgggactccagggtaaggtcccggcccaggcggctgttctccagcgtttctggcactaggagcccatgtcccatgagcctggtcaagtaaaacacagcttttgagtttgtccccagtgagggctgttttctgtagaaagaagtaaatttccaggtgtggttttacatctttgagataaattgagatgtcttagatgtaatgtttcaatattccctgctgtggcctagagtgccacctcccctcacctgatgtcaatgtgtgcaggtgatgttgcgacaggtccagaacagagccatcactctgcgcagagaagccgatgtcaagaagaggatcaaggaggccaagcagcggtgagtgccaggcctgtccttggatcttttaaactgacgtagcttttggactgattattgacaggttgctattctgtcaccaagactgctttgttttaatgccaaatgcttgtcaaatgcctcctgcaggagggaagtcttaatcctagctctcagcccttttttgagtcataaagacagggcagggctgacaacctcggctcgagcaccaaaaccatcc

SEQ ID NO: 103255 - DNA, 1045 bp, Homo sapiens
gaattttttagaaatggactcttactgtaggtattttttgtatcctatttcatataacactgtgtttatgttgttcatccatgttgatgctagtagtggttagttcatttgtatcactatatagtgttccattgtacagtttaatttggccactctagaatggatatttgggttatttttatttatttatttatttttgagatggagtcttgctctgttgcccaggctggagtgcagtggcacgatctcagctcactgcaacctccgcctcccagattcaagcaattctcctgtctcagcctcctgagtagctggggctacagacgcacgctgccacgcccggctaattttttgtattttagtggagaccgggattcaccatgttgcccagactggtctcaaactcctgagctcaggcagtccatccacctcagcctcccaaagtgctgggattacagacatgagccactgcaccaggcctgggttatttttgtacatgtttactggtacatatgtacaaaagtttctcctagggtatgtacctaggagtggaattgctgagttttaggttatgttatgtgtatttactgattcactagataattgcaaatatattttccctagtggtaagagtagaatttttaccaaattaagaaaatgaccagggacgtcccaagcagggaacttctcatgcagagaccctaagcacataaaccaacatctcctgaaggaagtagtcttgtgtggctgagtcttgggaagaggcagaagccctgaagctcacagagcctctggtgccaggctgtggagcttgggcctcacctacagggcagtgtggagctgctgtggggagggacaagagagatgcacatttgggaggaaggctgttctggggcttcccttaaagtgcctgctcatgtttactccacaggtgatagtcccactgcccacctggaatgctcggacccgggaacctgtcacagacaatgtagagaaatttgccattgagacagaactcatctataagtactctccattccgcact

SEQ ID NO: 103256 - DNA, 1344 bp, Homo sapiens
gtaagacatggaggccagggcttgaaagaaggggggctaagaggttctgtggaaagaaatccgcaacttccacagaagcaggtaattgaattcagacttacaatttaattcatctgtgttgattagctgtgattaaatttgttctggttctgtttagatctgagccttaatcatagcaaacttgttcaggtagggaatggtaggccttccgtcattacgtagcaagccagtgggtttgtctgcctttttggtgtggtatgtgagttcattctgcatacttgagtgagagaagcgtggcagctggaaagagcaggcttctaggagaagtaggataggaaaatatagcctgggttggggttttcaggaatgtttcctgatacaggactgaggatggtgacaggagggtatggaagtcagtagaagcagcctgcttaaggccctgagggctgtgggaggggacttggctgcagggccacctggagaaaggtggtggcctttggagatcagagagggccaggttaggcttgacctcggggccttgatgaatgtgtggggctttattaagcaaggatgtgccagtatcagattcttttaagaaggtccatgtagcgattgtgtggtgattgggttggaaaggttagggtgagtgttggagtgttccagttgagaggcccaggctctgtagcttggcggtactcgcccaagggaggtgagagaaatacatggagtttccatctctttaggatgtgggacccacagatttggtgattgattgattagtagaaggcgaaagcgaagcaggggagtcatggatgactcataggttctgctgtggcagttggggagtggggtctctggaattgggaagaatgaagaggggaagtatggaggggaagagtgtaagtttcttctggacatgcaaagtgcagtctgggtctggcatttgggggaagtctgggggcttcagcattcttggtagcaaacgaggtcacctaatggagagaatagagtgagaagaggatctgggacctagagcatgtcaatatctaaaggtcggggagaggagaagggggccagagggacaaaggggtagccagaaaggtaggaagaaaactgggcaagtgtaccattgaactaaaggagaagtgttcctgaggggagggatggggtgcccatgggagtgaaagccaatgtttaaagtgatgccattgtcacctgggatggctgtgaagaatgggaggcgtagtgaggtacaggtttatagaacacaaatggaactcggttcccgtggtggagaggctaggttgagattttttccttacttggtgctagaaggtcgctatt

SEQ ID NO: 103257 - DNA, 1497 bp, Homo sapiens
cttggagagaggttttcagcagatacacacccctgcttggatttaacaaggctcagacctttgactttgaggaccctgggaaagaaatgcaaacttttcactttctcttgtgtctgccctttcaggtgatgctgccagtgtgatccagtttgggaagtcggccaagcgaacacctgagtctactcagattgggcagtacgggaatgggttaaaatcgtaggtatattagaagcttgtcacagggctcaaacaaaatccagcaatgctgtcctgcttctcttggatgaaaactttccttctccttgtccctctattgactataattctggaactggaagaagtcagaaagtggtggtttctggagtagcttaccagctgttcccagctgaatttactccacagattgaaaagtatgaacatccaaaaacagggcaggagaggctgtacgtttctcttggcacagtgctctagaactgcacctctcctgttgaaaattcttatttttaccctgtagtcaaggatgtgagtgattctcttgtggtgttgggatgtatctgagatgatgaaggggtcaccttactgtgcagcagtgttccctgagcacctgctgcatgtcatgctttgtgccaggcactggggatccagggtaaggaagagagatgtgagccctccgtcccagaggatgctgaatgtactgcaaggcccttatagcagggacctacctaatgtcttcaaatcccatgggactttttcttagccttagttcccagttggttagtgtttggaatgtgttgttctggttttgagtgaagccccaagagaaaggtttctatttctgaaatgctcacttccagctgtacatacctttggatggaataagatttagtggaattggagtttgtgcaaatggaattgtgagtcacgtttccagtcttgtcgtggaaatgtgttgttttgtttgagggagggtggtggtttgatcagtcagcagcatcagttgggccttgtgtgcagttgtgctttgggtgtatggagaagaaagagagtacttccgaagaaatcaggacctggtatccggactttgtgatttgtctttcagggcaggaaccaaatggtaataacagacacttaccatgtgccaggcacacgaataatctcatttaatcctcatgatagccctgtgaggttgtaggtactattattttcagatgaagaaattgaggtttataagggtgaagttactttcccaaaggcattaaaaatgcctatgtgtagagcgctagggtaggaaccaggtctttctgactgcaaaatggagctgctgtgcatttcacttaaatgacaagctaaggttcaaatctcacttccgctactacgtctctaagcctcagcttcctcctttgtaaattgagatgataatgcataccaagtaggttaagaattacatgctatcattgctgtgagagcctggtttctgcctttatttctcctcctttg

SEQ ID NO: 103258 - DNA, 1100 bp, Homo sapiens
caaagagcatttaaaacagatttctcagcttagatagttgtacaaaattggttaactgaagcttgggggagattccgaaatcatcagggaccaggctgcagagcagccttgggcttgcccttgtaataccttacacagacctctttcctcttagaaatgctacctttatccctgtgccagtcagtagactgaatagcatctatatgggaagttggcttgcttggcttgtgtgggtctcctccctatacctctgccttacatccttctcttctttgtgtctaccaacttccttgattccaaggctggtttctcttttgctcacctagtcctcatcattgggtcaaaaggcaccttggaagctagtatagcctgtttccatatttgggaatcgcttctccattgaccatgacatgcttggacccagaccactttcagttaaccactttctgctgcagaagacaactgctgagagaagacgttcttttcactagaatggcagccgtagtttgttgtgttccttttctgttggccaggaaaccccaccacagctgctgtgcatcttattgtcaaaggaccattccttcttcccatcaggcaggtccagctaggaacaaggcacctccacgttgtaccatgtgccttctcactgttgggatggggagccctttcaaggaccatagctagcaggggatatgacagtaaatgcagatagcccagaatgccagtcagcctagggatggtcatgtatagacacagtacttcatcttttagatagcagcttccactgctgtgcccataccatgtctggtttcatcactttgaaggataccccagacttaattcacaaaggaggcatcctgttgagtttgagcagtattgataaagtacagtgtgtggtagttggagtactttagtgcttggggtctatggcatagggcagaagtgatagtaatccaggtggagtgagcagaaggataggatgattgagatatgtgtgaggtatgtgcatattcagtggtagtgggtatgattagatgctggaccagatattcctgccttcaaaggttctcccaagctttgtcatgatctagaaaacattg

SEQ ID NO: 103259 - DNA, 1030 bp, Homo sapiens
agttaatgtgctcgctgataatttcctctttacctctgtgtatacaataaacttattctaattacttttgttgttgttattagctggactgctcatggaagtgtgctagttgtttaaccagaaaactcctgttttgtttcaatcctggttgactcatcatttttccattcaattaaaaagtgttgtaggttaatggaactgtgtttgaatttgccacttgttaatttagtgagaccatgatgtgcggtggcaggctgctttttttgtgtatcatatggtaaaatagagattcttaggagtatgtattcctacttgtgtatacattttgccagtatctctcatatttgaaaatgttttagatatttgagaataggtatatgtagagctgtgtggattttttgcatgtaaaaccagtgaaacggtttcattttctttgcagttggcagaattggactaaattacttctgagcctttatggaagtcttcattgataactgaatctgtatgatttcagccaatggttggagtctaatggggcaggggtatcccaacttcctttcaggtttagggaggttaagattatgggctcaggaatcagtctgctgactgcagtgtgtataccacgagaagtgatttttcacaggttttgtgggagattattgtcttccttttttcttaaaatattgacgagaagaaaaagtggacaagttattggaacatctttttatgattgcaatcaaatgagtgagaaaaacatatttgaatcatttcttagggtataaagggaaatattcttgcttatcctatagatgtttttaccacaaaatcaggatttaaaaaaaatatccaggccccatgtcatgtgatcatcttcaataatttggggcttcagaaatgttttacagatatataaagaaaattgtgttgtcaagtataaaagtaaaaaaaattctaaatgtctatagaatttctgtatggcttcctgaaaacagactcaaaatactctgcattctactcaaatcactatgca

SEQ ID NO: 103260 - DNA, 2010 bp, Homo sapiens
ctcctctctactaaaaatacaaaattagccgggtgtggtggcgcatgcctgtaatcccagctattctggaggccaaggcaggagaatcacttgaacccaggaggtggaggttgcagtgagccaagattgtgccatcgcactccagcctgggcgacaagagcgaaactctgtctcaaaaacaaaacaaaacaaaaaaattgcatttgtaaaaatttggagttacttgaggaagaaaaaacaatattcctggagagtttagttatggatatttatttaataaatgttttacattttgtttgcaatatggtaagcgatcagagatcctagatgctggttatttactattgatatatttcatttaaaaattcttactttaactgaaaattggctgaaactttttactttggctgaaactctatgcaaaaaagtcagagtaacatggatatttttgaaaaattgatggtcatgtattatgtgggttaatattgtatttaatcagaagtcaagtgttttttttttaggtggttctatgtggacacatcctaatttgatatctcatgaggactattgtggaaaagagcacaaattaaacagtgtaaattgcacatgctcaatgtataacttgttagcattttgttttaccaatacttgtgcgtcatctaccagtgaagaaaggaaactcatacacttttgtgtaatttataagcaaaaatatcccatttgaaagagaaggtaaagagaataactcattttatgactttctcagattttggctaaaaccagaactttccctccattaaagaaagtaatcgaagaccttttccaacaattccttctaggatgacaagagcttgcttggtgtggttgcctagggcccctgttaacattaaccccttcaaggaggggaaccagtggtcatctcctctgggaggctgctcaaagtttggattgagtaaatacacagttatcatgttattcaaaacttactatactccagtccgagtgacaagaatgagaacctgtctcaaagaaaaaacaaaaaacaaagttcaatatttatgcataagatatatccttaaaattcttgctctgagatatgcagaaactgaccactggttaaggcaatgaaaaataaaatatacaggcatttttctaggcaggatatgaatagtgaaaaacacttttagcagttactacacataggactctttcaatgcttcagggtgggtttcccaactcaaaataggaagaataatcatttctgaatagatggcaggacttgttaaagattaacaattgaggggagttggggagctctggaaagccttgagtagtataaaaacaatgcaaatggtggttttaagatttttttcaaaaaacttaaatattttataaccatggctttttattaggaattataacttcaataattcttttgctgacttttagtatttatcatttcagaaccactcacgaattcttgtttggtgcccttgctgaactggttgataatgcaaggtatgtagtcttcaggcatacaatctgtgcttgaagtggaaacactttaggtagctgtgacctttgctctctgaagacttgagaggaagacatttctgtagaatgtagacattctgtaactcctaggatgcctcttactaaaaataatatttttaatagcacattagttgataacttccactttcttacttaaattcactaattgttctttgtgttctagcctaaaaatagtgagttatcacctccaaaaccacttcccttgtgtattagagcaagataattgtagtaaaatgcaaggaattaagatagacacttaggaatcatattaatgagacaggcaggctctgatttaatttgtgctagcaggatagtacaccatctaatgtctttaaaactatgccaaagttctgtgtcttctcaaattgtatatttgtcagataactaaatgatcacagtgtctttcattgttagcagctgtgcttggaaggaatc

SEQ ID NO: 103261 - DNA, 1026 bp, Homo sapiens
accacacaaggcacatttctaagcactgtgtggcaggtgctttgtgcttgccctttggagatctgcttattgcattctaaatttctcattcttgtgggatgctatcggaaaatatgtattgctaagaagcagttgaaatttctgttttggttttcttgtcctaatggcagagggtgtcaaaattagttttccagaatattcagattgaccattctcactaccaaagactggaaacttcattatttattctgaagttagtacattctgatgcaagatgtggtctcatacttactatggttgtgctcttgtttttttctggtagctctatttttgagattccttgatttacgttaaaagtacaaactcatgttgaaatgagaagaattgggataaaattggtcattttatatttctatataacaatcctcaaaaatatttagggtatataaaatgaattcactttgtaagtttctaagtcacttatatgtttgataggaaaatgactggttgaaagtttgaaaccaaatgttagattcacttttaaccaacattacctttggcaagtcaccttaatttttaagcttatttctccctagttagtggggtagtttacagaatactttttgtttatttagttggtaatttaaagaatttaaagtgataattctagagacaaatattttttgttctttaaattttttttttaaatttttactgagggggcacaagacagatatttttaataattaaacatatgggccgggcatggtggctcacgcctgtaattccagcactttgggaggctgaggcggctggatcacctgaggtcaggagttcaagagcagcctgaccaacttggtgaaaccctgtctctactaaaaatattttaaaaaattagctgggcatagtggcaggcgcctgtaatcccagctactcgggaggctgaggcagaagaattgcttgaaccctggaggcagaggttgcagtgagccgagattgcgccgcttgcactccagcctgggcgac

SEQ ID NO: 103262 - DNA, 1091 bp, Homo sapiens
tcaaacgattctcctgcctcagcttcccaagtagctgggactacaggcatgcaccaccacgcccagctaatttttgtatttttttagagagacggggtttcactatatgttggccaggctggtcccgaactcctgacttcaggtgatccacccaccttggcctcccaaagtgctgggattacaggcatgagccaccatggccggcctgtagcagtcacctaggttgaattctaacacttaagtatgatgaccctgaaacacacttgggtgaggttgctgattagtgattattcagctagttgatagcatagccttgggaaaaaactttagtgtcctttttaatgtttgaactgccatattaagaacaagcagttgaaggccacttaaatgttcatggatgactgtgtttgataaatggttatctcagctctgaattttggaatgatggtaagtctggaattacagattttatgataatcttggaagaccatgaactggacttcagaatttcagttcttgttccagcttcaccaaagactttatgggataataatagtaacaacagttaattgcttcatatcagtcactattttaaacattgtccaaagcaatctttacaggaagcctttgggataaggattattcctattttgcatttgaggaaactgaggttcaaagagattaaattacatggtaatggctatatagctgccaagtggcagacttaaacggtgccaagatttaagacagtgggatttatctggccacagtagttggtgcttttaaccattaggcagtgcctactgtagtcagttttaccttcaagagcctatttgcttgtctataaagcaaagggtatacttcacagtttaaaagtcttcaattttagtttatctcaatgaatctctaaggactctgggatatttctcccttctttttccccctttgctattttatagcttattgatagatacttggcactgccaaggaaaggaaagaaaccagttaagtcatttgttggggaattttctgggactttgacttacccatgttgaactggaaccacctgcttgcatgaacatttgagggtt

SEQ ID NO: 103263 - DNA, 2028 bp, Homo sapiens
cggggctgtgtgcactatcggagacaaagcggtggctgtggtgtctgtgacggcggcggcagagcagctctaaacgccgaatttcgtgttgctgaatcctgtcaccatctcaactagcgcggcgcgcgggcggcgcgcgggcggcggcggaggcagcggcggcggcggcggaggcggcagcagcacatggttccaagagcgctctgcggctgttgggttccaattccgcggggagggacaaaggcagttgtgagatccgggtagtgcccggtcaggtggtgcgctcgccactgccctcgatccggtccttggaagccgggagtagctcctcttcgtggggaggcggccacgggaccgaggcccgggaagggcctgggaggctgaggctgttgtctgagggacgtgggggcggggcgcggcctgcccgaggtgctgtgggcgggtcatttgtgaggtgtttatgtgggccaagtgtgaggtaatctgaccaccaccctgaactgggtttggtccggctttgaaaaaagaaatcgtgagtgcctaggagctttttcacttgggaggtggtgaagctgcaacttgcgccatataacactccgtcgacatcttggtctccggtcttgggcctgtttaagaatcctggcatcacgtgtggcgaagacatggctgatcagttttctgacagaagtgggtaaatttccgcgttggtaaatttcctgacaggaaatttcggggaaccaaaaaaggctggaagaacatgaagatggagcagtcataaaccacccactcaaggaccatctccttcaggaccatccacacgagactcagattgtctgaattgagctatcgcaacttaatgctaaaagctccttaaagctacagatttatgacatagttccttccaaaatattacatcataaatcattgagaagattaaaaaaaaacacttgaagaaattgtagttttaaacatctctgcatatattttggatagctactaggttactttaactgtcattaaggagcacagacttactgaagctttactggacagaatcctgggaaatcgatatcattataaggttatatttcccagttagcgggtgaagggctggagaccttattgcagtcatggctttcacaaattacagcagtctgaatcgagctcagctaacctttgaatatctgcacacaaattcgtaagtatcctctaggtgccactgaggtaaccagtaactcgttccttgatattatatggaaatcgtttccccagaaaattttgctttttcactttttgagatgtatcccactggagtgaaatgtgtcactggatatcttgagctctgtattgaagaactgagatcagtgaaatacttgttgctaatccagaagaatctgatttttgtttattggatcaaaattttctaaatgcaaactttagttatttgaagtcaatatgttgagttgtttcattcaagtgtttataggaatccaacaaatactgctctattggatcgccaaatgttggactattttagtatcaaccgtttcccctctgtagtgacaacgtcctaaacagttaggtttataacaagtgtttactttctaacaagaaaacagaagacatttaaatgacaactttcaagaagaaaatttttattttttcagaagttggcattatcttcctggcagattgctcacatccaatattatttgtatatgctaaacaggaaacggcaacttgtttatatctctatttagatagtctttccccaaaatttccacagaaacatacagtgttcatggttcttgagttcatgaaggagtaatctaatcactccaacatggtctggaatgtttcaggtttaatccatatgcccactctcttggaggctgtccagtagcgtcaaaactttagtgttttaatacattcacctgttacttttgagatgaaggtaagtgttctaacattctagtacctggagaggagatgagcagctacatgaatggtccagtctctgaagaaccc

SEQ ID NO: 103264 - DNA, 3352 bp, Homo sapiens
cacaactgcctttgtccctccccgcggaattggaacccaacagccgcagagcgctcttggaaccatgtgctgctgccgcctccgccgccgccgccgctgcctccgccgccgcccgcgcgccgcccgcgcgccgcgctagttgagatggtgacaggattcagcaacacgaaattcggcgtttagagctgctctgccgccgccgtcacagacaccacagccaccgctttgtctccgatagtgcacacagccccggccacctcgcacactccccgacgccccaagcccccgaggcctccgcggagcattcagccaatcacaaagctgcagctcctcccgcccccgccctgatgtacagcctcctgattggcgggctgcgtgtccccatgtgaccggatcttggttggccggtcccgcccctgtcacgtgacagcgtgcgcctctcttcctgctttcctgaccctctccgccatttaaagaaacagtaccgggggcgggccgagcgacgcagccgggacggtagctgcggtgcggaccggaggagccatcttgtctcgtcgccggggagtcaggcccctaaatcgaagaagccctggcgcgccctccccccctcccgggtctggtagggcgaaggaacgggcgtgcggtcgatcgagcgatcggttggcggctctttctcctgctctggcatccagctcttggggcgcaggcccggccgccgcggcgcgcgcccggtggccgttggcgctcgcgccgcgtctttcttctcgtacgcagaactcgggcggcggcctatgcgtttgcgattcgacgaggagtcgtccgggtggtcggcggcggcgggcagctgctccgccccgctccgggggaggcggcggcggcagcggccgcgggatttggagcggccggggaggcgggggtggccggggccggcttggaggcctggcgccacccttcggggcctgcaaggacccagttgggggggcaggagggggccggaggatggttggttgtgggatttctactttgccttttcctccttatgccgccttagtgaggggcgggagctctggcggcagccccggggtggggagacgagctccggagtcggaagagctgggttttcttccgggcctagccaccagttggcggagtgaccttaggcgagtcactctgtaatttgtctgcgcctcagtttcctcctctgcctatcaatgtgtgtggggttgaaatcgctttgtaaactataaagcgtgggtgtacgtaaaggatggttattgtttataattttttttgagttgtaagaaaacttagcagttccccaatccttgggttttgaacctgggaaccttggattggagttggggatccccaaacttcctgaaattgtgggaatgtgcggtttgggggaatgatgggaatttgtgggaatgtgcgttttaggggaatgatgatccatcgctagcaagttttccaagggggctgtgacccagaagagttaagaatcacaatttcttcatgctacagagaggaaactgaggcctagatgtcatttgggacccttcacaaccattttgaagccctgtttgagtccctgggatatgtgagctgtttctatgcataatggatattcggggttaacaacagtcccctgcttggcttctattctgaatccttttctttcaccatggggtgcctgaagggtggctgatgcatatggtacaatggcacccagtgtaaagcagctacaattaggagtggatgtgttctgtagcatcctatttaaataagcctattttatcctttggcccgtcaactctgttatctgctgcttgtactggtgcctgtacttttctgactctcattgaccatattccacgaccatggttgtcatccattacttgatcctactttacatgtctaggctgtgtggttggtggtgaataggcttctttttacatggtgctgccagcccagctaattaatggtgcacgtggacttttagcaagcgggctcactggaagagactgaacctggcatggaattcctgaagatgtttggggtttttttctttcttaatcgaaagttaacattgtctgaaaagttttgttagaactactgcggaacctcaaaatcagtagatttggaagtgattcaaagctaaactttttccttggccctccttgtgttctaattgcttgcaagtgtaatactaggatgtccaagatgccagtttttgcttctttgttagttgtcagctgcttttatcaaatttcaggccattatccaacaaacactataaaaatgtttgaacaattggatttcaaacattttcgttttgtggagtggtgctcaccaagtggtacagccctaagcaagtgaacacaaacacatttaagtgtattttgtctgattagatgttagccagttatgctatttcattcaaatgtctgaaaaaatcaattgactattcccttttcctaaagggcagagacagataatctcacttccagagaaatgacttggagaaaaaaaagtgttggtctttttgctcttttgtaattaaatccggatgtacctcaaaagacttaagactgtggtgataagatgctttcctcagcagaaaggagggaaaaaaaacaactggaactcaaagcttgaaattctgtggcaaaacatgagatgtccaggattggaggttgaaaagatttcactacagtgttctgcaatagttggagcagataactttcagtgtagccacagccatggactccagatttccagattttcaagacctggacctggaacccgaaagagcttgtcacgatgcggcaggaacactggaggtagatttttttttatttttgaattttgggactgttgaccttgctgtgagaaaagagacaacgactgagcaagcactaccaccagcactgttactgggaattagaagacctgagtttctgtccagaccctcagtgcaaactgaggatgctccatccaaagtgaattatggtacttgccattttccaaaatgccttatcctttaccatctctgcacttttgttcatactctcattctactttggaactgctgctctgtggcttttcatctgtcaaaactgccattttctcagtatccaactcttatgccctcttttccatgagtctcctaactagccagaatagagctttaaagttttatgacatttcgttatgtatcctctatctgtatacaaaatcctgtaaaatagttacttgcctgcatttactgtctttgcagatagcagactccttgaaagcagggtccttgtttagtgcatctttgcccacatacaccacaacatatcaagat

SEQ ID NO: 103265 - DNA, 6081 bp, Homo sapiens
aagaattaacagccatcaggctgccgatgtgctgacagcagacccacttagagtcctgtgtttgtaattccatgcatttgttattttacctgttttgtccctgccccttctagtcctgtgcctcctgattgctgagtgttcacctggaccttctgactaccttccctgtgctattccatcagcctacagacctggtacctggatttttgcccgagatgattcctaccaccttactactgacgaagacacccattccagtggaccactgtgacccaggaggcattcagccatcatgatgtggcctttacctccactcctgtcttgttctacccagattcagcacagccctttatagtgaagtcagagtcctcaagccaaatagctaaagctgttttatcacaacaaaggcctagtttgttccatgagtgtgcatttcatttcttcagttaaagccttcagagacacacaataaatttggaccaggggattttttagttattaatgctctctgaagaaaggcaacatctttttgagagcagcattggaccacaccccacaatctcaaatgattgaaattcatgaacatctaggatcccgtgaaggtcactggaccctgttttttctacttcaaatcctgtagtagcctactgaatgagaaaacatattctgacccattgggatcaaatcaaaggcacagtgaactcctcatagcatcttctttggaattactcaggaaccagaactttttacacaaatgtaagaaattctaccaaggagtccccttacctaacagcatctcacaaggctgcaccagattccagaaaaggcttctcttgatacatcaaggtagaacctctatggtaaatccctctgtttataatgcactttacagtttcaaagcacttgtacgtacatttatctcaattatcaaaataacagtgaattataatccctttttggaaatgagggaatgtaaattttaaaagttaagcaattatccaaggtgacacagctgtgaaagtggtagaggccaggctttctgacacccagtccagtactctccttggaattagcctccattttacccacagtgttaaaatggctgggtattgggaacctcaggaaattttccagcttcctgatctggtgcccctagtcacataggatgtgtgatcacgtgatagctacatctggaccagaatcccatggcaatatcccacggtttaagggcataatatctccgtggtggtagattgtcaagtcaaaaacgggacatgttctaacagcaaagctacccaatatgaaacacaaagctacttttagattttttaagacttactgatattcctgggccctaagagcttgtctatggtcctatctttgcaaactagtatttacacaaaatgagccacctggtttttttaaagtcagtattgtgtgtgtgtgtgtaaatatgacatggagaaagcttctgttacctagtaagatagtaaagtatgtaagacatggcccttcccccagtctacattgaggtatagtgtattaaaggatctcaggagacttgcagcaaattactactgcttctgtgcttaaattcagaagtctgaaaaaaaaaaaaaaagacttctagtaaagagttccattttgctgtttaaccctttgtgtcctaagtttaatcaaacacagaaggatatttttttgcatcattccatctaatggaatgcagaaactgctctagagcagtataaccagtgcttcctgattgccagcagattgccctggacaccccagaataaacagcatcttcaaaatccccctttctcataccttcttattaatggttgaattagtatgtctctgtcatctgagagtcttgcatcttgaccattacctttattttctgtcaagggaatccctagaagatgtatggggagacataggaaaggaatggaagaaagttaattcaccccaaattggataaattccatgacatttagcaatatacttctgtatccctagaattgtatcataactttagttcaaggacattgcatctcaggtgggttaaggaggttgggaaggggagaaaagggatgaggagatattttcttgagatttatctccttgagataatgcttgagaagtcatccagccatggacttcttggagtaatacttacaaagaattggatgcattttgcatccttaggcaaaaaccccagtgctgttacaactgaaaatcattagccttgttctctgatagatacttacaagcccaactgcaggcaatcaaaatttatagcagatgagttctaactccatcaacctgtaatgtggtccatcttagggaaagaataggaaaacaccttggtttaccacaggctttgcttacagtttctgctttctgtgacctattttttgtatttcagcattttgtgaccgacttattcttagatcattggttttccaaaggctttgtggccatgaagccctttgagtgaaaactgtgcagaagcccagagtaaaagtgaagctgctctggatgaagtagtgaagcaagagtaggggcctgaatcctgctacaactatcttcctttaccaccgtggtgacacctaaggggacttccttacaacaccttgaactcttccgaacacagtttgaaaaccactgccccagacagcaatatgtttgacctgaatggcattccaatcttttctgtacctccactcagcacagttcatgttcagtagatgctgaacattcttagaaatactgtgtgtgaacttagaaaagtgcaagaagacaggcatgtctttgaccccaggaatgatcatttgctgaagatggtgtcaagtgaacctagattaacagccctccactccagatggatatccagtgattcctagaatgggatatagccagagaacaattctatgcaccctacactgacagactcccttaagcaacaccagatgctctactggtacttgaagtacatgactttgaagtcttgaccctccatgaatacctgaattatcagcaagcgggttttgaagctggtgcctcattgaggccatattagagcaacttgtacatttgacctcttgttatcagccatggtactctacttcgtgtgcaagagataactatgaaagccaaattcaaatactggcaacatttcctaaaggggctcaatatctatcattcgtcttcttttccaaactacacatcactgtatgactcaaccagtagcagttatattgccccttggtttttattcagtttaactactgtttccaagataaatgagctaataagctttaaaaaaaaaaaaaaaaaaggctgaattcttttttcttcatcactggcatatctgcctattctccagaattattatgactattcagctcactttaacagttgaacttcaagcgacaatctttgaacaccccttctcatgtgatttaaaatgaaaccatttggaaaagtttcttctagccagtaatagattttttttttaattgctctgccttgtgccgagagatgttcttttaagatgaatcttttgatgtctgataccaccaaatataggtggtagggagagttggaggctggccctttgagcaggccattagcttacttgctgggcatttccgatagcttattgcctacctttttgctggaaacaaactgatttgaaaaacaaaatctatgaagactgcagctaaggattttatcggtagacttaagagcttttgtccttgtggatattttagtggaaccacatcagtctcaatactgtcattttacactgactcagagcagctgacttcattccttgccatgatatatatttaaggcaggcattgtaacagacataaagacaacttatctgtttcagcaggaaggattcagtttatgaactctcagaccagatcatgttgaacaaggagactttgatgtgtgtcatgagaaaactcattctttacttcccagtcaatttaaaggccagctatcctgagctactcgaatgaatgcactggttaaacattggaaatagtttgtttatatccttgtctctctctaggccaattgtgattacatgactcgactctacatctcgtcaaacaaggcctaggtctggttgctgtagactgctcgccctcaacaaataaaatctggttgactagcctccttgtatatacaactattatttgttaagaagaaattatcgtcaattttctactaccttccaattgtcagctctttttttcctctctggtttttcctatactttacagaaaaagacattgatctatactgccattccctctaatcctgccatactcagtcaaaaggaatgacttaagatgaagatgatcatctgctcgagtctaaaatatacattgtatataagaattggtgattagaaaagcaaaaaacctaaaacttaaatctaggagtctgtatactgtctccatgtctccatgcctcagatctcatctaaatctttgaacagcaccattcaaccaatctgaggccttgacttgcttgtaagatgattctcagagatcggctgagttaaaaaagatgacgacttgattaccaaagaaagtagggccaactttgacaaatctggctctgctgaccctgtcactcccagatgtagcatagactcctaaacagaacctcaagtctgattgaggataaggccttctcctgagctgaaagttctttggcagatgagcaagaaactgaaagctgatgtacctgactggctctgtaagatcagaaaactgtatccagaataagccctatggattaacccctgagtacccagagtaaaaactaatttacagaacttccttattgatctgctggttcttccagatcatattctggctattggtatggctggcctttctgaaggtaccctgcttgtctattttcctgactcagctcttgcctgcctttttcacatgttgctgcaattagactcaccgtgaggactacagtcaatttcagtctatcttgtgcccaatacaacaaggatttttaatagtaacaacccacacctcacccactaggactcaatgttcacaacaggaaggaccattgctgcatactccttgaccagcaacttttttgaagatatttttaagtgcagagtaggcctctattcctgtatgtaattgttcattttcagcacctggaacctcatctatcgggtctggaaggaatacagcagttcgaaagccgcgtccatttctctccttcagtagtgcagaaatgagtccgattcaccagtacacacagaactgtaccagttcaacctagcaaaagaagaaaagtttccactgtacttaaaatttacagctgactcaaattgcctcacagaattatttgatgtagaaggctagttgtcttacttcagatcagcaggacagttgggctctcagactcatgaccactgagtttgcttgtgttgaaactgtggtttcatccaacatatgctattggacatgattattattccattcaaatggattacagacttcttgaggacaggacaaacttatctctcatggtgtttttttagaatacttttataaccaaggaagaaaccatgccagctgttaccattcaacttcttaagcagagattaagctttttcatatctgttcttatcctggacatcagtagtttttaattgcccagcatccgttccatcttgtaacaactccctgatgtttcttaaaaccacctcttcctattttcagtctgtggtttggacagtctgacccaaccttgagctttgtgggtgaacatgtaattcagacctcatcaatcagcaaatccatctgaactgtggaggagaagctctctttactgagggtgctttagctttgtaggatgaaaacctcaaactaacagggcctaccatgtagagaatgaagccagtgcaggggaaagcagagccaaaatatggagagacttgaatcctgatgacagcgtttgtgcccctggatccaaccgtgcctgaagctagaatatcccctggacttttcagttatgtgaacc

SEQ ID NO: 103266 - DNA, 1016 bp, Homo sapiens
ctggcttcaggaggtctggacagcagagctggctccaagaatcggaagacacagtgtaccttcctatacctgggggaatgacagtggtggtggcagcaagaactacgggttcagcccacagccagaagctgagcctgcggagtgggtgggggctgggtaggccctgtggatgggtgggtggggcaggaaactggagactggagtgcaccccctggtggtaagcacagcttgggtgggtcttgccaggccctggcttctcaatccaggtccctgccctccctgttttgaggtttagacaggatgagagtccatcccaggccacacagcagactggcggccaagctggcagggctggaaccagagaccccctaccctgggtttggtgagttttccagcaaaccaccctagggcagagggcagcttccagccaggagccacattataggatgggacagtaatggacgctcctaggttagagagggaaagtaaggcacagagcctaagtgcctgtggtttctggaagccccagcatgcctgattcatgtctgtcccctgcagaattctctgagctggtgacaggtgccacaggcactggggatctcaccagaaaggaaccgacggagctaggggccagcgagatggcggacgaggccttagctgggctggatgagggagcccttcggaagctggtaagtggccccatcacccactgtggggacaggaaagccaagccagagaggcagggtcaatccagggtacctctcagctgacaggaagaagtgatgggggaaaggtcaggaggagggggacatgggaacaggggtaggccagttccatgtggctgatgcagaggcccttgtggcatgtgcctgtccatgcctggtactgaagcctagtccctcccaaccctccacagccaccacctgtttaaacagtaactgctgtagactcgcccgtatgcagccacaggtgtggggaggctggatatgcctctccagagcaatagctcgggcaat

SEQ ID NO: 103267 - DNA, 1106 bp, Homo sapiens
tgagccaggctctgcctcctcttgactttaggtatgtcaccaccttctctgagcctcagtttatctatcttgacaggggactggggcactagtgctctaagactagggcaagagggtgccaggctccagccctgaggcatgtgtggcagctgccttggcagcccctggcatgacccaggccccagcccccagctccctgccgccctgcaccctggccagaccaagcctccctgaaacagctgccacctcagctctccttacccttatagcagacggagaggccctgccaggagaggaagggccataatagttggcttggggccttgtcttcaaggggctagggagatgccctgggagggctgcagggctagagactccttagaggatggtttccagcaggggcgaggcagggggaggtggtacagaggagagcttcatagaggtcttggctcagggcagccccagtcagacacctggtcaggagcctacaggccccgggccagccctcttggcaaggtagcaggcagatggggggcaacatgtgctgcctgggcactggcccaggaggacctaggcctcgggaactggcagcacagagcagagcctgcctgggagggggctgggaacaaagcagcaaaatgaactaaggttcaggagttaggctgccttcagctcagatcccaggctgcatcacacttagagagagactgtgggcaagtcagttagctgccctgagcctcagtttccccttctgttttttttttttttttttccggtcttgttttctttgcaacagggtcttactctcttgcccagactggagtgcagctgcatgatcatagctctctgcagcctctaactcctgggctcaagtaatcctcctacctcagctttctgagtaggtgggactacaggtgcacaccaccatgcctagctaattttttatttttgtttttgtagagatgcggtctcgctatgttacccaggttggtctcaaactgctggcaacaagtgatccctcccacctcggcctcccaaactgttgacattacaggcatgagccactgcgcccggccttcccttctgttaaatagggacagtaaagt

SEQ ID NO: 103268 - DNA, 2187 bp, Homo sapiens
tcattattatcactatccattgtattaatacaattcggggtacgtgggaagccctacaacaaaactgtcagtgcctcttccctgactgacgctgacatggccatctttgggcaggcaggctggcaggctagtggttatttccaaggcgtgccagcaaccctaggatctgcttccctatccattggagacatgatgagtttcacccatacccctgcttaaagtccatgccctctccccaccctgcagatggaagcagagccagcagagcctctcgctgcagcagtggaagcggccaatggggctgagcagacccgagtgaacaaagcaccagaagggcggagccctctgagcgctgaggagctgatgactattgaggatgaaggagtcttggacaagatggtatagccagatccggtgggctgggggttggcagaggccagcaggcaccaggtaggcaatgatgggctctatatgcagctggatcagagcacggactttgaagagcggaagctcatccgggctgcacttcgtgagctccgacaaaggaagagaggtagagagccagttgccctaccctagatccagctgccccattccccagctgctcccctcatactctggggtccatttgtggacaccccagcttaataactgccctacccagcttctccttctctagacccagcagttcccttggctattccctgctggatccagctgctccttccctagctccttctctcccgctggtgaccccagttattctccccaaccagcttctcttctccttcctagacccagatactccctcccgcagctactctctccttggatccagttgcctctcaaagtactgtcaacgactccttccctgaatccagatactccttctccctgctgctcctctctccctgaagtccattgatggccatcttagcctctgccccatccagcttcccttttcctggacacaactacttcctcccccagatagttcttccctggacacatctattcattcccttagattctgggttcaattgcttctcctctcaaacactctcaattactcctctgaatctagctgcttctgccagggcccactgatggccaccccagtctctatctctacccacctacttctattttaagcccagttaacccccttcactagcttctctcccagctactcttcccctggatcagattgcttctcagatcccatcaattgctcccttcctggatctaaatattcctgcctccagctgctcttctcctccaaccaaagacctgctgatggcccacccagctacttcctcactcagcttctccttccttggactcagctaccccctcactagatctagatacccctcctgacttagctactcatgcctatagaaaccctttttggatccatacccctttgagtttagctactccgtattctctagtttctgcctgagtccatcaaacccttcccacactccattccctgtcaagttatggctgtcccctcaccccagctgctcctagagaggcccttgttacctgtgtcattcatgtttctaacaagccaccctccaccccgtcttgtgtgccccatgcacctgtgcatctgtgctgtgtgggtgttggtggcccttttgcgcatgcatggggcatcccctgcccagaccagcgggacaaggagcgggaacggcggctgcaggaggcacggggccggccaggggaggggcgcggcaacacagccactgagaccaccacgaggcacagccagcgggcagctgatggctctgctgtcagcactgttaccaagactgagcggctcgtccactccagtaaggggccaaatggggccggcccagggctcagggtgggaacacatcctcccccagccccctgtgcctttcacatccttctcatcccctgcccctgcagatgatggcacacggacggcccgcaccaccacagtggagtcgagtttcgtgaggcgctcggagagtaaggccacctggtgtcgccctgtgcctgcctgcctgtccgcccacctcctccggctcttccttgagctctctctccgtgtcttcaactgtgccgtcactttctcttctctgcctgcggctatcaccacccctccatacagcctcccatcccatctcctgatgtccagcccaggccctcacc

SEQ ID NO: 103269 - DNA, 1050 bp, Homo sapiens
ctcaaagaggacacaaggcaagccctagattccagaatcagtgatgaagtaacagggcctcttgggtggtgggcagggttcaaggccggatcccactcttggagtcccctccttgttgctctgtaggaggccctgagtcaatttctctaaatgagggaaggagtgatgaggcatgaccatagccttagctgggtggcgctgggcctctcagtagctctgtcccttgaaattgcaaatatgggagttgacaggctgacttggaggaggctcatgttccaactattcactcattgtgcaagctacggggcctctttgtgcccagtgccctaggtctggaataacagaatgctgaggggtagacagcaggggggagttgcccccaggttcctgaccagtcctcctacggcttatagcacgtcgacatccagaacttctcctccagctggagtgatgggatggccttctgtgccctggtgcacaacttcttccctgaggccttcgactatgggcagcttagccctcagaaccgacgccagaacttcgaggtggccttctcatctgcggagtaagtgtgggccctggccctgctaatgttgctgcacatctggggctggacatcgggaccaggcccagttgccctgagaacccctggagcgggccagccacattgtcagtcagcggctgagacccccttccccagagagtccccgtccttctccatccccacccccccgctgctgagcgtgccaggtgcccgccggaacgaaggagccgcaggccggcctaccagcccgggccaaagcccaccaggtggccctgtccatatcccctccatcctccctctgcccccttctccctctctctccctttctctgtcctgctctcctcccactatcaccagagcttcctgctcccacgggatcccggctggagattccaaaaggaggctcctggcccgggcaccgtgcccgcccagcctatatagtgctgccagaggcttatataggacctcagcaagccctccactttggaatcgttgccccgtctgct

SEQ ID NO: 103270 - DNA, 1782 bp, Homo sapiens
tacagaggacatggtgcggcttcgagagcctgactggaagtgcgtgtacacgtacatccaggaattctaccgctgtctggtccagaaggggctggtaaaaaccaaaaagtcctaacccctgctcggggccccacggtgagaaacgccgcctctaccacctgccccgtttcaccagaatctgctcagcaaggccagagagggtccagggaggcgggtgggggaagtaaggggggcatttagtcaagccagaggagccagacatagccctgtcttctggcagttcagggcccagcaggtgagaccattctaaatgggcagtgatgacccaggtgggcagcactgtgatgggggaagcccaggggagatgcctgacccaggctgcaggtctgggccccccatctgaaaaaagtgcaaactaagctgggatctgaacaagttcaggctaaaggagggagagggagttccaggcagaggaatcagcctaggcttagcagggcaagagagctggagagcacagcacatcaggaagggaagaaacttgagtctggatatgagggaggagggggccacagttagaagtttgaccttctggccgagcacggtggctcatgcctgtaatcccagcactttgggaggccaaggtgggcagatcacgaggtcatgagttcgagaccagcctgaccaacatggtgaaaccccatctctactaaaaatacaaaaattagccaggcgtgtggcgcacacctgtaatcctagcgactcaggaggctgaggtaggagaatcacttgaacccaggaggcgaaggttgcaatgagctgaaatcatgccactgcactccagcctgggtgacagagcgagactccatctcaaaaaaaaaaaaaaaaaaaaaaaagtttgaccttcctcctgaggacaacaggagttataaagggtttccaaacagagaagggatggatatagcattctaggaccttcctcggatgaggcttggatgagagatgggatggactagatgactggaatagcttaagagctagagagacaggcttcccaatagatctggtttggagagggagagggaaggtcaagaagtctgccaggctcctgtgtgggcactggggagttggtggtgccatactccaaagtggggagctcaggagcaggaccagttcaacaggaagatgtttctggctggggactctggatcctaagccagctgtggcatttcctctctggtcacctcacctcagtaccaaagtaaagaattcagatcctaaactaactaccccattacagacaaggagctcagagagagacgtgggctaagactgtcctgggggtgggagggagagggaagatggttaggtcagagctggggccagaaactgagactccaaactccccacttagtggctgttttccttgccccatcactgtgttcccgcccattttgtagagaggattgaaaatagaggcccagaaggagcaaggggattggctgaaggaatgtgagtcagtgacaggtaggggcacactcagatgcccctcagggcctggagccattgtggggggcagtccacatgtgcacacacacactcagagaaggagcacagatgagtggcggatgggcttggtgctatctccagatcatatatggacttaggagctgctgcccagcaagccagcttggagggagaggggcccagcccagccctgatccagttggaaagtgtgactcagccgtgctgttgctcaagttgcctggtgtttggcctgtcact

SEQ ID NO: 103271 - DNA, 1743 bp, Homo sapiens
ccctaccacagttctgagtttgtccataagggcacgagatgggaggtggtcttgggttctcaggtgtcttgagaataaggagcaattgttgccattatgccttccctgccataggaaactcattcagcaacattgaatgcttgctatgtcccaggtatggcagataggagggatcaaggcagaagaggtcttgctctgggggttgagggacaggggaaaaggagccagagagcagactccagcttcagagctctgggagctgtcagttgcttaataggcacaacccactcactccagagtggggaaaaggctttgccaacacccagaactgggggcctgggtcccatgcggcctagcctgcacttactaagccatggggcttgaaacaaatggctcctctgctctgtgactcagtttccttatctgtgaagggcagctagcattctgaaggatggccagaagggtggtccccccgagcatggcatagatggtccattggtattggctgggatcctcatctgcctcctctgctctacccaaggcaggtgataagggttagagaacccctctgctgcccacacgttccctggcctccatctccagcagcagggttatccccaccccctgtcaaagaataggggtccctgggcctctcaacaggaagtaccagatcaggcagctagcagacaatcatcggtggaccacagggccactagagtgagacctatccatagataaagattggccagtgatgaagcccatctgggtgcaaaggccgagctgagaggcttctaccaactggagtgtgccagtgagggtgagcagaaggtggtctccagggagaacatgggcagggtttggagccagcacctccccagggttggaggaagcagacccaggacctgcctgactgggatggggctctcttctgccatctccgcctccacctgcctagctctgctcccccgccccgagagatgcctccaggcttgggtagatgaagccaggggcttcctgccttcctggaaggcttttccctgtctggagtttatgaaagaccagcaggcaatgcggcaataaaaaagaccttggggtagaggggcgccacgagaggcgggtctggcgctgacatccaaccccgtgccccctccctgcaggatgctggtggactgtgtgcccctggtggaggtggacgacatgatgatcatgggcaagaagcctgaccccaagtgtgtcttcacctatgtgcagtcgctctacaaccacctgcgacgccacgaactgcgcctgcgcggcaagaatgtctagcctgcccgcccgcatggccagccagtggcaagctgccgcccccactctccgggcaccgtctcctgcctgtgcgtccgcccaccgctgccctgtctgttgcgacaccctcccccccacatacacacgcagcgttttgataaattattggttttcaacgatcctgactcctctctgcgtctcctgggggtggggagggggtttgaaccgaaggcagctccgcaaggtctccaactccagcagggatcctcagaggttcttcttccgacctcccaccccacccgcccgcagcaacgaaggagtcgagcctcagttaaggcaggagggaatttagtggagctggggaaggaagaaagtggggttgggagaacctccccaaccccatccctgctggcccggggacgggcatcggctctcagcaagagaagtattcccggg

SEQ ID NO: 103272 - DNA, 1123 bp, Homo sapiens
ttgcccaacagaggctgcagcttggcttctcttttccagctttgaaactctgagagtcccacagaagggagagtgactggtctgaggaccctcatggcgtttgtgtcagggctggggtgagaaccaggtctctgccctcttcctaccaggggggcatagctggtgcatgatgcctaggaccctgctgagttggtgccctctcccctcccctccctgcaggggtcttccagggacctgatctctgttgccgggaacatgaccgctgcccacagaacatctcacccttgcagtacaactatggcatccgaaactaccgattccacaccatctcccactgtgactgtgacaccaggttggtggcaggcagcgagggcccagagctcagggacagggcagagttacccagttcctgggtaactagacattgggattgcagaggatcttaaagctcagccagcttggaccccacagtgcaggtaggaaagctgaggccagaaagaagggatgcttggaccccaaaccacccagctggtagtggcacagtgggctgtgggaggagccagacagccctccatgccccagggtcctgggtatctgttctggggcaggtttcagcaatgcctacagaatcagcacgactccatctcggacatcgtgggcgtggccttcttcaacgtgctggagatcccctgctttgtgctggaggagcaggaggcgtgtgtggcgtggtactggtggggcgggtacgtggccaccccctcatgtccctttccagacagagagggagcccaggctccaagcctggtgagggagagctatctgtctgtctgtcttccagggaatgatgtcccatcctgcatgtcctctcctgagggcccgggatgcagaccctccttgggtgtcccccacaacccagcgggatgggggatgggactggcagagcattgatctccatggagacgaccctgggggcttctggaagggggattcccagtcaccaatttccaccaactgccaccacccaggtgtaggatgtacggcacagtgcccctcgctcgcctgcagcccaggaccttctacaatgcctcctggagctcccgggccacctccccaactcccagct

SEQ ID NO: 103273 - DNA, 1110 bp, Homo sapiens
agctatgattaacgcagaaagaagggacaaaaagctcacaaacactatacaatttcacaagatgcattgcagggggaaaagtgactgagatggatcagcaatatcccagggtcttggtggatgcattcctggtggaaagggtctcattcctggagggggcatgcctactggcgtccctctagcaaggggaagcccaattggtgggcccatgggtggtttcataccaggtggaggaaacataatgcctagaggtggggctgctctgccaacaggtgggggtggagcccccggtcctggtgggtactgtgttggggctccagtaatgctcttctctgtggagtcattacctgctgggatggtcccccaactcctgggacggggcctgctaatccaccaggagcctggggaattggtacaccagctgatactcctctaccagctgccctaacaactccagggcctcctgcagctccagcaagtggtacccgagcaatgccagtatattttgggggtagcccctccacagtcatggataccaagttctccccatgcagcaacaccagaccccaaaagtgcttttcttcgagctctggttgcttcacgttctttggcttgatctttctgaactcatcacaatcgcagaggatcaaattcacatgcttgtcaaacgccttaaagatgccaaagaagattgtgccttcctgtaggatgcatttcattctatagtcaatgtgctgctgcagccttgctactcgtgcccacagtcgtgattgctgcttcaccaaatcccgtgtccacagttaaaacttcgtgcttcttaagacctgggggaaagctatagataaaggtatggtgcaggttctcccagaaacaatgcaagctgagggggaaacgtggtggctcacgcctgtaatcccaacactttgggaggctgaggagggcaaatcacctgaagtcaggagttcgagagcagcctggccaacatggtgaaatcccatctctactaaaaatacaaaaattagctgggtggtagtggcatgcacctgtaatcccagatactcaggaggctgagacaggagaatcgcttgagctagggaggcggaggttgag

SEQ ID NO: 103274 - DNA, 1096 bp, Homo sapiens
cttctagggtttatactaataatatagtcaagcagtcttgaaggtagaaaacagggctgttgggttccagggatagggagagacttttcagcctatatccttttgttgtacctattgaattttgagccatgtaaacgtgttacttattaaaaaaataaattcataaaattaaaattgttaaaatttctgagatgattattattctaaggaccattcacacctcagttgtgaatgtacttaattcagattggtttcctttttgttctctactgagatctgaaggtattggacctttcacatcttttattttgtaatttgagatgggagctctctgtgttgaccaggctggtctcgaactcctggcctcaaccaatcctcccatcttggcctcccaaagtgctaggattacagatgtgagccaccatgcttggcctattttctcctgagtattaacagagtactcactatggaaaaggtggcaagtacatgtaagtattttttaaagcttaagaaatttgtccataagtccactgtccggagactactacagttaatatttttgacctctttttttggtatctttttaacctgctgataacaaataaattcaattttttttttttttgagacagaatctcgctctgtcgcccaggctggagtgcagtgggctcgctgcagcctctccctcccaggttcaagcaattctcctgtgtcagactcccagctgctccaaatcctgggctcaagcaatcttcctgcctcagcctcccaaagtgctaggaatgcaggtatgacccaccgcacctggccacatatatattcaactttgtatacaattttacatcctgcttttttctttttcttttttttttttttttagacagagtcttgctctgtcacccaggctggagtgtagtggtgcgatctcagctcactgtaagctccgcctcccaggttcacaccattctcctgcctcagcctcccgagttgctgggactacaggtgcccgccaccatgcccggctaattttttgtatttttagtagagacggggtttcaccgtgttagccaggatggtctcgatctcctgacctcgt

SEQ ID NO: 103275 - DNA, 1040 bp, Homo sapiens
gaaggttaggcagatctgggttaggtaccctatagggtatgtgagccaggcaggccagggctgaagggcactgagagtcaaaggcttttcttcttcccttagtcccagcccttgctgccttaccatgaattatgcacttgttccttgtactgtgtctacatcctccccagcattccctgtcttcaggtactatgtacacacttctgtcagttcccagtacactgggttgccttgttggttcacttgtctgtgtctccctttagactgaaaaaaaagttttatttctgtatcttgaatgcctggcaaataataggatctttaatgaatctttgaagattcattcctatctactaagtagataggaagattagagggaaccagagaaaaggaccagtgcagccccaatgaaaagaagccagtcctttcagccttctctgttcttctgatcctgtatttgagggccaaatctccatgggctagcctaggaacctaaacaccacttagactttaaaatttcaaagctggtttatgtgtttccaagttccaataaacttattcagagttcttcccattccagccttctatgagtgtgatgtagacattcttggaatgcaggtcccatttctgcctacgtgtggtccagcagcagtctaatgagcagcgtagacaggctcaggcatgccagggttcctggcagaaagcttctgtgtgaataagcatgtgctcacagaaatgagacctctgctgggatcatgcctgttatttatcacccaaattcatagtcttcatatctaagattaacatttctaggtgtctcactacaccctggtctagaaattcttggagttaaagggacagaaaaggcagatgatgaattcctacagttctctagaacttgataattgaatttaagaatgctacagagaaatttcctcatgagatcaagttccctggtggttcctgcagggatattcaactctcgtgttctctttcttgctcaattcctgtgaggtgggccagaccaagtagaccaaaggcca

SEQ ID NO: 103276 - DNA, 1062 bp, Homo sapiens
cggcagtactgtccagcctcagctcggcatcagagggagaccgtgcaaaggggagacgaggaccgtgcaaaggggagagggagggggagggggagggagagcaatttttaattttttaagatttttttttttttttaaaaagaaacacacataggttgggtacttaggattgattgttgagctggaataatgaggaaagatagtaatgtggccctcaaaagtgggttttatcctaagatgaagagagcacatgtaatatgaagaagaggaaggtcagagagaaggtcttggagccgaggccagcgcacgaaactggtgccaccagcatccagctacccttctgggacattatgtaaaatgatgtaactgagtgaaaaagtggtgagctggcctcctctctctgctcaagtcactgagctggtatcgtggtgagggatactcatgaggccagagctctgagtccaccgtgtgaaggcaggaagctttctgggtctgagaaggctgtaacttttttggtccttgtcttctcatactctggaagctgacatcagggtgaccttctggtgttccagtggtaagtcctaaatttgtgaaggggccgcttgttttggaggtaacagtaggttaagatgacctggagaggcacagtctaagagctggagggggccacccaggacaccagggagtccagtgcctcattttacagatgagaaaattatgatcagtagagggaaagggaggttcccagaaccacctagcaagctagaggctgagtccagtatccaggcctccacttctctgactgtggtagccagcgaacatttcctacttggaatttctgaggtgatgagggtggccagataaggctcctgacagattgttaatgtgcatccagaattcctgggtatcccttggtgttggttttatcctctttcttgttcaactcctggctgggttctttgacttggaggtggtggtcaacagtggtctgtttataccagcatttagtggccagtttagtatgtagtggtacggtgcaaacagggtgtccatgagtcccag

SEQ ID NO: 103277 - DNA, 1049 bp, Homo sapiens
gtatcaagattttgatcatgacttccattgttggctaattagagtttcaacatttttgctattaaagataatgtgtagcttgtttgatgttcccttgggcacaggggtggctgtcaatattgctcctataaagcatgtagaaggtgttactagctaatgtgggactatggaaaatatcctcaagccctgtgagtgctgacttatgtcagcagagtgtttcacactgggtcagagccagtcctttttggcccattcatagattcttagctggaagctaaggctaaaagggcagagggcttgccagagttcctctacttcagggtatatatgggaggaaaagctgtcccccaccttcgaaacatgtggcacaaggtagggagaagaggcaggtgccacatgcaagacaacgtgaggtatgttgagttttgacaggcacaggagaaacctgcctgattctcctgcccttaattgcctttcttccacacagggatttcaaggatttggatttggagatggtggcttccagatgtcttttggaattggggcatttccctttgggatatttgccacagcatttaatataaatgatgggcggcctcctccaggtaagaccctatttccttgagaaattaggaagatatcttagtaatattgcttgaaagctccttggaattcagcagtatataagttacagataattgtcactacatggataatcagccttttcaaaatatcttaagctgtttttagatcacttacagacatggtaacaatgctgagcacttaccaactattaggcatgcatatatatagcactttccattccaagctcaggggatcatcacaaccaccctatggaacaggtgtgtgattagctgcgtttaacagatcagaaaatgctcagtaatgttaccaagacataccccatgtctataaaatggaaaactgtaagtgatactcagctgaggaaaagcctagttctgcacatttacttcccactttgaccatttgggggcctggaaatgtgagatgacccataaggagtgaag

SEQ ID NO: 103278 - DNA, 1048 bp, Homo sapiens
acctcaaaaagaaaaaaaaaaaaaaaggccaggcatggtggctcatgcctgtaatcccagcacttttggaggctgaggcaggcggatcacaaggtcaggagttcgagaccagcctgaccaacatggtgaaaccccgtctctactaaaaatacaaaaattagccaggcttggtggcgcacacctgtaatcccagctacttaggaggctgaggcaggagaatcgcttgaacctgggaagcggaggttgcagtgagctgagatcgtgccactgcactctagcctgggcaacagagcgagactacatttcaaaaaaaaaaaaaagaaatctttttgtgtgtaggattctgatgttgtaaagagataaagattgatgctgtcaacttctggcctgagtgggcagtgtgcatagctgcagtgttctaatagcctgttttctcctttctgtctctccagctgtccctgggacaccccagtatgtggacgagcagttcctgtcacgcctcttcctatttgtggccctggtgatcatgttctggctcctgattgcctaatgctgggctcctgcctacatccgtggcagggctctggactggtgacgtgccaccccaactcctggtgtttggcttcctggctaatcttgactcctggaatcagtgggatcagtaacacatcaaggagtcttgtttcttcatcagagctttggaactcgagaccagttggcgatgacccctgaatatcgccaccgctgtaaacactctataacttcaggccttggcattgagtcatctctcatgggtgacaccatgaaatcttgtttcagccagttctgcaggtcctgactctgcagagggaagaggcagaaagagagaaactgtcagagtataatttcacctgagtttaatattacagaaacaaagggatgcaccaaatggtatttctggaaattttcatgtctttaaataccccttggtaagttgcttctgaagccagtgggggctcctcagatagagaggttcccctttcaaatcccagtgccgctctgttctctt

SEQ ID NO: 103279 - DNA, 1051 bp, Homo sapiens
actacaggtgcccgccaccacgcccggctaattttttttgtatttttagtacagacggggtttcaccatgtcagccaggatggtctcaagctcctgacctcatgatccacccgcctcagcctcccaaagtgctaggattacaggggtgagccaccttgcctggcctgtctatgaaattttttctactctgcagtttatctgttaaagaaactaggttatttgtcctgttgcatttcccacagcatcatttttgctatttgcatcatggaaatgttattaagctcctcttctccatgtatttcctgtaagttggttgttagatctagaagcttgaccagattcaagcttattatttttgttttgtaagactacgtcataggtgatagtatatacttggtgcgtcttacctggaggcacttaatgtctggtagtcctactttgtgatgttacagatgccactatatcatttagagttgagaaacaagactgcactctgggcagagtggggcacaaaattacagagaacctggagagctggttgttgtaggaatggcaggtggcgcaaggcaggatgtgctcaggaaaaagcagagtcctggagtgaagggaatagggagacaagtccgcagggtgagatgtagtcagctcatgaggactggtttggcttttattttgtaggcagtggggtgctgttgaagggttttgaacagagagatgacaggtccagaaacatacttttggaagattaacacagtcagttttgggtaggatgattcagggagggcagagactggctcagtttgaagcaagtggaagtgacactgggcaagtctggttgggtaccagtggaccagtaccttcaagagggcagaaccttgagttgtttttcaaggtccaggtttcaggatcctaggctcagagagttgactgtgaggcggctggcaggatctggccctagggactgaccaagctatggccagtgaaacaaactgtggacaggtaacctgggtgctattgaaactcagttggtctactccctgcccaggctttc

SEQ ID NO: 103280 - DNA, 1030 bp, Homo sapiens
gcgtgtgcctgtagtcccagctacttgggaggctgaggcaggagaatcacttgaacctgggaggcagaggttgcagtgagcccagatcacgccactgcactccagcctggtgacagagtaagactccatctcaaaaaaaaaaaaaaaaaaaaaaattccttaatttggcctacagtagagccctccgtaatgtggcctctctccacatctccacaacctcctgctccctgcacttcagcctcacctctcttctggacaggccctccttctgacaagggctttgttcattctgctccctctgcctagaatgcccccttactctgttcacttaactcctgcttatcgtttagatctttacctggatggctcagagaaatatagaagtaattcctcaccctgaaaaataggttaggtccctgttttatgttttcatagacctttcctttgaggctttttttaaaaaagtagttttaatctcacatttattcatgtgatcatctccttaatgatatcttaagacctctaatagaacaatttggtcatggactgtggggtttttgcccctcattgtgtcagcactgagcatattgttggcataggagggatatttgttgaatgaattgctagaggtggccaagagatatgatgtaagtcaggcttttccctgcccttccccttccccttccccacatccttcctatagcagccaccgtggctgcagttactgtaaatggcaagacggaatcagttccggacattgggttgttttagaaaattgcctgcaagtgtcagggtgataagttaaagctttgtcttttgccctcagaggagctatcccatagtgagtagaagccagagaagctgaccccaggagtccttctttccagcagcaggtcttgagctgcacttctctgtagctacaatccaggcaggaacaagccctaggtacctccggagaggagggcaagagaggaagaatgagttcagctactctagccaccaaactgattatgaattgccctgaaatctg

SEQ ID NO: 103281 - DNA, 1062 bp, Homo sapiens
attcagcttcctgggatacttaataacaggaagggtctggaagtagtacctgtataggggatatgagtgttctgattttaatagtcaattcataagtgtacagagggtttgataaatggttaggtcagaaccatcacagaatgtctacacctctttggacattaggaaggtcaaaaacctgaaaggccaaaagctaggcctagattagggtcattcaccaagaaaacatcagccttgaagagttctctgggtggtccaccagtcaaccttcctttgatcacacctccttcctcgttgcttctttaagcattgacctgtaatgggtatggaattttttgctcacctaactccttccttttacagaggaagaagttgaagcccagagagatttaatggcttgcctaagatcacacgcagattttctgttaaccagggtgatttttcaggtgttccctgccagacgagggcttttttccttgaattgcctagagatttcttgagatatccgaagcatttttcccagtgcagcctggagaaggatgtccctgtcaacacagcatttgttactcaatgttagacattcaattttctaattagtatcatggagcaacagtggatgattatctataaggggttgcaattccatgcttatgtgcttacagcccatatagacaaatatcagctgttaaaatgacaaggcagtagagatgtggccccaggacaaaggcatactctgctgttagtgaacactagttggccagcaaatttcacatgggcatatacacggccaactgtagactttaggcatttatacccattcagagagccaaactggcaactaaagatcagcattctctttggcatttcagctttgcgttctgttaaaaatcactgcttgcttaaatacctctgatagctcttcactgcctgtaggcaactctttagcctagcagacttggtctttagtgctctgcccctactctcttccaccattctggcctcctgtctaattgctgcccatatgtgccatgcactagagcttacagacctgctcagcgttat

SEQ ID NO: 103282 - DNA, 1046 bp, Homo sapiens
gtaatgcttacctttcagtatttggaggcttcggagtcctcaaaaattctcttccttgattggagtcctcccagccaatagagggcttcacacaaacagtttcttgggttttgaattgtttgaccagagctttcttccgacaaaaggttggggtgattcattcacttaccacaccttgcctgaacattcacttggggctgccggttatgaaggctattgttctccagcctgtcacagacgctttgaagacctgtgcctcagctggttctaaggagtcagtttgttcagctccgtgccaggtttccaacttatgaaatgtgctggagattaacacctctcctgccattttatccctactataattgccagtcaaaggattcctgcagttgcctctggcagccataactgatgaatgttctgccagctgctctgaggacctagaagagcagttttctatccaggaccagtttccaagggtgggagggtgaaatatatcctccagtgtgacatttcatctcccagtgatgggtggcttgggccctttgaagttggctctgaggaaccacacacttgggtctgagcagccagcagcttatcacatctggtgatcaatccttcaaaggttcctcctgaagtctgaatttttggaggtcaaatggattccacctgggaggggcttctgcttcaactcaggacatggggagaaggctgttcctcttccagggggaggcagttttcatggcattgagatgtcctctcacttattccccacccacccaccaagtcctttgtaagaggagtagggggagaggagagcgcctgcagcctcctgctcacattcctagacaccgactcactgagcccgtcgccgctggaacagcagagctgtgtgaaatgtcaagaggagttatgctcataggctccctggcctcagtctctttgtggcttgcatattcttccattagtactgtgttcatcacatggaaatcagagggtacaattaaaagataatttgctagtcccagacttaatttggggcccccttc

SEQ ID NO: 103283 - DNA, 1091 bp, Homo sapiens
tgacacagatggtaaatggcagagaaggaatatggatccaggtcttgaaagagaaaatctcaactgattatcttttttaaaaaactcatatgttctctgctgactcaaaaggtctctgtgtggatctgggttgacccactgaactgaccatcagggttccatgcactttgtatctgcccaagccctcagaacccctcagtaatgttttggaagatgagttttggaggttgtccttaggcatagcctcagcgtatgtaggcctctaggtgatctcccctaacctgaggatttcagctcaattcactctggctcctcaggacagtgggatgactggttcagacctcagctttaccacctcccagctgggtactcttctacctacagccagggcagattttgactttcacttgaaacttccaaaaattgaaaggtagaaaaacagccttggctttgggaagaacgtatgatgtccatggcctctaagcatctgaggtgggacatgttcgagtagcaccttacagttccaaagtgtgttctgggttctttgtttaaaagaacagagactgctggggaattgaacactgtgaagtatatgaaggaggagaattgtgctatttaacattcagtacttgggctaaaggagaagcatcacgaagtgttaacactcaaagggtcttgagctgtcagggctccagcttccttattttcacaggtgagaatcctgaggctcagctgttgagatgtgctgtctcactccggtgacatagtacagtggatgtggctttgcagccaagcacacatagcttcacattccagctccatcaattatgtattgggcagctttgcagaatgatttgactttaactctgcttttcagtcttctgtaaaacagggataatcctgctaccgtagggttgtcaggattagagataatataaataaggtacctcatataggacctggattatggctggcattcaataaatagtagctgttaattgatagctaagctagaactctgaagtctaccatggcaacttcttaagtggtctgagaacccagttgtgttctgtggcaaaacacagcttagg

SEQ ID NO: 103284 - DNA, 1037 bp, Homo sapiens
aggccaccattagacaagttgagcactggccacactgtgcctgagtcatctgggttggccatgggtggcctgggatggggcagcctgtgggagctttatactgctcttggccacaggtggaggatgcaattagccagacgagccagacacttcagctgttgattgaacatgaccccgtctcccaacgcctggaccagctgcggctggaggcccggctcgctcctcacatgcagaatgccggacacccccacgccctcagcaccctggacaccaaggagaatctggaggggacactgaggagacgttccctaaggtgccacctcccaccctggctctgttctgtcctatgtctgtctctcggatgaagctgagctggctttcagaagcctgcagagttaggaaaggaaccagctggccagggacagactatgaggattgtgctgacccagctgcccctgtggggatcacagtttacagccagagcctgtgcggacccagctgtctgccaggtttccttagaaacctgagagtcagtctctgtccactgaactcctaagctggacaggaggcagtgatgctaaaccctgaagggcaacatggcctatggagaaagcatggagctcagagcctggagtaggggcacagataggattgaataaattgtgtagaaagactttgaaaacaataaagcaaaagatgaatgaacgttttttttagacttgagggaccaacaacccccaaaccccagattctgccaggtccatggggaaggagaagttgccttgagtggaagccccaagtagggagacttacagaaaagaagtcaagagcactggctcccaggcagaaatactgataccctactggggcttcaggctgagctcctcccttcacaaatcacttcatctctctgagcctgtttctgcatctgtgacataagatggtaagataaaggtggctgtctcaccaattatgtaaggattaaatgtggaaaaggacataaagttgtatagtgctgccatagggacagtgttcag

SEQ ID NO: 103285 - DNA, 1018 bp, Homo sapiens
agatcccgccgttgcactccagcctgggcgacagagtgagactccatcaaaaaaaaaaaaaaaaaaaaaaaaattagccgggcgtggtggcgtgcacctatactcccagctacttgggaggctgaggcaggagaatcgcttgaacctggaaggcggaggtcgcagtgagccgagatcgtgccattgcacttcagcctgggcgacagagcgagactctgtctcaaaaataataataataacaataactagccgggcctggtggcacatgcctgtagtcccagttactcaggaggcggaggcatgagactcaggtgaactagggagacagaggttgcagtgagccaagatcacaccactgcactccagcctggttgacagagcgagactctgtctcaaaaaaaaaaaatcccatttgctcattttttggatactagtataactatcactctaaaccagttagtacttaaatcaagcagatatgggagatggtgaattaccatctacagtgttgtcatatatgtcacatactgagcattatcagctagtagaatctagttaattgttctatgtgtgatgtatgcagagttcccattttgaatgtgtttttactatgcttaaataaatgactgatgtcagcaaccccaaaatgatacatctgatgtaagagcccctgttccccaataataacatctaaactatagacattggaatgaacaggtgcccctaagtttcctccctccagggtttcttggccggtctctgaggactacacatccctactcccgtctttcctcatcttcaggcgcagtaacagtatctccaagtcccctggccccagctccccaaaggagcccctgctgttcagccgtgacatcagccgctcagaatcccttcgttgttccagcagctattcacagcagatcttccggccctgtgacctaatccatggggaggtcctggggaagggcttctttgggcaggctatcaaggtgagcgcaggcaacaattgctttgctct

SEQ ID NO: 103286 - DNA, 1049 bp, Homo sapiens
aaatgccaagtgtgtctgtttttttgttttgttttgttttgttttttagatggagtctcattctgtttcccaggctggagtgcagtggtgcaatcttggcttactgcagcctctacctcccgggttctagtgattcttctgcttcagcctcccaagtagctaggactacaggcgtgtgccaccacgcccagctaatttttttttttttttttttgtatttttagtagagacggggttttgccatgttggccaggctggtcttgaactcctgacctcaggtgattcacccgccttggcctcccaaagttctgggattacaggtggaagccaccgtgcctggcctgagtgtgtctatttgatagagctttctgctctgattctcccttgctatacaccttttctccccttctcagtggcttctcttgcctatgcttcctccccagggccaggtttgagaacatccccatgaagtcctgacctgtcttttatcctaccaggacaagactgtggtggtggcagactttgggctgtcacggctcatagtggaagagaggaaaagggcccccatggagaaggccaccaccaagaaacgcaccttgcgcaagaacgaccgcaagaagcgctacacggtggtgggaaacccctactggatggcccctgagatgctgaacggtgagtcctgaagccctggaggggacacccgcagagggaggacagatgctgcccttgcatcagagccctgggaattccaggggaggcctgtgaagcgtaggaccggatacccagagctgaggatatttttcccttgccaggtggggcctcacgatttagctcctgagctcagggggctgggaactgatcagtgtcccatcatgggggataaggtgagttctgactgtggcatttgtgcctcagggatcgctaagagctcaggctattgtcccagctttagccttctctctccatggtgagaactgaagtgtggtgccctctggtggataatgctcaaaccaaccagagatgctggttgggattcttgaaatcagggt

SEQ ID NO: 103287 - DNA, 1021 bp, Homo sapiens
tgttccacctgcctctaatttacctcttttccttctagaccagcattctcgaaattggaggactcctttgaggccctctccctgtacctgggggagctgggcatcccgctgcctgcagagctggaggagttggaccacactgtgagcatgcagtacggcctgacccgggactcacctccctagccctggcccagccccctgcaggggggtgttctacagccagcattgcccctctgtgccccattcctgctgtgagcagggccgtccgggcttcctgtggattggcggaatgtttagaagcagaacaagccattcctattacctccccaggaggcaagtgggcgcagcaccagggaaatgtatctccacaggttctggggcctagttactgtctgtaaatccaatacttgcctgaaagctgtgaagaagaaaaaaacccctggcctttgggccaggaggaatctgttactcgaatccacccaggaactccctggcagtggattgtgggaggctcttgcttacactaatcagcgtgacctggacctgctgggcaggatcccagggtgaacctgcctgtgaactctgaagtcactagtccagctgggtgcaggaggacttcaagtgtgtggacgaaagaaagactgatggctcaaagggtgtgaaaaagtcagtgatgctccccctttctactccagatcctgtccttcctggagcaaggttgagggagtaggttttgaagagtcccttaatatgtggtggaacaggccaggagttagagaaagggctggcttctgtttacctgctcactggctctagccagcccagggaccacatcaatgtgagaggaagcctccacctcatgttttcaaacttaatactggagactggctgagaacttacggacaacatcctttctgtctgaaacaaacagtcacaagcaaaggaagaggctgggggactagaaagaggccctgccctctagaaagctcagatcttggcttctgttactcatactcgggtg

SEQ ID NO: 103288 - DNA, 1043 bp, Homo sapiens
caccattctcctgcctcagcctcctgagtagctgggactacaggtgcccgccaccatgcccagctaatttttttaaaattttaatttttagtagagacggggtttcaccgtgttagccaggattgtctcgatctcctgacctcgtgatccgcccgccttggcctcccaaagtgctgggattacaggcgtgagccactgcgcccggcctttttttttttttttttttggtagagatgaggtctcattatgttgtccaggctggtctcaaactcctgggggctcgcatgcaatcctcccacctcagcttcccaaagtattgggattataggcgtgggccaccacatgcggcctgatagctcatttccttttggcagtgaataatatttcattgtttggatgtaccacagtatattcatttatttacctactgaaggacatcttgattgcttccaagttttggcaattatgaataaagctgctgtaaacctgtgtgtggaggttgttgtgtggacttaagttttcaactcgtttgtgaaaatatcaaggactgtgattgctgaatcacatggtaagagtatgtttagttttgtaagaaaatgccaaactgttctccaaaatggctctaccatcaattttgcattcctaccagcaatgaatgaaagttcctgttgctccacatccttgtcagcatttgttgtctggattttggccattctgataaatgcgtagtagtatctaatcgttgtttaaatttgcatttctctgataacatatgatgtgcagcatcttttcatatgcttatatgccatctgtatatcttctttggtgaggtgttgttaaggtctttggtccatttttaaaatgcattgttttattttgtttgtttatttatttagagatggagtctcactctgttgccaggctggagtgcggtggcgtgatctcggctcactgcaacctctgcctcctgggttcaagtgattctcctgcctcagcctcctgagtagctgggaatacaggcgtgcgccaccacgcccagctag

SEQ ID NO: 103289 - DNA, 3238 bp, Homo sapiens
cacagtgggtatctcactccagggcagtgagtgaggctttagggcactgccgagatccagcctccgcctcctcttccccagccctcctcctttcctcctggccagcccccactgtctggagccctgcagggatgccccgggccctgggcagaagaagagccctgcatgatgagtcactatgggcctgtcactgcctgctgccctttaggatggtgtggagctgcggctgaatgctttctcctcttttgacccagtgggccggtgggagccaatgtctggcttctctcacagtaggagtggttggttactgtgagtggccctttctggagagcctctggctatggttgtgagatgcatggcaataatgagctatctgactcctctgacttgggagttggtttgcagaaagctccccaggcccaccttcacttgttgattcaggttgttttgtggtatgtcacgttgtcgttgccttggggatgaggccaggggcttggcagatggtagaaacagcagagatggcatgctccatgctcccatcacagacctcccttcccggcatggctctctggacccaggcaggaagctgctgattggtggaggactccagtgtgggccgggcaaggcagagcagccagggttgtctcttggcccagcttgtctggggcctagggtggggacacccagccgactgagtagtacagagttgctttcaatctctgtgcttgggctgcttggccctgaaaaggttttggcagaaggaaggcggtaaggacagggctatgtttgcagcattaggaaaaggattggcttctgtctgagccattgatggggtctacccaggttgaggacctaatggctctggttctgcctgtcttgctagggtgcagctagtctggtgcaggaggcgaggctactattacactggctcggcatcatcagaataccaattttaccctcagaggcacccaaaagagcgcctaggagttgggggtctttgagttgttctgggcagctgtagcagagttgccctctctgtatcccttccttgaagcaggctgagatgacggtgagcagtacatgtgcagctgcatgaagagtccacagcaagggaggctggcagccctagggccctgccgtttcacccctgtaggcactccaggctcccagactgaccagctgaccctccgtgggttctgccagggcagtggctggccaatggctgccctccacaggtctgtgagctggcccctcatgacccctccaggagggggcatctccagagcctggcctcatcgctctcctatattttgttttttcgtagaaggccagaaatgctcacatcaggatccgattgagagctctgactcctatggtgacctctcagatgccagcgacctgaagacgccagagaagcagagtgccaatggctctttctcctgcgacatggcagtccccaaaaacaaaatggagtctgatggggagaagaagtacccatgccctgaatgtgggagcttcttccgctctaagtcctacttgaacaaacacatccagaaggtgcatgtccgggctctcgggggccccctgggggacctgggccctgcccttggctcacctttctctcctcagcagaacatgtctctcctcgagtcctttgggtttcagattgttcagtcggcatttgcgtcatctttagtagatcctgaggttgaccagcagcccatggggcctgaagggaaatgaggcagctgctgtgtccccacggaaacaaccatctggggactgctgggaaatgctgtgaatgcggagggaagtgatgtttgggttctgtagctgagagatttttattcatttttaactgccccccaaccccactccaactccttctccaccacccattctcccaatggtctttagaaatagattttcatctgatattctgcagaaatatcaatgagacttggtatgggacaggggcagaaaacactacataggcctccaaggcaaaaccagtcccagtttctttaatgggaagaagctggaattcctggtgctcaattcttagtgaccccaatcctatacccaaatctatgatattctgggacctcagtgattttggtcccctcccacttctctagttcgtcatcctcccttcccatatccttcaaaagaaccacactagggtctccacctacttatacaatgcggatgcccaactgtttttaaggaagccagaagcatcccatggaccatggggtgagtgtcctccaagagccccctgagctcagccctctgcctggagggctccagacctttctgagccctgcttggaggcgagcattttcactgctaggacaagctcagctgttgaggacacccccaccccaaatttcagttcttacgtgattttaaccattcaacatgctgttgggttttaattctctaattattattattattgttattattttttaggaccagttgtagtgaattgctactgaaagctatcccaggtgatacagagctctttgtaaaccgcagtcacacattagggttagtattaaactttgtttagatgtaccataattaacttggctagttgattgtttgaagtctatggaagaaatagttttatgcaaaattttaaaaaatgccagtctggtcagggaagtagggggtttcaatgctgttgggaaccaggaaggtgggacagccggcaggtagggacattgtgtacctcagttgtgtcacatgtgagcaagcccaggttgaccttgtgatgtgaattgatctgatcagactgtattaaaaatgttagtacattactctatctgctcccttgagtccagtttttcagctgtgggggtctttgggacccagaggtgggcagtccataccccagcacctggggtgggagtgggatcccaggagaccccttttccacttcattgcaccagttccactgggattgacaggtagatggtcccactgaagacttagaatgccagaattcacccatgtgttcaacaaatatccactgcttgtcttcactgcttgtgtgccaggcatggtttcatgctcttgagatatggtggtgaacaagacaccactgtgaggcttaatgggatagacagacaacttaaatatgagttcagataatgagaaatacaaggagaagaactgggcaaggtgaggggacagtgacagcaggagggtgagtagggtggaccagggaggt

SEQ ID NO: 103290 - DNA, 1033 bp, Homo sapiens
cttttttttttgagacggagtctcgctctgttgcccaggctggagcgcagtggcatgatctcagcttacaggtgcctgctaccacgcccagctaattttttatatttttagtagagacggggtttcactgtgttagccaggatggtctcgatctcctgacctcgtgatctgcccacctcagcctccctaacctcacaaagcctcttatttctttatctgtaaaatgggtataatagtaatctgtagcacaaagggtgttgggcaaattctatagaatagtgcatgcggtgtgctgggccctggtgtgccatcagcacttcctaaaggtgaacctttattacagttccagcagcattcaaaataccatgccaattcagacttttttaaaacaaatctcatgcagacattacacagtactcttcagcctctgaccctttaccctttagcagtggatctcactgttatcctgtgactgtgtaattttgaaagtgaatggaaacacctgatgatgagtcaaccagatctgaagtggattaaagggacactgtcagggtgctggcaccctaagtgggccttatactaaaaagcttcagttcctgctaaaagcaccttctgatccttgactacagtggggtttgatggcatacctccttcctgtgaaacccaagtcaaaatccttttatcggcctgcctgattctgtatccttggacgcatggctgctgtggaagttggcccaagatgtgttcttcccagcctgagatatctcgtggatcagactgaccgaagcatctgggaggtgggctggaacagtcccaagaaggccggattgtcctcccccaaaataaagacagagatcatccgtgtttcttctcctgtacgcgaacctggtggatgctccaaaatcgaaccaaaacactaccatgaataagagatgactgcactcctctgacacaacttcctatttttgtctttgttcttcaaaaggtctaaacagttactaaatcctgttatgctgaaggtggggaagttaga

SEQ ID NO: 103291 - DNA, 1154 bp, Homo sapiens
tattttagagaccccacaagggattaaaaaactaaggaaaggccgggcacggtggctcacgcctgtaatcccagcactttgggaggccgaggcgggtggatcgcgaagtcaggagatccgagaccatcctggctaacatggtgaaaccccgtctctactaaaaatacaaaaaaaattagccaggtatggtggcgggcgcctgtagtcccagctaccagggaggctgaggcaggagaatggcatgaaccctggaggcggagcttgcagtgagccgagatggtgccactgcactccagcctgagcgagagtgagactctgtctcaaaaaaaaaaaaaaaggaaaaaattaccttctaaagtggtatcatcatattatcagaaagttctaatatcttgtactgattggtgggagccaatgtctcctggttctgctttgttttaggggactctacagtaccaccccaaggggcagggctaacagcctctttcccattagccttgtctcctcactcctgactacagcctccctcttagggatgtctacatgggaccctcttacaccaatctatacccatgatcagcctcaggcagaccactgcggtcatagcacaggacaacttgctctaccaggcagggcaggacaccagcacctggtctagacagatctttgaagtagctgtattgggaaaggaaggaaaattggcccaatcccacatttcccttcagaaccactaactgctgctgtcagaggagaacttgttaaataaagttcccacaggccagccctgtttttccagcagcttccattctaacataccattatggtcgaaaaatacatgagtgtaaatggtaataatgaaacctattgtaaaagtccactggatatttctagggctcagggctaagacacaggaaccaattaacccatttatgctggaggttacaaacttttttgtgaaaaatcagactttaatgatgatcttgagcagtaggatacaaataattcctaaaaggttagcgtcccaataatggaacatgaggcataagtgggttaaagcatctgcccagtagctaagggccaagttctggtggcacatgatcctggggttggagtccaggctctgccactcagtagctgtacgtgtgaccaggtta

SEQ ID NO: 103292 - DNA, 1051 bp, Homo sapiens
agagcccaaactcaggtagattgtggccttgagagaggaaagtggaaggtgctctgagcagggcagcatgcttgaggacaaggtgggcctaagtagtgtctaactctgtggcagtggtgttgtgttgggtgaagtcaagcctgtccccaaggttctgccgggtctagttggctgttggaagtgctagatgtttgtgttttgcaagcacagcatcagtggaggcttgcactgtgtctgtgctaaaggaggttggagcagctatctgtgaacgtgaggatgcttctgcatggtgtgctttgctttggccagtggggagcactgggatgtccttatctcctggggcattcttgcttgtcccaatgcttccgaaagcctgcttagtgggtgcagcactgaaccaggagtcaagagacccagggtttagtcccagcctctcactaggtggcctcgagttctcccattccctctctaagcttgagtttcttcatctctcaaatggggttaagaatagccccctttcccacctcacagggctgttatgaggatcccaggagacaaggtaggtgaaaggagccgcacacttgggagactctatccttgcactttgtaacaatgttgggaaagacatgcttgttgacactctgggttggaccaggcacaacactcctgcaggccttggcggaatcgttgggtgcctgtgctgtgttcatgtgccgaggtccacggtggaaggagattgctgagtagctgggtgttcttggtgtcctggaactgggtccctccttgcagcttcatacctggggtttgtaccaccaggacacctgctgtgaaagcagggaagtagtagtgaaggtctcttaagctgtctgttctgttttctgacatgtcattagagcccattgctgacaggagcttcctccaggttgcaagcggtgggcttgcgcatgcagggagagttatcaggctgtggctgactgtcttgactggggcttccccagccctagaaataatgtcgtttcttgtcttgcttcatcctaacctggcttcctga

SEQ ID NO: 103293 - DNA, 1532 bp, Homo sapiens
ggatttttttttttttttttttttttgagaggaagtcttgacttgttgcccaggctggagtgcagtgacacgatcttggctcactgcaacctctacctcccaggttcaagtgattctcctgcctcagcctcccaagtagctgggattacgggagtctgccaccacacccggctaattttttatatttttaatagagatggggtttcaccatgttggccaggctggtcttgaactcctgacctcaggtgatccacccatctcggcctcccaaagcgctgggattacaagcatgagccaccgcacccggcccacagacacttttgaagcctctggcccttgctgtctgctaattctcatgtcgtcagaattgccactatcatttaatgggctgctttttcaattcaaactcgtgaaaatattacgaataattatctctgcactttgtcctgcctttcctttccatttccctggccaagactaatgtcacttttgaataaaatgaacaaatataattctttgtataaaactaggggaaacccagggatacagaacaggaaggctggtttatatgccaataactcatctgtaaattcatgtaaatgtaattctgtgcattatagctaatgcacctaaagtcaattcttaatgtctaaggatgagcaaatgtgtaactcttcattgtgtagaggggtatagagcttagcttgccatgtcctgggtacatttccagtagtcatttagttagtaccagtgattcccactcaagtgtcccgtaaggaggtaccatgggaaataagagcagcctcttggcattctgggtagggagcctgagccaaactctaaagctgtctttataaagggaggtcatgtgatggccagaaattgcctttgcttcatggtgcacttggtggggagtcaggtgtggggtgctgggtttcacatcatcccattttcttttctgccttcagacctgcaatgcttcttttgccacccgagaccgtctgcgctcccacctggcctgtcatgaagacaaggtgccctgccaggtgtgtgggaagtacttgcgggcagcatacatggcagaccacctgaagaagcacagcgaggggcccagcaacttctgcagtatctgtaaccgaggtaatctgcccactgtttcctcacttccagaggatgggcctgagcgtgtatgggaggcctaggggtgtctcaatcaccctgcctcagactccactctttgcacagccaccccctacttcccactgaatgataaacaccttcatcacccaactagctatttgctacctcttccttcccaagaagcttggggtgcttagaatgggaagtcccaggagaccagcaggtcaaaacagaaggagagaggttcttcccaagcttgggcccataactctcacctgctactcagatggcaggatggatgcattttgcagacaccactgaaccactgaggttggtgggggagttagtaggtcccaaagtgagagaaaaagaggttggtccggcttgagagc

SEQ ID NO: 103294 - DNA, 1866 bp, Homo sapiens
caggtgtgcctggacttggttaaacagcaggggcacctgttggcatagtgtggggatgctgaaaacataagaggtgaagagacggctctctgggagttcattccttgagttccccactggctaggcacagtccgtatcgctcatcccctcctgatgccagagagaatgaaagaggccagttacagagactagtgccatagcttaagtagaaaggccatctgaatgtaggggcaggaagcctcaggcttgacagtggcatgtctctttgggacttggcctgagtgtccttaactggcccagatgccccaggtactgctggatttatgagcttagtgggctgggacatttcccccacatggagttcaacctgaagctgagaggctggagcagctcagacctccctagcttccacgggctccacttcttgggggctggttagagaaggaatgcgttgagatgggcatatgctcgagaagaagggggccaaagagcccagggagctgaaccttcatgcattgcccttagagttttccagggctgtgggagaaagctgcttgagactacccctgaggctgcctgagttcaagggctactaagggtgggggtgtgcactagtgcccttggtaccacttgggccccattcccaagctgctcaatccttaggaagaaaagctttaggaagtctgggaagggagcaggactggggctcagtgttgagtggtgatgacctgcactcagggtgcctgggccaggacctggcaggcatggcccttaattacagcaggctgtctaactaagcacagggctgtgggccgggcagctcttccgagtgccacaggcagtcaaagcattctgcctctggctcactctcttcccatcagcgtccctctgtcttctccctgtctctaggacaaagaatgctcttctcctgacaccccagcatggaagttctggatgttccctttgagatctgtctccctccgccccttctctcctgggttgtgtgaccaggctctttcatgttctgtgttgtctgaacttctgctgtgcctagactttggactttcacaggctccccagaaaacctggggactgcagcagcagagggtcaatcctggcacagagaagccaacaatcacttcagcttggctttgaacacagggaaagcgtttgtcatgtttgtgttttttcccccagcagcagatttacattcctaattctgtttgctcaggcgaaagttagctttcattccttgagagataatcaatggaggacagggtgggggaagccagcccagtctgggattttaattttgcttagctaatccccaaatggataagccacttgtgggtaactgaagtttggctatccatcatctttaggtagcaaagcatgacaggcaaagcctttagaggacagatcccaaaagaaggttggcaagagaaacaaggcatctctttcctatccctcttgtggctccctctcccagagactgtggaagacaaaatcctgaatatgctttcagcccccgagtagctgggactacaggcgcccaccaccatgcccagctaatttttttgtatttttagtagagacggggtttcaccatattggccaggctggtctcaaacttctgacattgtgatccacccgcctcggcctcccaaagtgttgggattacaggtgtgagccactgcgcctggcctcagccctgttttcttacacctgatccatgttggttcctttgagttctgaggcttagaacacaccctctctcaccattggaggggtggtctttgggtcgctgcctggcaaagctagctcttgtccccaaataaatcaacaggtgtacctctctttcccggg

SEQ ID NO: 103295 - DNA, 1032 bp, Homo sapiens
ctgcactctctgccctttttccaggtgtgggttgggagcagcagcggcctgccgcccctggaacctcttcctagcgacctgccatcatgggactttgcccagcctgctttgtggaggtcgtcccattcggttcctgacaccgccttttccctttctctaaaaaaatcattcccagcccttgaaaacctgggcccagcacactccagcaacactctcttctgcccagccccgccgggatatctgaggcagggctggaccaccccagagggcagcagggcctttacccagtggcctgttggctagcctgggcctccctggagagggttgacagtggaagggaacaggaggggcatttggcctgagacccctgcttttgggagaggctagcagggtggttcctgcccagcatgcccagctcctccctgggtgactcggagtctttcccatgtcagagcccccaaatgggggtagcaaggagcacctttctggaaccccctatagcatccaagtttctttctgggctctcttgccttttcccccctttcacagatggcacccctgggcatctgtccttgcctaggtgattttggaggttggtgccttcctgggaactagccaccagcttatctgcttcccttcccctggcatcacttcccataggcctggggtttctagactggggcctggccacccctttccccactccacgagtgagtcggcctccagagaagactggcacaattccaactagagtcaacccatgctgccctctgcccttcccactcagatctagatcctgctttcatttctggctagtgaagtagacttttgtgtttttgaggtttattagcaggtctgctcaggaaccaaactaatgagtagctttatattgggccaccccaatatatggctttgggggctgaaaaagcagatgtagaccccctccctcggatccttattggtgtgccctttagcactccgcagactctgcggggtgaacaggagtgatgataaaatttttcattctaacat

SEQ ID NO: 103296 - DNA, 1062 bp, Homo sapiens
gcacacttctgagcggcctcacaagtgtcaggtaggggctgggtcagggcagagatgggctgaaggagatgatgctgttctcacggtcgcagccttgagccagccgctgcgtgtgccgggggcccggctgaccgcccaccgctttgcacacctcccctctgttcctccaccctccctctgctctcctcctttgttcttcccccaggcccccttcccccacagctgacgttcctccttcctggttgcttggtcctggttcccaccctgtctttgccttcactctgttgcttggctttcctctcctggtgtttgccggctccttggatggtgggccgtatcacacagatgttgtgttgggagacccggcactgcgctgggcctgactgttggtttccagcagtttgtagggactgcaggtttttttaaaagggctcctggtggtccagccaaccactcttccccttttctgacctcagttagagctcctcctgggtcccctcagcttagggcacaaggcagtgggggaggtaggaggtagggagtgggtggtcccctctcccacactggcatctgtttaacccatcctaagccagggtttctggaggactggagagcaaagtgggctcttcttcttttagctctttgcaaagtagcaggtaggaaacgctggaccagatagattctcacccttggtttacctgcttgaacaatatctgggggccctgctggtacccaaaagattgagtttcctctcctggccactgagccttcctgtgtggatagcgaacacacctctgtcttctccttggttatctcccctctcccatgccaagttcccatcaagtgagggcgagccatgattgtggggtgtgcactgcagtctctgataggataacctgcttctccttatcctgttggtggcaaggggagagggttcagggagaccagcagggagggatgaatgtgccgtaagtagggcagagcccctgggggtcaggcgtggacggtgttcacaggtgctgggctaggcagtctccctggaggatgacccagggtgggcct

SEQ ID NO: 103297 - DNA, 1091 bp, Homo sapiens
gtgtatcatcttaaccggcacaagctgtcccactctggggagaagccctactcctgccctgtgtgtgggttgcggttcaagagaaaagaccgcatgtcctaccatgtgcggtcccatgatgggtccgtgggcaagccttacatctgccagagctgtgggaaaggcttctccaggtgaggaaaggccccctcttcctcccctgccacacgttatcttagtcctgaaaaggctcctgccaagatctgggggtgtgggatttgtgggggtcatttgaccttatagaaccatgccaggtttgggtagagtgtttttaagggcccttattttgagatggtatgcctgagacctgctttccattccctcagggaagtttttttgacgctaagtgtgccctactgtctctcctcctggggccggattcctcaggccagagccaccggacctcaccattcttcccccagggctccctttgtgtttccggcaccaggcgtggggccccctctgggggcgggagactgggctcctccagcgacttccccgcttgaatggctgccgagggaggtactggaacaagtgcatctgggactccctacactcttgaggcaccagattccccaacacagaacactggccatcctgatcagtagactccagctgtgcctctcacaccaccctgggatcatgggacacagagctggtcacccagagctgctgcttaacaccaaaagctttgatctgctctgacctggtagctctagagcctaatgggacccacgagcccctttatgttttcaggacagaaaggaatggggacaggatctctatgtaggttcactttctagttagcctgttggggaactgaggacttgtctgggagcagagggtgattttgtttttctcctaaaaggccggttttaacctggattgtaggaccttgtgtgtgtgaacacagggatggagaactccctcagagggccccgaccaggaaccagtcttaccggtcaggcagcccctgcccacctgctcaggcgggcatctggcttaccagcccagctggggacttaaggctccactgctggcctctggggact

SEQ ID NO: 103298 - DNA, 1745 bp, Homo sapiens
cgggggctcaggctgctctagcattggcggatctggggaatggggagggggggcaggaagcggggggagcggactgcggggggggggtgtataaatagggaaggggggacgtgcatcctcgtcttggtgaggggggggcgctcggcacaaagaaagtgtaaagtttgcagcgccaggcggcccgggctaggcatccgggcgcgcacgtgcaaggccggggacgccggggcccccactctgagctcgccgtttcttttttttctgcaagcgagagggggggtgttgttggtatcgccccctccttctcctccccccaggggtgaaagtgcaagaggaagtgcagccgctgccatctttcctccgctccgaacacacggagcccggggccgcacagccgccgctccgccgccgccttctcccggcctgaggaagggcctactctgccgccgccgccgcccgcccgctccagccgccgccgccgccgccaccgccctccaggctccgggacccggcccgcgccaccgcccccgtgcgcgccccgccgccgccgccttcgccttcgccttttgtttcctccgctccggcgcccccgccccggctcgcgctttgcaggggacgcagcgcgcgcccccagcgggcccgggaaaagccgcggcgcgcgcgcgcgcctgcgcggcggacccctccttctcctccccgcgtgcgcgtgcccttcttggctgcgcgccggcgccgcctggcgggcgggaggggaggtggcaggcgcgtttgcaggaggggcgcacctcttcgctcgcgcacccccccggaaggtagaccgggaaggggaggcgggcgggcggagaggagagagtggcgcgcagtccagcgagggcgggggttggctatgtggggggtggtgcaccccgcagtctagacagtctgatccgggctgggggcgtgtacactcggcgcacctgcgagactacagagcctcgggccggcacgtgtggggagtgtggacacgtctgctgcgccccgcttctcgctgctgaggggaagggagggggcgggcaggtgcagcggccgggctagtgggagggggcggcggccatggagcgggtgaacgacgcttcgtgcggcccgtctggctgctacacataccaggtgagcagacacagcacggagatgctgcacaacctgaaccagcagcgcaaaaacggcgggcgcttctgcgacgtgctcttgcgggtaggcgacgagagcttcccagcgcaccgcgccgtgctggccgcctgcagcgagtactttgagtcggtgttcagcgcccagttgggcgacggcggagctgcggacgggggtccggctgatgtagggggcgcgacggcagcaccaggcggcggggccgggggcagccgggagctggagatgcacactatcagctccaaggtatttggggacattctggacttcgcctacacttcccgcatcgtggtgcgcttggagagctttcccgaactcatgacggccgccaagttcctgctgatgaggtcggttatcgagatctgccaggaagtcatcaaacagtccaacgtacagatcctggtaccccctgcccgcgccgatataatgctctttcgcccccctgggacctcggacttgggcttccctttggacatgaccaacggggcagccttggcagccaacagcaatggcatcgccggcagcatgcagccagaggaggaggcagctcgggcggctggtgc

SEQ ID NO: 103299 - DNA, 1052 bp, Homo sapiens
cacaaaggaatgctgtaggtgatggaaatattccatgtcttgattggtttggtggttacacaggtatatacatttgttattgaactgtgtgctttaacatggatacaattaaaaaaaaattgtacctcaataaatttggttaaaaatttgctaaccaagggtgggcgcagtggctcatgcctgtaatcctagcactttgggaggctgaggtgggcggattgcctgagctcaggagttcgagaccagcccaggcaacatggtgaggaaacctcgtctctactaaaatacaattagccaggcatggtggcatgtgcctgtagtcccagctactggggtggctgagggaggagaatcgcttgaacccgggaggcagaggttgcagtaagccaagattgtgccactgcactccagcctgggcaacagaaaatgtgtcaactcttgggcaaataggtgctgatttcatggcatacaaagcaaattgacttctggtataaatcttctgtagctataagaacttcacgtatgcatgtatgtattacagaaaaatcctttgacacttaaatgtagggggaaaaaacacctctacttgagtatttgggttagttaaggctttattgaactttcttgcgtatgtttttttcttactcttcagtggcccgaacctgtaacttgatcttgattgttctggatgtcctgaaacctttgggacataagaagataattgaaaatgagctggaaggctttggcattcgcttgaacagcaaaccccccaacattggctttaagaagaaggacaagggaggcattaatctcacagccactgtaagtggggaatatgacatggggcaggctgctgcaggaattggaatggggagtggattggggtgcatggaccctgacattggaaaatttcctggcttttccctgcactaattgagataacacaatgactttataatgactgacaagaaaaacttcaagattaggataggagccagtctcagacttacctttgctacttatttcctcttttggattatctattgggaatg

SEQ ID NO: 103300 - DNA, 1045 bp, Homo sapiens
gcctcactgtgtacccatctctgcccatcaccgctggaattttgatgacctattggaaaagatctgggactatctgaaactagtgagaatgtaagtctttgtggatagggtaatgttgctataggaattaaccagactgtcctaaaatgatactttctggagctcattaacaaaatctggctctttttgaaaatataagtaaattggttcctattatctactaggtcattaggtcatattgaggacactttttcccttaagttggaggttgtcctggtctgatgtcaggggtgatggagggttgctatacattcaacacatgagatagtctaagaaggcagtaatctttatgccctctctattctagttacaccaaacccaaaggccagttaccagattacacatccccagtggtgcttccttactccaggaccacagtggaggatttctgcatgaagattcacaaaaatcttatcaaagaatttaaatagtaagtatcatgggcctgtggtccctcctttttcctatgagttaccaattttactaactagtaattcttaggatagcattttaaaaaagaaggcaggaaggaggctactgaaatgtttgcttggctagaactctgcagtgtcttcttaaaaccgtgcctaattagaataggaagagctctagaaacctctttaggtcaggaagcctgatgacacaaacaaccctgaccttccctcattatttcatcttcctcttggcaaacacaaatattaataattcctgccaatgtcacactggcctctactgggtactgagcccccttctaaaccttaaacatgggcaaaacctccctaatctcttacatttttcactgctgacacaggctgaaaaaaaattattttatttttgcgacggtcttgctgttgccttggctggagggagtggtgagatcatagctcactggagcctcaatcttctgggctcaagcagtcctcatgcctcagcctcctgagtagctgggactacaggtgcacaccattatacccggctaattttt

SEQ ID NO: 103301 - DNA, 1093 bp, Homo sapiens
ttcattcacacacttagcatatgcaattttaatcaaccaaaagaaaatcccaaatgtacaagtgaaaaaaatccaaactgttgacacaggcctaactaatatcagctacttttatgtacagctgtatagttcaaaaaagctatcctatatgtatatacaaaagttgtttatacacaggtctgtacataagggtctatacatttatttcctcagaacccttaggtgccacctcttggtgaggacaccaacacttcattcacatatcttacaaaaaagaaagaccatttccaggattgacaacattgtgcatcctgtattcagacaatgtacactccactcgactggttaagatccttccatcataatgcggaccacaccagatgcatgggttccaccaaacagcttcacacagagtgctccaaagtaaaagcccataaaccaacccgagatgaagcagggtcctgcccagtgtgccaccacaggtccgggcttagttgagtctgcctgccctgctcactgtcggtattccaattcatctacactgataactttggcgggcatggagggcaggggttgctgtagcacatctgagccaaaccatttggcaaggcccacaggggagctgctcctctggctggggcgatgctccagctgggagtgcatgtggggcaggcctgaccggctgggcacgttctgaggggttgtctgaacgctgacagctgctgcatgggaaccagagcctggaggatgcagaactgtggagataagaagggttatcattcacagcatgagaaggaaagtttattagaccctgcttcattcaaaccctatccaaagaaaagtctttactagaggattttttctagggcttctttagaaactcctttgcaaaataccaacaatgccagaaaacagtaccatggaaagctgagctattcagaagctaccagtattgaaaacccaccctggatgacatgaccgctacttctcatggctaagtaaccacatcacagaagcagcaacatgaactggtgagggggtatataccctgggcaggccggatgctgaacctctgttggattctcagccctct

SEQ ID NO: 103302 - DNA, 1017 bp, Homo sapiens
cctccctagcgcacctcactggtgtagtctgcagtaaactatacaccagctctggataaccctacaactcccaagttcctgtacctattctgtctacctgaactgttgttctctagcttcttcttgatcgcacccaatggaatgcagcttcttccccaggaagcatccctgcagtgccttgttatttcttctaacccctccattttcccattgtactttgttggtgcctaatatctacatgccttggtttgctctaggtgattgtctcccccgctagactgagagctcttacaagactgggactgtgtttcattttccttttgtcttccctcagagcttagcatgtgcttttgtgtatgttaggcctaaatgcttgggaaattgaattggataagggaaaggggatgttaaaacttctaggctggtcttgagtattatatggttttaagacttgaagttaagcagattggggttcatgctgataattggtttgttcacaggcaacagcgagtgaccaagtcaccagcacccgtgcatcgagggaattcctcttcccctgcccctgctgcctccatcacaagcatggtcagtgacctttagtaactgtgaaggactttaaggcttctccctgtttggttgtgcatggattgtaccactgtgtgccctaaatgtccttgagttccttccacggaaataactgacctagtagtttttcataactgtctattaggtctttcccttttaggacacagtctaagtcttaggattttaatgaagcccctatattggggaaaatatgttccagcagagatgatcatgggccagggcacacgaggtgatatagtatgttcaaagaaatgaaccaggtgtggggagacaggaggacgatagtgagagacaggaggtgaagtggacagaggtgactgggtcagacagtggggagtctattgaaacttgcaggggagttcacaaattcggattcaccacttcaggtctcagtgatataaactaaggctg

SEQ ID NO: 103303 - DNA, 1867 bp, Homo sapiens
ttgagttttgatagacaatctgctgttaagtcttatggctaattcagaatgtgactgaaagaaaagttccagaaagtgtcttagcaaagtatttacatggaatgtcgtagtgttcctgctatcctaggccactttaggctgctggccactctggctcctgccaaacaaaccttgagaggcattttttgaaatcttctgtccacagtcaaacaatggagagaatgtgtattctcagagcaatggtgtctattttaataccagctggcttagtgataacgggacaaactgctggctaggaaagctcttctctcccagagagaggtcttggctttaaaaggagcaatgctgatggcttagttgagaagcaatttggacagtgctctggttgaggtccacatagcccactgttggggcacagagggagagggacatctgtcagcccaataaatcagtgctttccaagagatggcgttcagcaagaaatgtcatgcattaatgaaaatgcctccctgatgcacacataccatcttggtactcactgagactaactttcccgacaggtttcacaccaggaccacagcagctactcggagatccattccaaggcatgcgcaaacccatgagccccatcacagcccaggtcaggctgagctttctcaaactcaatctcttgcttgcccttcaccctcttggtgcatggggagtggagagctgaactgttgtgattcttaaaaatggttttgaggccaggcatagtggctcatgcccgtaatcccagcactttgggaggtggaggcaggaggatcacttgagcccaaaagtaaatttaaaaaatgagccaggtatagcggcatgcatctgtagtcccagctacacaggaggctgaggcaggagaatcgcttgagcccaagagtttgagactgccgtgagctatgatggtgccactgtactccagcctaggtggcagagtgagaccctgtctctaaaagaaatggttttgatctatatttcaagctcagtgaaggttagacaatttgctgaataattcaagtaatacttaaattgttaatcttgttcactgcgatggcagcacaatctagtcagtttcgcagtatctaatttttttcagcttctgcttaacatacctttctaagagtgaagagaaacctttgtagaaagtgtggtgtccttactcttctcctgaccctcccctctccttttcagcagatgagccagctggagttgcaacaggcagctttagaagggctggccttgccacatgaccttgctgtacaggcagcaaacttctaccagcctggttttggcaaaccacaggtggacagaaccagagatggattcagaaacaggtaaattactaatcctgctcatgtggagatttacggataagttttcctgaaactaataaattacttatctgcagtataattctgttgtacatactgtggtatgttcagtatgtggtagaaattccatcccaatccaaatcaatagaagaaatagatttaatagcggaaatatgattaaattctactgcaaggcatagggctttcattctatatggttttatttccgttcttgatttataaattactttttttccttgagtttgctaattagccatatggaagggatgctgctcgcctaatttacctcacaagattgttatgagtaaatatattttaaaatcttaggatgtttctaccagttaaaccattcatttttacaaatgaaactagcatagctccttattcctttccccacagattcaatgttcttatcaaactcccttgatgcaggtttgctacatcagcagttttttggccagagctgacaggtttgttgatca

SEQ ID NO: 103304 - DNA, 1047 bp, Homo sapiens
aaaaatacaaaaattggcctggtgtggtggcacatgcctgtaatcccaactccttaggaggctgaggcgtgagaatcgcttgaacccggtaggcagaggttgtggtgagccgagatcatgtcactgcactccagcctgggtgatagagtgagactctgtctcaaaaaaaaaaaaaaggaacctctatttatagcactaacttagagcatatgttgctagctgaacattcagataaatgtgttgcatgtacacatgccaagtccttcagttgagcatgagggagatccatcttgtggctctcaaaagttaatccataattcacagcctctgagtagaaggaataactaagttcacagggatttggcttttctgcctttaggaacttctgggtcaaccagttcagagacctgcttcttccaatcttctgagtggccttatggggagcttggagcctacaacatctttactgggccaaagagcaccctctcctcccttgtcacaggtgtttcaaactcgagcagcctcagctgactaccttcgcccaagaataccatcaccaattggtaaatatacttatttgtcaaaagaaatatgaatttatggccaggcacggtagctcatgcctgtaattccagcactctgggaggccgaggtgggcagatcacctgaggtcagaagtttgagaccagcctggccaacgtggtgaaaccccatctctactaaaaatacaaaaatagccagacgtggtggtgcatgcctgtaatcccagctacgcaggaggctgagacaggagaatcgcttgaatctgagaggcggaggttgcagtgagccaagatcacgccactgtactccagcctgggcgacagagcgagactctgtctcaaaaaaataaataaatatacttttgggggatggggtaccaaacgtggaagataccagctgctcttctaggtgaatatgttcatgttatagattttttttttattgaaatctaactttgatctagctctttagtcttattccttattttgggaattcaatccaaaa

SEQ ID NO: 103305 - DNA, 1111 bp, Homo sapiens
cctcacaaatctgccctagtcttccatgttcttgcttaggctataaattctcaacataaaaacttagtgatataatgaccacggtgcaggcagcaatcttggcaatgttgggctatctgggattcttgtcccaggtaacaagtctcccagaagactcatatccttctgcaggatgcacagcaggagcttgtcaagttttaaagaatagcacttcatagttgtggtcccccagtttctagcatctaaacattttaggtttagtttatgccatctcttagtacacaatttgattttaagtgttattagtttatttttggtgtcagtcttttctgacagtctcatctcaattttgaaataaattattttcatcttatctgtcatactagccaaagagaattcctaccagatatctctttgcttgatttaacctggacgttctcaacttctcagcacattcaggggttgtgctttcagtggaggaggtagaagcaggtctgaagggcttgaaggttgaccagcaagtgaagaattcaactcccttcatggcagaacacctagaagagaccttgagtgccgtaaccaacaatcgacaactgaagaaagacggagacatgactgcgttcaacaagctagtgagcacaatgaaggcaagtgggactttgccttctcagcccaaagtcagcgtaagtatctgacacaaaccccccacccttttctcctttttttttcttctttttcccaccacaataaaaggatttttaaaaaggtattctgagtaagttggaaattctttagtagtcatttggtccttgatgcttttgtgtgttccttaattattgatatgctatttgttactggaaaaagcaggcttgtggttaatttatatgtattgtgggtgacagtataaagattaaaagattcagtcttaatggtaatgcctgtataactttaagtcactgctaaaatgaggtataaaactatctttttggatgaactccagagacaattttcttgttattcagctacttaagttcatattctttaccatatttgtatagtaaaatctttattcacatcttctaattattcccagataccagggattacctgc

SEQ ID NO: 103306 - DNA, 1057 bp, Homo sapiens
tgaacttaagtagctgaataacaagaaaattgtctctggagttcatccaaaaagatagttttatacctcattttagcagtgacttaaagttatacaggcattaccattaagactgaatcttttaatctttatactgtcacccacaatacatataaattaaccacaagcctgctttttccagtaacaaatagcatatcaataattaaggaacacacaaaagcatcaaggaccaaatgactactaaagaatttccaacttactcagaatacctttttaaaaatccttttattgtggtgggaaaaagaagaaaaaaaaaggagaaaagggtggggggtttgtgtcagatacttacgctgactttgggctgagaaggcaaagtcccacttgccttcattgtgctcactagcttgttgaacgcagtcatgtctccgtctttcttcagttgtcgattgttggttacggcactcaaggtctcttctaggtgttctgccatgaagggagttgaattcttcacttgctggtcaaccttcaagcccttcagacctgcttctacctcctccactgaaagcacaacccctgaatgtgctgagaagttgagaacgtccaggttaaatcaagcaaagagatatctggtaggaattctctttggctagtatgacagataagatgaaaataatttatttcaaaattgagatgagactgtcagaaaagactgacaccaaaaataaactaataacacttaaaatcaaattgtgtactaagagatggcataaactaaacctaaaatgtttagatgctagaaactgggggaccacaactatgaagtgctattctttaaaacttgacaagctcctgctgtgcatcctgcagaaggatatgagtcttctgggagacttgttacctgggacaagaatcccagatagcccaacattgccaagattgctgcctgcaccgtggtcattatatcactaagtttttatgttgagaatttatagcctaagcaagaacatggaagactagggcagatttgtgaggaaatggtaagttatgctctgga

SEQ ID NO: 103307 - DNA, 1011 bp, Homo sapiens
ccagcctgtgcaacagagcaagaccccatctcaaaaaaaaaaaaaaaaaaaagacccccctccactatagaaaatatgaagttcccacgaagggaaccataatcctccccacatcccattggtattctagctttattaaggcttttttccttttctgcctcccgtagaagggggactgttttattcttgcaagtacagtacctgcacgagaagtctgctttttaagtcatgtgtggctcttctacatgtatactgatggctgaagccacagagggacactggagtgatttacttatcagacggtttttgtcctggttttgctttcaggtatagtagagtgcaatggaggagtggccgaagaggatgaagtggaggtcatccttgcacaggagcctgcggctgatcaggaagtgccaagggatgctgtcttgcctgagcagtccccaggagactttgactttaatgagttctttaaccttgataaggtgccatgcttggcttcggtgagtgtagcagcacacttaaaaaatgtgtggttaaatttgacctgagtatttaagacatcggtttgaaagtgttgttttgctagatgcttttggggtttttggcttttattcttacatatttaaatttttgttggctttgttttgagaggcttaatggataatatgagatttttgtaccagttaactcttttttaagctggtggtgttagactaaaaattctttttttgttgtttttttttttttgagttggaatcttactctgtcacccaggctgaagtgcagtggcacgatcttggctcattgcaacctccgtctcctgggttcaagcgattcttctgcctcagcctcctgagtagttgggatcacaggtgtgtgccaccatgcccagctaatttttgtatttttagtagagatggggtttcactatgttggccagacgggtcttgaactcctgaccttgtgatcctcctgtcttggtctcccaaagtgctgggattacaggcg

SEQ ID NO: 103308 - DNA, 1008 bp, Homo sapiens
gtttctccatgttagtcaggctggtctctcaagctcccaaccttaggtgatcggcctgcctcggcctcccaaagtgctgggattacaggcgtgagccaccacacccgacctgggtttgtcttctagattctttggtagttcatgtgcttggggacttgatattcactttttttataccaggttactttgagaacaggcatgaacacagcctgctcttaaaccagtcagggaggaaggggtgggggtggtgatgggcctcaggtatacagcatcatatcttcctttcactattgaacattacaacgaagaccttgactgaagtagaaatggcttgactagaaattttttaatcttgctttatgtacttttccagagagagtttggagatagtaagcgtgtctttggtgagcgtagaagaaatgattcttacacagaagaagaaccagagtggttctctgctggacccacaagtcagtctgaaaccatcgaactgactggctttgatgataagatactagaagaagatcacaaagggagaaaaagaacaaggcgacggacagcctctgtgaaggaaggtcagttcaaactttgggagggaagttcgctgttttaaaatgagatgtaggctgggcgtggtggctcacacctgtaatcccaacactttgggaggccgaggtgggcggatcacctgaggtcaggagtttgagaccagcctggccaacatggtgaaaccccgtctccacaaaaattcaaaaattagtggggtgtggtggctggtgcctgtagtcccagctactcgggaggctgaggcacaagaattgcttgaacctgggaggcagaggttgcagtgagctatcacaccactgcactccagcctgggtgacagagcaagactgtctcaaaaataaaatagagatgtgattatcactggctaattgtacacttaggaatgggcaccagatgtataggaaatggcaagtttttcatgatgcatcctgattttgaaat

SEQ ID NO: 103309 - DNA, 1043 bp, Homo sapiens
gcagtcatgaagctttattttagaaatgggtttctggctgggcgtagtggctcacatctgtaatcccagcactttgggaagccaaggcaggcagattacttgaggttaggagttagagacctggcctggccaactggtgaaaccccatctctactaaaaatacaaaaattagcaagatgtggtggtgggcacttgtaatcccagctactggtgaggctgaggcagaagaatcacttgaacctgggaggcagagggtgcagtgagctgagatcacgccactgcgctccatcctgggcgacagagcgagaccctgtctcaaaaaaggagaaatgggtttccataactattagctgaggaggtttagaaatcacactgcctatatggttcatgggcgtaagtgctaacagttgtattttttgacctgtagtgatggtgtctgggaccctgagaagtggcatgcctctctctacccagcttcagggcggagctcaccagtggaaagtctgaagaaagagttggatacagaccggccttccctggtgcgcaggatagtaggtgagcacacagtcactcagaagtggggttagtgattttggggacatgcttttgcctgctggtttcattcttagctctgagaattttatgctttgaggggaaatgtcattatcaggaaactgatttatcggttggatttttcctaatcagcagggtaaagtcatagtctactttgtcacagctatataagaagactgttaggctgtgtgcttctgaattaaaagtaccgattatctttcactggcatggataactgagttagatgtggtgggtagcataaagctgtgctggaaatctcattatgctttctttcatatgtgagaccagtcctccggtataaattagttctggcaattcttttttttttgttctgtttttttttgagacggagtcttgctctgttgcctagtctgcaacctctgcctcctgggttcaagcaattctctgccttagccacccaagtagctgggattacaggtgcctgccac

SEQ ID NO: 103310 - DNA, 1047 bp, Homo sapiens
cagcctcccaaagttctgggagtacagatgtgagccactggacctggctgactcctatctttactggtgatttataggttgtatgttctttgacagttttttttcagaattttgaacagcctttaggtatgtctttgtatttggaactgtgtttatctcagtcttacaaatttttattcgtatttctatccagttataagacaggtaattgataaataaatcctaaataaatgcaaatgcctgattgatatcctggtcttaaaactgaagtatcatatagtcctaaggcggcatcttgtcctgaagaaaacatttagatgcttcagttttctgtaaacactagagaattcatggtatgctatacccagtgattcttgtgggctgattgagcaaatctgtccctccatcctcaccccaagatgttgaatcagtgatctgagaagcagtgcacattctcctactacaaggcctgggatgggagtgttgccaaagtcatggcatagtggtatgtgcttttttgcaaggcagttgcagcattttactggtgctgaaagtttcggaattgctttttaactttattataaaaaatatttcaaagtataccaaaaggaggcagtagtttgttgtatatatgggtagatatgtgtgttagtgtgcatgtgtgtatatatatgtgtgtatatgtaagtgtgtatatttcctaactctactgaaagggccttcaagcaaatgaggatacccagttcccagaccttggtgttttatgcaattcctcacttaaagaaactaggatttctcagaaatagctgattccagggctgggacaggatgaatacaaaataagctagaacgtatgacagtctttaggaaaaaaaaaaaaaaaagatggcatgttgaaaaagacacatgggccagtttgaagaggcacccactggcaaaatctgggacagtttgagcgccacataattgaggacattaatgagttatagaccaacagaaaaaccaggagtcagccgggcacggtggctcacgcctgtaatcccagca

SEQ ID NO: 103311 - DNA, 1050 bp, Homo sapiens
tcttccaggtgcagagcattgtagaccaaggagccatggataggagaagtatgggtgaaacagaaagtggagatgctttccttgacctgaagaagcctcctgcctccaaatgcccccatcgctatacaaaagtaaggtttgccactaatgaaatagtgtttctttttaggtggcgaagttagtaacattgtataactatttcattcctattaagtggtaatctcattctgactcactacatggactaaatattaactaaatttagtagtgcattactttgaacatttttctgcaagtgtagatacccagcgtttaagctggaatttgctttgagaggcttttaggtgaagggaatgtaggcttagatttttttaaaattgcggatcagtatactttgtaagttctgtaacagctatgtaattggtacgtttattgatttacatactgtactgtgaggattaaagccctaggatgcgttacaaagttagtgtcctctgtattgatgtttccttaagaggcagactccccataggaatgctcttgagtgtgcttttcatgggtaactggcttttcaatcctgtttttttattttctattacaaattggatatggactcaaaaaagtaaggcttcagtcatatttcccctagctaaaaactggagatgcttaaactgcttgtccagataactgcttttgggagagagaggaagtcatatttattaaagatcttgcatcagtacatgtcttgttggctactgaatgtttttgaagaggttgacaggactcaaattgtaaattcatttctgggtccctgaaatgtgtcaggctggatcccataaaacttgctcaacagtgttgaagcagttgggaccactgatgacaagaagggttatatcctagttgggcacacatccatatatttccttagtatggatttttcttttttttttttttttttttgcacccgacagggcgtcactttgtcgccgaggctggaatgcagtggtgcaatcatggctcactgcagcctggacctcccgggctcaagcc

SEQ ID NO: 103312 - DNA, 1051 bp, Homo sapiens
cttggctgtttcttcagaagctgaaactttttaatctctcaaaacagctagtgttaaaaacaagtccccaccccaaaattatgctataaattagaacttggagatagaatcattggtactcagttctctttcctagtatcctaagcatcaacatggtaaaaagtagaaggtgcccaattcaaggtatataacctttaagcagctttaacacaagagaaaccaagattagtagctgccacccatggggatctttcaagactggtggggaagtttcccggagtgggggcaggtagaagactggttaggctgggaacccgcgaagtctgttggaaagtgcctgtcacttgccaatggacggcgccagctgccccttgttatccggcgatcagggactggggacggggcccgagcgcccctcgccaggccagccgcacctgtggccatgtcaggggcgccgatggcaaggaaagggcgagcaccggcttcagctccgaaacttggcttccccgggccgcgaccccaacccgcagcccctcacgcaggcccgggcccagcggcctccttcggaggaagggcggagaccgtactcactgaggggcggccggccgcagggaggagggaggccgaatctcccggcccgggcgcttcaagctggagctagcgcaggcccgcagccgtcctccccggcccggcggctcggtccccgccagccagcccgccggctacccgccggccgccttgcgggcctcgcgcccctgcccaccccctgcgggcgccccggcgcccgcgctcacgcacgcgaccccgggagcaatgcgcccgcgccccttctacacccgggagcaccgggcgcgcggtgccccggacccagccgccaccgccgccgacccttactcggtgcctccgccgctcggcggccctttgcctcggccgccgctcccctccccgctgcccgcaccggtcccagcgccgctccccgcagccttcgctctcgcgcccccaccccgaccggcttgggctgtctctcttcagccgccgtaactgcagcccg

SEQ ID NO: 103313 - DNA, 1003 bp, Homo sapiens
gtgcagagggaatgacagacaccctgtgagctgatctctgtgatatggtgtcataacattacaggaggggtttgaacagagtgctgagagtacacagctactcactctgtttacattggagaaggttcaggcatttgccggccattttaggcaggaagaataatatgaacaaaagaattattatgtacttcctgtacctcatttttgaagtttttaatctcttcactgacaatttatgttgaaaatattttttaaaaataatctgcttgattttagctttataaatctgccccatcctatgccctgtatgatgcaaaattagctatgataccgccttttgattcatactaacatccctctgctgagaccttaaaggcttcctttcctttccagaaaactgctgatgtaagccaaatggaattttaaaatatgtatatgctttttttccttctttcagatgcgtggccagaaagttcttatatttatggattcgaatgacttttggaagagtatttccctctaaagccaggtagtattagctcagaacaacataattgtgttgagttcattctagggttttcttttatattaagcctgtatataaacttcattatggcttgtgctgttacattcctccccagcctccagtaggtagaagcagtccctaatataaccatgtaatacagtggtaacttcatatctgttagttgactgcagctgcattcatggtgagctgtgaatgttatctacaaagtagccagtaaaggttaagttttagtgttcagtggtgtggcctttagctagctactgtggccttcagcttcaaagaaaaagaaagaaaaaaaaataacaagcaagtgaccaaatgaaagaatcaggcagggcgccgtggctcacgcctgtaaacccagcactttgggaggccgaggcgggtgaatcatctgaggttaggagttcgagaccagcctggccaacctggtgaaaccccgtctctacaaaaatt

SEQ ID NO: 103314 - DNA, 1043 bp, Homo sapiens
ctcctgcctcagcctcctgagtagctgggactacaggtgcgtgccaccatgcccaggtaatttttgcatttttagtagagatgcggtttcaccatgttggccaggatctcttgaccttgtgatccacccgccttggcctcccaaagtactgggattacaggtgtgaggcactgcgcccgaccgatgtttacttttttttttttttttttttagtagagacggggtttcaccatgttagccaggatggtctcgatctcctgaccttgtgatccacccgcctcagcctcccaaagtgctgggattacaggtgtgagccaccacgcccggctgtactttttcatgagacggcaagaatatgtgatttgggaagagatgttagctccaacatcatcatatatatatatgattttttttttgccgtagattttactatgagcagcgattactacggaaggtcttcgaagaatggaaagaggagtggtgggttttccagcacgagtggaaactctgtgttcgagctgactgtcactacaggtcaggtttcatgttacactccttcagttttactgatgcacattatcagatgattatttgttggcgtgtttatggtcaaaagaagcaaactttgggtcacttttggtttttcttcaaatcctttttggagttagcaagatcagagttccaaattaaacccaagcatgcatgcacatgctgggcacgtgcacacagacacacacacacacctcccacacctctaattcaggtaaccattatgtattggttatgctaatactttgaatgggattttcccaccgattttcatttctatataatttctcattctgaaagtattctgggttttttgtttgtttgtttgttttgttttgttttgagacagagtctcactctgttgcccaagctggagtgcagtggcacgatcttggctcactgcaacttccgtctcctaggttcaagcgattctactgcctcagtctcccaagtaattgggattacaggcatgtgccatcacgcctggctaattt

SEQ ID NO: 103315 - DNA, 1349 bp, Homo sapiens
aagagaatagagttcattgtgattgtaggaaatgaaattttagctttggtgcagatatggcttttttttttttttaatcagaagcgtccctgttcatttcttctgagtatagaacagacttggtgtgttgggttaggagttgttttgttgttgttgtttgtttgtttgtttgtttcttgagacagagtcttgctctgttgtccaggctggagtgcagtggcatgcgatctcggctcactgcaacctccacctcctgggttcaagtgattctcctgcctcagcctccggagtaggtgggattatagacgtgtgccaccacacccggcacacggtatttttagttgagatggggtttcaccatatcggccaggctggtcttgaactccttgccttggcctcccaaagtgctagggttacaggtgtgagccaccgcgcccggcctgttattttgaagaaatgccatttactttttttggctcctcaggtattacctgtacaacctgatgttccagacgtggaagacctatgtgcgtcagcagcaggagatgaggaacaagtacattagagccgaggttcatggtgagaaaaagaagtccatgtctgaagaagatgcccacatttactttgcagaaggtcataggaaggacaaacacattgtctcagagagagaggaactctaggccaaaggaagatttgtttgattctctttcatatttttcagaaagtgtgatctctgagtgggcacctgtatgattgatccctatggttttctccatatggcatggtttgagcccttaaaactcatttaatcagaatttgtgtgaactggctgttcctggcctgctggttcagtgggctggctgtgactctcctgtggcacctggggctgccatctatcttgctgcgtcaagttgcccagagactctggagcagagctgcagtgctcttttctgatctgctttgctcaagttgtcccttagtgatactgtggccactttaggtctggtcagagtctggtttctcttgtgaattgagcccagaaacacatggagagtctaagggaaaaagacctagagtttcaaaatgataatacaggctgcattagcagcagaatgtcctaaaggtagctcaaactctgcaagtcacaagtacaacctgtcaactcccctaccacttacacctgctgttcctttgactcttctgtctaggaagacttacttaggaatggtgtccattcctcatgcctcatgtcatcacttacctaatcttttaagaaggccctctgaggcatcacttgcaatcatcgttgcattgctactgcctgagagtaatcctcatctttttcccag

SEQ ID NO: 103316 - DNA, 1006 bp, Homo sapiens
gtgagccactgtgcccagactgaaagatatttaatagaataatgaacctccatgtatccattacccagctttgattatcactcatgccatttttgttagatccatctctccacttctttgctgcctgtttattcatatcatttcgtctaaaaattgcagagtatatctatagaaataagcgcttttaaagcaaagggtttttgagcagttcagtacatgggttttcctttaaatgctttgtaaatgtcgttacttgcacagagccttcatgtgttcttgcactctaattaattttctagtgcttcacaacttttccagcaggggtcacttgtaggctggagggatttaggtattcaaaggagagcccttgagcttttatcataacccagagtaatccatctctccccatgccttttgaaaaatctctttggtgaatctagatgcaaagcaaaagatgcgacaggcctggaagtcctggttgatctacgtggttgttcgtaggaccaaacttcagatgcagactacagctctggagtttaggcaacggattatcttacggtgagtctgctcaactgccctacaaagtaccagccatcattttacctcatcagctttatggtgctggaaaacagcataaaacctcaccttaaaacaatggtttgtatttggttttatttttgtgttttgtttttttcgagatagggtcttactctgtcacccaggttggagtgtagtggcccaatctcagcttactgcaacttccacctcccaggttcaagcagtccttccacctcagcctcccaagtagctaggactacaggcatgcgccactatgcccagctaatgtttttttttttttcatttttttgtagaggcgaggttttatcatgtttcccaggctggtcttgagttcgtgggctcaagcgatctgcccacctcagcctcccaaagtgctgggattataggcatgagccaccatgcccccttcccaccttgaaacaatatt

SEQ ID NO: 103317 - DNA, 1362 bp, Homo sapiens
gtgtcctgaatggtaatatattaataattcacttcctgcctgaaagttgggtattgaacaaagtatggataataggagaggctttgcagctgcacttacttgggtttgaatccctcttccaacctgtattattgggtcatttcatctcttcagctcttattttcctcatctgtgaaatagttacaccatacttaaaggtttgtcatcaggaataaataaagtaatatctgtaaagtatttaacagtgtccagaaaatcagtggacataaagaagttatttaagtagaaataaaataggcagagtgcagtagttcaaacctgtaatcccaacactttgggaggctaagatgggaggcttgcttgaggccgggagtttgagaccagcctgggcaacaaagccaagaccctatctctacacacaaaaaatttttttaaataattaaaatcattacttaaaatgtatttagcaagtatttcaaaatgcctaattagtatgcagttttacttgagtctgagtgaattttttttttttttttatgagatggagtctcacactgttccccaggctggagtgcagtggtgtgatcttggctcactgcaaccttctgggttcaagccttccaggttcaagcgattcttctgccttggcctctcgagtagctgggattacaggcgcctgccaccatgcccagctaattttttgtatttttactagaggcagggtttcaccatgttggccagccttgtctcgaactcctgacctcatgattcaccggcctcagcctctccaagtgctgggattccaggcatgagccaccgcgcctggcctgagtgatatttttatataattaattcatttactcaacgtacatttatttatttatttgagacagagtctcactgtttcgtccaggctggagtgccatggcacaatcttggctgactgcaagctctgcttcctgggttcaagtgattctcctgcctcagcctcccaagtaactgggattacaccatacctagctaattttttgtatttttagtagagatggggtttcaccacattggccaggctggtcttgaactcctgacctcagatgatccacccgcctcggcttcccaaagtgctgagattataggcatgagccaccgggcccagcctatttattgagggtttaaaatgttcttggtactgggccaggcacagggactcatgcctgtaatcccagcactttgggaggctgaggctggtgaattacctgaggccaggagtttaagaccagcctggccaacatagtgaaactgtctctactaaaaaaatacaaaagttagcctggtttgatggtgcacgcctataatcccagc

SEQ ID NO: 103318 - DNA, 1052 bp, Homo sapiens
gtgatctcagctcactgcaacctctgcttcctgggttcaagctattctcctgcctcagcctcccgagtagctgggattacaggagcatgccactaccacctggctatttttgtatttttaatagagacagggtttcactgtgttggccaggctagtcttttaactcctgacctcaggtaatccactctcctcggcctcccaaagtgctgtgattacaggtgtaagccaccgtaccaggccataacatatcttttaacaaatcaaactgtgtaggtcaaacagagcatgtctgtggtgtctaaagcaggatctgaccgtaggaaccataagtttccaaccattaatgggcagatctgggactttttctcaattgttttgttttatttttttccccagcagtgaatctagagatggtactatgaaggagaggactagagctgagggtctgaggccccacactaactgctcctctctttcctgagtggctttttactgatggattccatctttgatttgctgtttcacagggtgtggtggagcacgtggaggcagcgactaggacaggtccgtgtgagccgtgccctccatgcctctgctttgaagcacagggccctgagcctccaggtgcaggtgagtccagcagacgtgggatttggcatcctctgtcagtgttgtcaagcctctcacccacagagggcagtgctgggccttccctgcagctcagggcctgagagggggtggggacagaggtaatctggaaggctgggctcttccagagggaggctgctgttaggaataaagtagaggcttgtcctagatgagcctagatcagtggcttccagagtgcttctggtaattgtggagctggagagggatttatgaattagttataaacatgtttagagaaacagcagtatactctgatttcctcgttgctgttttcctacagcaaatcagaaaataattggggcagaaaagaaacttaagactgaaaagaaaacctgtcttccttttctttatagttttgattgtcttagagtgttcttttaggc

SEQ ID NO: 103319 - DNA, 1030 bp, Homo sapiens
atggggtttcataactttggccaggctagtctcaaactcctgacctcaggtgatccgcctgcctcagcctcccaaagtgctgggattgcaggcgtgagccactgtttccggcctcttctgtatattttttatctaaatagggttttcattttgctataagtattgtaattattttgattaatatgttgataacctatggttttgtatcttccttttttccacacagttaatcaacacttccctacatcttaagtatttgtcgtaaatgttattttttaacaactattcatattttataggatggcttaccttaatatacttagccattctcctattaatagatatttggatagtttctgtttgtctccagttatgcaaatgcatgtgattttgatgttgagttttttggatactgtttatatggttttgtttcccaattagattcagaagtaataatacatagaaatgtgaacattagtacactttttaacttaagtttattgagtttataccaaagtaagtcaagcactgtgctagacactgggttaagggtctctggcgttcacccaaacctccctgcagaaatctcttacgctgccaacactgtctcttgggagagtttgaatatgttcattggaggatagtgaccccagaccaacagtccagttgcccagtcctggaatgtgaaggcattaagctgtttagtatgataagctatagactaatgcctgcctccaattacagcattcaaattccaggtctgattcccatccccttcccaggccctagctcatcagaccattatctgactagcattaaaaggagatgaagctggcagccaggatcaggttggctgaaagctcaaaaaagcctatgccagcgtggcaactgaattttatgtcattgactcaatctctaagtcctatccaggagacatttgtttagaagcaaaagtaaaacagtcctttttgaaagtaacagttttcatttctgttcatcagtatctaactagaagcctcagccctttgat

SEQ ID NO: 103320 - DNA, 1050 bp, Homo sapiens
gtgaaaccccatctctattaaaaatgcagaaaaatcagccaggggtggtggcacatgcctgtaattctagcaacttgggaggctgaggcaggagaatcgctggaacctgggaggcataggttgcagtgagccgagatcccgccactgcactccagcctgggcaacagagcgagactccaactcaaagaaaaaaaaaaaaaaacttagtgcgtgtgtgtgtgtgtgtgtgtgtgtgtgtgtgtgtgtggccttgaacccctgctctctgccagtagtggggttcagcttgtcttaaagatgtttccagctcatctaaccttaggggagtagcacttaagttatttctctgttgcagagatggctgagcgattccatcatgtcactgtgctccagatatacttctgtgactggcagcaggcctgggagcggagggagagcttgtacgctcaccatgcccaggtggagaaactggccaggaagatggccctgcggcgcgcctttactcactggaaacactgtatcctttcagatactcaggctgtccattgcctcagccaggacagcatgagctcagcagcatgtgaaacgaaagtcatgagatacatgggaaacaattgccaaacgattcaaaacagccttatctctgttgacagtcttaaaatttttgtttaattgggattgtgtataaaaagagtgcttatatatagtttaaaaataataaaatgaacaactatatatcttatcacccaactttcaaaatagaaccttcctagcacacctatttgctcctccctgactgcgttctttttcttttccctcagaggtaatcccactttcctgattcacattttttggtgttacaatttaagtgcttttctctacccactaggtggtggaaatagccaccactatctttttcttggtgataccatcaccgtgatcatagtttccatttattgcgcttttactacgtagcagacattatgcatcatcctcttcatcctcatagcaacgctgtggagtaggtgccactattaccattttacagac

SEQ ID NO: 103321 - DNA, 1081 bp, Homo sapiens
cccttgccctacagcctgggtgacagagtgagacccagtctcttaaaaaagaaaagaagtgcagtcagatttgtgctttggaaaggataattctggattagcggagagaggctagcactggtgggagaccagttatgggaggaggctcacttaccagtctacgtaagggacgagttggatgaactgcagggtgttgggggtggggacagaagagcagaaggggatggagagagccaagagatttaggaagggaacagatggacttggcgaccgattagatgagagtgggaggagaaaaggtttgaaaataactccaaggtttttagctcaaatatctaactggattgtgatgccaaaacagagactatagaaaaaggagcagattctgctttagatatggtgatttctaaatgtttactgaaattgatagcagtttatctcaggtattttttgcgtctcatctcatgggcattcaaggggaggaatgcaagaccagatgtttgatcagtaactgacagggtttccctttgcccactgcttccctgggtcatcaggagtagacagaggtggacctcagcccacctggcacgtgtgttatccccgatagccacggcccttcaaggtggcttgctgagaatgcactgtgtaggggtcagaaccttgttgggactggaggccttcacttcctggcagacatgctgctgtgtgcagaagaagctgcccagtttgagatggcagaagagcaccacaggcacagccagctggtaagagccctgcatcctggcacgggtccgcttggcagccttgcttgggtatccactcttgggggaccctgacccctatcaccttcattaaatgcagtcagctatgggtgagttttggtcatgaagccctcctttcattgtgggtgtccttcttttcattttggattacaggtgctaatgttgtagggtcagaggggtatggagctgtaaaggaacctcagagattatttagtcctgagctttttttacatggtaaaaccccttttgagtggcggaagcctcacctataaaataggtcaaagtagccatgctgtggt

SEQ ID NO: 103322 - DNA, 1855 bp, Homo sapiens
cccggcctaattttttagtttttttatacagacggagtctccttctgttggccaggctggtcttgaactcctgtgctcaagcagtcctcctgcctcagcatcctaaagtgttgggattacaggtgtgagccactgcacctggccttttaggcattattgatggagctggatccaggtccatcctggcccaactccaacccttcctttcactaaagattccttcttccattttagcagcactgcatttataatcatacaaatgtatgcactgagcccacatggtaaaaaaacaaaaaccaccacagacaaaaagtctgtcttctcctgagaggcaacagttgatgtttaccttggtctgtagaattgtcatgtgggtcatggggttctttcctggtgtgggtgtgtttgttcttgtgcagtatagatggacagcagggagggttcagcaaatatttattaagtgcctgctgtgcaggctggcttgtgttaggctcccagttgaatctcaaagcagagaaacactcagggagatggaacagctacaagaagctgtgaccaagcttctccccgctgatttgaggcactgtttgccttcctctactcttagtttacagactctactgatcccagtccttgtaatcagttgtgtcctttctttgcacagtatttttgctttagagccctaaaagacaatgtgacccacgctcatctccagcaaataagaaggaatcttgctcaccagcagcatggtgtcacggtgagggttgtcttctgtatcaagggacctcttctgaaggccattctctctcgctctttttttcagtcttgccaaattaagcagaactctttttaaaaaaactttttgtgcttcaagatttgtccagactgtcaactgtaaaaccttagtttgcattttctttctttcttttcttttcttttttttttttttttttttgagacagtctttctctattgcccagactgtaatacagtggcacgatctcagctcactgcaacctccgcctcccgggttcaagcaattctcctgcctcagcctcttgagtagctgggattacaggcatgcgccactacaccttcctaatttttgtatttgtagtagagacgaggtttcaccatgttggccaggcttgtctcgaactcctgacttcagatgatccacccgcctcagcctcccaaagtgctgggattacaggcgtgagtcaccatgctcggcctttttagtttgcattttctttggtaatccatacctgctgatagaaaaacttgtttgatcccatttttttatctatttgccaagaaatggatagttgactcaaagttcagggactgtggattttaaacctgacctaggggatatagtgatacaaatactttctttttttctttacttatttagaggcagggtcttgttctgtcacccaggctgtagtgcagtagatcactgcaggttcaagtgatcctcctgcctcagcctcccaagtagttgggactacagctgtaagccaccacacccagctaatttttgtattttttgtagatggggtcctactatgttgcctaggctgatctcaaactcctgggctcaagtgatctgcccaccttcgcctctcaaagtgctgggattacaggtgtgagccaccgcacctggcccaaatatactttttttttttttgagacagggtcttgctctgttgcccaggctggtgtgcagctgcagtggtgcgatctcaactcactgcaacctccacctcccaagttcaagcgattctcatgtctcagcctcccaagtagctgggatcacaggtgtgcaccaccaagcccagctaattttttt

SEQ ID NO: 103323 - DNA, 1090 bp, Homo sapiens
cctgctctcccagggctcatactttagcaccagggtgacaaatgagtgtgaccttacaagcccgttctaccaattgggagtacctgtctggaatgttgaagtgagaaggatttcaaggccatatttacactcagtgggaaagggttcagttgatggcatctgccattgtgagaagtgccccctttttggtcatctctggcagtgaaacagaggaagacacaaaccaaactcctcccagttattttcgtgctgcccaccctacccgtacctccatcttctgttggagtctaacaggtgaatctttagattcacctgttagctagttccctatagtttggggatagaatccaaatttttagcaaggcctacaaactccttcgggagctggtccctgtctgtttctctcccctttcctgttaccactctgttccttcacaactgcactctgaccagttaagctgccagtggttccctaaaggtcctctgtgccctcctgcttctctttgtacctccagttctctatttcacactcccttccagctcagatgtcacctcctcccccaggccagtccacctccacccctaccccagaggcatagctttatcagaacattcatcttatagttgttcactggcttctctttccccacaggctgtgaagtcctttagagtacagcctgtcccttttgcctccttagcccacagtgcttggcatgggatatgtgctaatatttggatgaattaatgcacagaccaacaaatgaactgctgttgatttcttcagagtttttttccaaggatgatctaagtcgatagagcttggatgctacagggcatggcctctttttgcgtcactcttgcctcctacacttaagaaatgctagagtcactgcattctttgacatgcctttggattatgttactggctttgaaaagacattgccacttgttatcttaagttcatgtaatacaagttcaccagaatgcaggaaagcctttcagaaaaagactatgagtgtcagagttgaaaggttgtatttattcaaggtggagagcagagggtctcttttatttccttcctggaaaacga

SEQ ID NO: 103324 - DNA, 1181 bp, Homo sapiens
tgagactgtctcaaaaaaaaaaaaaaaaaaaaaaagaaaaaaagaaaatactggttctgataagaactagttcacttatgatgtgttatgtttctatttaatgcatattggtttgtaattcagtaaaaaactaaacatgtgcccacatggatgtttgtgtgtgtgctggaggaaagttacccattttctaggttccttattcagttcaaatctctggcaccaccccctacatcccacgccctcaccagaacacagtcccaactctcctgggtgaccagcttgcctccttatacctcaccttggaacatatggtccttctgtaatgagtacttgcttgaaaggtttttttggcttcatccactcgggccatggtgttctctttccagcgacgtaatgccccgctgcagatgcatgggtgcgaggaaggcagatgacaccaggatagagagagaagggaggcttctgtgaatcattcctacttcttcccctactcctgagtcagggactctacacctaagaatgtctgtttcaccaacacctatgtttacttgcacatctatgtccaacaaatggctactgagcagctgctctgggctgggcaccaagagtgcatgagggacccagcactgctggagaccaaactccaggtgctacggggataacagggcataaccaggcagtggcaacacaggtgactcacactgtgataagagaagtgtggagagacagggaacctggaggaaggttgcctacgcctcagcttgctgctgagttagctcagggagttcttgcttattccaccctgtctgaagagcgggatgggtgctctatgggactccatatgagggatggaggcatttattttatttatttacttttgagagacagggtctcactccatcgcccaggctggagtgcagtggcataatcacggctcactgtggccttgaccttcaaggttcaagtgaccctcccacctaagcctcccaagtacctgaaccacaggcatacatgaccgtgcctagctaattttttttatatttagtacagacaaggtctcgctatgttgcccaggctggtctgaaactcctggtgtcaaacagcctcctaaagtgctgggattacaggcatgagccaccgcgcccagctaaggatggaggtgtttaaagtccacgagaccc

SEQ ID NO: 103325 - DNA, 1277 bp, Homo sapiens
cgtggactttaaacacctccatccttagctgggcgcggtggctcatgcctgtaatcccagcactttaggaggctgtttgacaccaggagtttcagaccagcctgggcaacatagcgagaccttgtctgtactaaatataaaaaaaattagctaggcacggtcatgtatgcctgtggttcaggtacttgggaggcttaggtgggagggtcacttgaaccttgaaggtcaaggccacagtgagccgtgattatgccactgcactccagcctgggcgatggagtgagaccctgtctctcaaaagtaaataaataaaataaatgcctccatccctcatatggagtcccatagagcacccatcccgctcttcagacagggtggaataagcaagaactccctgagctaactcagcagcaagctgaggcgtaggcaaccttcctccaggttccctgtctctccacacttctcttatcacagtgtgagtcacctgtgttgccactgcctggttatgccctgttatccccgtagcacctggagtttggtctccagcagtgctgggtccctcatgcactcttggtgcccagcccagagcagctgctcagtagccatttgttggacatagatgtgcaagtaaacataggtgttggtgaaacagacattcttaggtgtagagtccctgactcaggagtaggggaagaagtaggaatgattcacagaagcctcccttctctctctatcctggtgtcatctgccttcctcgcacccatgcatctgcagcggggcattacgtcgctggaaagagaacaccatggcccgagtggatgaagccaaaaaaacctttcaagcaagtactcattacagaaggaccatatgttccaaggtgaggtataaggaggcaagctggtcacccaggagagttgggactgtgttctggtgagggcgtgggatgtagggggtggtgccagagatttgaactgaataaggaacctagaaaatgggtaactttcctccagcacacacacaaacatccatgtgggcacatgtttagttttttactgaattacaaaccaatatgcattaaatagaaacataacacatcataagtgaactagttcttatcagaaccagtattttctttttttctttttttttttttttttttttttgagacagtctcactctgtcacccaggctagagtgcagtggtatcatctcagctcactgcaacctccatcccccaggttcaagcgatttctcctgcctcaacctcccgagtagct

SEQ ID NO: 103326 - DNA, 1020 bp, Homo sapiens
gtgacttttatctggcactaggctcactgcagatgtaattggttaggatggtgtcacactcaagtagggtgggcccttcatccgatatgaccagagtccttctaagggacccagacacaggaagggaacgatatgtcaagatggggcaaagactggagcaatgggtctacacgtccaggaaagccatgacaagcaagaaacaagctgggagaggcaaggaaggaccctcccctagagcctgtggagaagcatggccctgccacaccttgatcgctgactgccagcctccagaactgagagggcaattttgtgttgtttgaagactcccagtctgtggtactttgtcatggcaaccacagggaactggcatgtatgaggaggagacagacttatgcgggccacagggatctccacaacagcgctgtcttcacattcctcaacatgacttgcttctggggccccacttacccctgtccagcaccttctgggcctcccagatggcacagtcctcctgctgtcggtaatacatctgcactgacacagcttcccgccactggaccaggacctatgggcaggcaaggagcacagcaagagtcactatacctcctggcttccgggtccaccccaggtctgtgacggtggctcctggagaggcaaggccaagctgttgccatttgcttctcacacacggtccaggaagtaactgccttgcacgcagaccactgagcaataggacagggccccagcccctcacaggaagcccagcatttcagctgctgggactcttctaccaggatttacatatcataccatgccataaagtagtgaagtcattatatacatgggtcttaattctatttttatatatatataaaatatatatatgtaattttttttttgagacatagtctcgctctgtcacctgggctggagtgcagtggcatgatctcggttcactgcaacctctgcctcccaggttctagcgattctcctgcctcagccttctgagtagctgggatt

SEQ ID NO: 103327 - DNA, 1834 bp, Homo sapiens
gaggtgaggcccaggtctccctgcttagagctcccccacagaccaggtgccctccctccacccaaggcagggctaaggcctgagggagaggcagggatggtaggatgcagagccccaattacctttgcctgcagcgagaaggcccagaaccacagggcccgcactgtcgcccgctgctcctgcctcctggctgccagctagggccagaaagaccagatcatttccctatagccccttcaaggaggccgtggtgatcacggggccctgcccagctcgtccctcttggctccctctctagtcgaggctcccacttcctccactaggaagggccagccttgtgcctggcggtgagatgctcaacacacgctccatctgtggcctgaggaatgaccttcatgaaagaaggtggcaaagggctcctgcagggggatgcgtggaggcagcggcctgaggtccggggaatggtgaaaacaggacaacagaacgggaagagggagctggggacgtgtggatgctgctctgtgtgatccctcttggctttttaaaaagcaagatcccagcaaagccttaaaacacatttcatgttaatttttaagatattatgctgatttttctttttgagatggaatctcactctcatccaggctgaagtgcagtggcatgatcacagctcactgcaaccttgacctcccgggctcaagcaatcctcccgcctcagcctcccgagtagttgggaccacaggtgtgcactgcctacacccagctaatttttctgttttgtttttgtagagatggggtctcactatgttgcccaggctggtcttgaacttctgggctcaagtgatcctcctgcctcggcctcccaaaatcctgggattataggcgtgagccatcatgcccggcccactgattatatatatatatatatatatatatatatttttttttttttttttttttagacagagtctcgctctgttgcccgggctggagtgcagtggtgctatctcagctcactgcaagctctgcctcccaggttcacgccattctcctgcctcagcctcccgagtagctgggactacaggcgcccaccaccacgcctggctgattttttttgtatttttagtagagacggggtttcaccgtgttagccaggatggtctcgatctcctgacctcatgatccgcctgcctcggcctcccaaagtgctgggattacaggcgtgagccactgcgcccggcctccactgatgtattttttaatacaacactgtagagagagaaactggccttgaagtaactgttcttatgcagactgcagacggaaggaagctgatgtgcctggaaatgacaggaaggtggtagaggaggtggccctggggagggtgatagtaaaaatactgaactagaggtgtaggctgaaggtcattcactgcccaggcctcacaggccagaggatggagaaggaagtgcagaggggacatctcctgggttcccacctgttgtctccactggcggaagcaggtccggctgagtctctgtgccagcagttgggtgctctgcctgtgcaggagctgggggagagcaagtgcacagagagtggcgtcctgacccagcctagacagcctggggtgggtcctgatctaacccagcctctgcccagctgaatgtcctcccattgctaggagtcctggatggtgccaggggtctcctgcataggcagggagtgccgcctagaggactcactctgtaggtcccccagcactgataagccacgggtcagcatgaaccgggtttttccgctgagccgtcttccctgggagacactggattct

SEQ ID NO: 103328 - DNA, 1958 bp, Homo sapiens
agtgagctgtgatcatgccactgcacttcagcctggatgagagtgagattccatctcaaaaagaaaaatcagcataatatcttaaaaattaacatgaaatgtgttttaaggctttgctgggatcttgctttttaaaaagccaagagggatcacacagagcagcatccacacgtccccagctccctcttcccgttctgttgtcctgttttcaccattccccggacctcaggccgctgcctccacgcatccccctgcaggagccctttgccaccttctttcatgaaggtcattcctcaggccacagatggagcgtgtgttgagcatctcaccgccaggcacaaggctggcccttcctagtggaggaagtgggagcctcgactagagagggagccaagagggacgagctgggcagggccccgtgatcaccacggcctccttgaaggggctatagggaaatgatctggtctttctggccctagctggcagccaggaggcaggagcagcgggcgacagtgcgggccctgtggttctgggccttctcgctgcaggcaaaggtaattggggctctgcatcctaccatccctgcctctccctcaggccttagccctgccttgggtggagggagggcacctggtctgtgggggagctctaagcagggagacctgggcctcacctcctgccctccctggaggtgtgggccacgtggctggcctttgtactggaaaggaggagaaagaaggcgcggctgcagtgggcgctccaggcctaccaggggcagctcctccaggagggtgccacgcggctcctgcgctttgcagccagcatgaaggcctcccggcagcagctgcaggcccagcagcaggtccaggtaggcccagggccccttcctgtggggagcaggcagggtgtggcatgagctgaccagaggctgtgttgtaggcggctcacagtctccatcgtgccgtccgccgctgtgccacgctctggaaacagaaagtgctgggccggggcgggaagcctcagcccctggcagccatcgcacccagcaggaaagtgacgtttgagggtccccttctcaaccgcattgctgctggggctggggatggcacccttgagaccaagaggccacaggcttctcggcctctgggagctctgggccgcctggctgctgaggagccccacgccctggagctgtgagtagcctgtgctcaccttgtcctcgcttccaccctgggcaaaaggttggatggcatagcagggaggaaaacagccctgacgggatgggacgggctggtcacggccttgtcacagctgagctgctgggaaccccctcttctccagccagatcccatccctcccacggcaagagggagagaatggagtgggatttccaaaccctctctcctttgcctgccaaagctcaggaaataggtgtcccctcctctgcaacaccttcctaccctctctcccgtcctgctgacacgatcttttccggagtcatacacgtagttgacaaagggaacaagctcagctcctacccgtgcctgccggcctctcttctgctccatcacagccaagacactggctttttgtcagaagcccctctttcttgtgtgagctggcacctgtccctctgcccacccctactatggtctcctcaaaccctaacctgccctgccccatgctgatgaagctggtggctcccacagcaaccagcactacccgagagccttgggcctcgggggagatgtcaggtgggtgcatggggcctgggtcccggtccctgctgtgctcctcactgtttgactgaccttgatgggatcctgaacgtctcagaggctgctcccctgtgacatggaccctggcgacctgtacaccagcgtcaccagggttgttctgcaggtcaaaagagacaatgtgggtgaagcagtcccctggcgtcaggtaccttttgtcgg

SEQ ID NO: 103329 - DNA, 1411 bp, Homo sapiens
agtgttgctggaaagaaacatggggtctgttcccctgggctgaccaggggctgcaggggggtctgagatctctgtgggatctccaattttatagggagactgaaagtcaggaaaggcgaggccaaggtcagcaagtaagctggggtgggcctgggccatagagctcccagcagttccgacaaaaggtacctgacgccaggggactgcttcacccacattgtctcttttgacctgcagaacaaccctggtgacgctggtgtacaggtcgccagggtccatgtcacaggggagcagcctctgagacgttcaggatcccatcaaggtcagtcaaacagtgaggagcacagcagggaccgggacccaggccccatgcacccacctgacatctcccccgaggcccaaggctctcgggtagtgctggttgctgtgggagccaccagcttcatcagcatggggcagggcaggttagggtttgaggagaccatagtaggggtgggcagagggacaggtgccagctcacacaagaaagaggggcttctgacaaaaagccagtgtcttggctgtgatggagcagaagagaggccggcaggcacgggtaggagctgagcttgttccctttgtcaactacgtgtatgactccggaaaagatcgtgtcagcaggacgggagagagggtaggaaggtgttgcagaggaggggacacctatttcctgagctttggcaggcaaaggagagagggtttggaaatcccactccattctctccctcttgccgtgggagggatgggatctggctggagaagagggggttcccagcagctcagctgtgacaaggccgtgaccagcccgtcccatcccgtcagggctgttttcctccctgctatgccatccaaccttttgcccagggtggaagcgaggacaaggtgagcacaggctactcacagctccagggcgtggggctcctcagcagccaggcggcccagagctcccagaggccgagaagcctgtggcctcttggtctcaagggtgccatccccagccccagcagcaatgcggttgagaaggggaccctcaaacgtcactttcctgctgggtgcgatggctgccaggggctgaggcttcccgccccggcccagcactttctgtttccagagcgtggcacagcggcggacggcacgatggagactgtgagccgcctacaacacagcctctggtcagctcatgccacaccctgcctgctccccacaggaaggggccctgggcctacctggacctgctgctgggcctgcagctgctgccgggaggccttcatgctggctgcaaagcgcaggagccgcgtggcaccctcctggaggagctgcccctggtaggcctggagcgcccactgcagccgcgccttctttctcctccttt

SEQ ID NO: 103330 - DNA, 1811 bp, Homo sapiens
gcggctgcaccagccagggtacgtcctccaccaccaggcctgggcactggggctctcactctggtctgacttctggtgctttctcatgccacagctgtactagtttctggaaaaccttggcacagggaggccactcatccatttgacaagcataggtagccactgcacaccaggtccaagggccacagcagtgaacagccagccaagggccctgccatcctgaagcttatattctagtcagagacaagcaaagaaaaacccctgcctgcaggccagtaaagtggctgcagatcacgtagggtcctgcaggccacagtgagaagtagcctgggatttgagaagagtaggaagtcggggaagggttttggcagggagcaccatgtcaggtttctgtgcaggctgtggtcaccatgaccacgtggtccaggcaagtagtactggtggcctgggctcagcggttgccacagaggggacaggtactctcttggaggcagatgaggcaggatatgctgctctgagggagttgctgaatgaggggaaagaaggaatccaggctgatgtgggctgctggcttgaataacttgggaaacagagttctttgactggaagaaggaactgggggtggggactggtttggggtgaagtgtcaagagtgttttgaaccaggctcttgatgtcaaatttgagagaaagcaaacgttgagtctgaccttcaaggaagaggtcagggccagagattgagaagaatcttcagcacaggccgaaggtaaccccagagccactgcggcctctaggaggagagtacaggggaaggagagaggggaggaggctccaagcagggagcctgggtggggatggccagggggtgtgagagctcagtaatggaagtgacagctgctctaaggccaccaaagcagctggttcctgaaaggggatgaggggacaggaaggaaccagttcctgtggtgagttaggccatgtggggccacttaccctggctggaatggtttgaatgtgggtttgaaagggttttgacccctgtccggtgatggaaggggcaagtccactctcaccaggagaggagggcatggaaaaggctgtagagcagtggcctctcactgaccacttctcactgatgtcaaagctcagcaaggtcatgagcttagagcaggtgggggtggagggttgggtaaggcaaggctaggaacagctgctcaggcagtggaggcgtgaggcggactgtggtgacacggggtgctccctggttgcttgcgggactttcccctacagtaccaggccctgtgtgcaggggcaggctagacactgagctggcacggccagtgcctgggaagcccagctcctgcagctgggagcctggtcttcccccacccctgcagggcaggcagtgacaaggacttggtgtccccctccctggcttcctcctagcttccttgctcagcatctacccttctttcctttgcaggtgtcagcacagcgggctactcctagggataagcccccggtcccctcatccctggccagtgtccctgacccccatctactccttcctggggacttctcagccaccagggctgggcctggactttcaactgcaggtgtgtacctggggcctgtcagggcagaaagcactcaggccactcccggacctgggacttgctatttaccctggtccccgaggggaaaatagtctgaaacaagcttacttctgtcgccataggcagcctggaccttgaggctgaacttgaggagatccagcagcaactactgcactaccagaccaccaagcagaa

SEQ ID NO: 103331 - DNA, 11095 bp, Homo sapiens
gttctcaccagggcacctctcgtggcttcccgctcatctcattcctcagatgctactttgtaacctgaattgaaaatgggtcaggtcctggcaagggaggggccaaactgcagaccggctgacgcggtgctgggcctgggcctggagcacggggctcaagttcccactttgtgcgtttggagccaagtggggcctgaaagccctggcagcagtggctggtcccctccctgtcatggcttactggaccgggcagccctagggccttgccccctactgcctccccaggccagctgaggaagaggatgagcagtgcaggctggctcagccctgggtagcagggacagagcaggtggccaggactggggacagtgggctttagtgcaggggcttttgcactggactgcaagccctgagcaggtgacctgagcaggtgtgtgaccagtgcctgtctgtctgcaatagccctgaccctctattctgcaccctgtgagccaccgagactgaaccaaacccaggaagcggcgccaccaaccagcctcgcagaggcagaggccctggagcagtgacagcacaggagatctgctggctcgggggaaggggaggaaagaggaaaacaaagggagtgatcgagtgagcctcgccccgccctccctgcgccggcccatgatgtgtcagtcagaggcgcggcaaggaccagagctccgcgcggcgaaatggtgagatgctgcccaccgcgccctaaccccacggttccccgccacgacctccggaaggtcagagttcacatccagcggcctcgcagtagaggtggcggcaaggggactggtggtcagcccccgaggctggaggagcctggcctggggggcctgagcaccctgagtcggagagcccgcttcaggtatctttggttccaaccatgaggagggcccagcagggggaggctgccagcgagcctcagacctcatgcctgcgatcttccctaccctggtgctcccaggccccctgctcgcagcccagacccttgcctctgcaccccacctaggagagaggcttccccattccccttcctgcccatgggaggggtgtagctcttcccagttggtccctgctcttctgcagtgagtggggcaggtggcaaagccagaggggagcagtgatttgtctttgcttggcccctgccaccttcctggaccttttaaaaatacaccggggtgcgatgggagagaaagtaggcacccgggagctgcgtggatgcagccagctctgagcctgagcctgagcggggttcgccactggttcgcctgccgtctgctctgctgctatcagctgagatgctgctttgttccttggtttgctcagcaactgggagagaggactcagcttctcttgagagcacagtcccagatggcagccgtagattagctaaatgcagttactttgcagatgaggaaactgagacctggggacgttctgagtggatggcagtgtggtctcctgctggctaccctgggcctcaggagcatttgctaggcctaggcacagacagggtggggtgggccttgtttaggcgcaggaggccagggttgtggtggaaaggcccgtccagcctctgcggctctggtgaagctgagcccctgctgagtgccctgcatttgtgctgggagggtggggagaggccggatcacagagaggctggatgcagaaaggaggggcttgggtctcgtgtgtgtgtgtgtgtgtgtgtgtgtgtgtgtgtgtgtgtgtgtccacctttgctgaaaggaggggcttgggatgggtgtgtgtgtgtgtgtgtgtgtgtgtctgtctgtgcagccccagcagagcagacaggtggcttgagagcttgtggtggggaggttttgttcacaaacctgtggatgggttttcagaacctggcctgttatagaaagaccatgcagatggatggagccgtagctgtgtggtggtggtaggcggagtgtaaatgctccctttgagatcttgtctggccttggccccgtaatttagcagatgaggaaagggggggcctggaaccatgaaaaggatatcccagatcctgcaaaggatggtagcggaagactcagcaaatggttacccagctggctgggtcgtagctcctcagcgctatgtgctgccgtgccagtgcctgtgtggcagagctggcccctggggcccactctcctgggctgcggaggctgagggatgtgaggcaggccctacaccctgctctccccttcctgggcccaggtgcttgggcctggaggcccttgctgggagctgctgcagctgagaggtgccccgcagctgggcctgactctcctcttgcggctgcccccacattcccagtcctccccagctggctggcgggtgggagagcctgggaaatgagtccgctagccagaggcagccaagcccctgaatcagaatggggttgggacgagggggcacagccagtgcttgctgggctccatcacccccatggagaggcagcttgccaagggtgggtagacaggaggaatcctgccctgggtgcaggtggcagcctcctgggtcctgcccagagcctggccactgacctggctgtgcatggacctgtgccctgcaggttgcacttcccccagctggccctgaggcggaggctggggcagctgagctgcatgtccagacccgctctgaaactgcgctcctggcccttgaccgtcctctactacctcctgcccttcggcgccctcagaccgctcagccgggtgggatggaggcccgtaagcagggtaagtgtgcacaggcccctgtggctcggacctcccttccgggcaggcctgaggttggggtgcaggagagactgaggtggtggcgagctgtcagaagcagaggtcaccgctacatcttcagggggtccgggtcggaaggttcattggtgggcaaggccaaggcagcttttgagaaggccactacctgggccgcgggtgactgcgagggcatgtcgtgccctgcccactcccctagcctgcctcatgtctgccatttggggctctggttctggaaggaacccagtctggggattcagaaaatggtgtctgtctctgatttttctgtgttcaagcaaaaaagagcttataggtgattttgaacagaagccaaattaattccgggatgccaaaggggtggttcaggatggatggatcctgtttgggtcccttagggtgaggacacccttaaggaacccagaggcatgccccaggaatgggcaagggaactggcttgtcctctcctggtccctagagggcttgctcttgcccttggcttcccaggcaggttgaccccaaggaggaaaccctgttcctgggcctttgacagtcacatgggtgtcatcagagctcaggggcactgaggcaccctggacattagcccaggctcccacctgtgcctgggaagggcctgggctcacatagcccttctgtgtgactgggcatcagctggaagggataagagcagctctctgggagcttaccttaccttggagaggtgttgaaagttggaatgaaatcagttttacaccttggggagttggtgtcttggttgtgtttagagaagcagcagccaccaattacaggcagcttctacagtggcagcagcacctgaagtttaagaggctgccccttcctgggtacctggccctgccggagagctctgggaccatctagtgggacccagtgcttgtccccaggccatcgtctgtcttaggtgctccaggcttccctgaaggaagagagaacagaggggcctgaggggatgacttctctttgcctcctgggaggaaccccaggtgcagatggctttatggcctggctcagtcacagtagaacgttgaacacaagtcctgccgtggggccaaggtggggctcagcagggctgggcttctcagactggctgcatccaggccctcaagagtgctggctggacctgtgggggctgcagaccctgtgtctgcagctcaggcccaggtgacagtgacatcgcagacctgcatctgaaaatccctgttggtgctcagggtatcctccttcttcctgttaagacagagggacacactttgggctgtagacttgttccatgcacttgggagcctcctcctttggtggtctgggatatgggcagtgaccacgggcaagatgcccaccacctctccacacactgtgatattggggtcaccgtggctagggtcacacactgtggttaggatcagatccgtttccgacccccactttaagaagtaagactgctgggcgtctcccgttctgggactggagcagttgctatttgacttttgcatgaaatgatgaaatccactggagttgtatgtaaatccagcactccgtgtggcaggtgcagtctggttcccagtgagaaacagccacatcacaaaagcagcgtggggcacctgggccctggtgtcctccgtggggtgcagattctcccctgaagtgagagctgggctaatgacactacttgggctctctggagctggggcagtgtggtcaactcagccccttgccctgtggcctgcaggtggctttgtacaagtcagtgccaacgcgcttgctgtcacgggcctggggtcgcctcaatcaggtggagctgccacactggctgcgcaggcccgtctacagcctgtacatctggacgtttggggtgaacatgaaagaggccgctgtggaggacctgcatcactaccgcaacctcagcgagttcttccggcgcaagctgaagccgcaggcccggcctgtctgtggcctgcacagcgtggtgaggcctgaccctttcctcctgcaggaaacaggactttttcctgcctccccagcacagcccccctggtctccagcgtatctggaaggggcaggatgacaaggggaggtgggggctgtctcctggggggaggagaccctgctctccctggcagcaagcctctcctgcccttccagattagcccatcggatggaaggatcctcaactttgggcaggtgaagaactgtgaggtggagcaggtaaagggggtcacctactccctggagtcgttcctgggcccgcgtatgtgcacagaggacctgcccttcccaccaggtgggtcactgcacaggcggggctaggcagccctgctgctgtgtggctggaccgggagggaggggaatgctggggaaggaactgaggctggcatgtggggcctccctgagaatccatgtgcagaccacactcgggctccgtgctgggtgctcactgtgttggtggcccccacgtctgctcctactccacagccgcgtcgtgtgactccttcaagaaccagctggtcacccgggaagggaatgagctctatcactgtgtcatctacctggcccctggggactaccactgcttccactcccccaccgactggactgtgtcccaccggcgccacttcccaggtcagcccggggccagcgtggggggagctgcctctgtgggcttcatatagaggctctcagcttcttggtgttgggggaccaggctccagatcagggtcattgaggccaggagttgactgctttatgcaggctggttgtgggcaggggaccgtggggcccagtcagctcagcatttggagtgacatcggggcaacaggccatgagtccctttgggtcttggctgccatggggtggacacaccgggctctggacggggagtagcggcattccctgcctctgcaggctccctgatgtcagtgaaccctggcatggctcgctggatcaaagagctcttctgccataacgagcgggtggtcctgacgggggactggaaacatggcttcttctcactgacagctgtgggggccaccaacgtgggctccattcgcatctactttgaccgggtaagcaggatctaggccctgccaaagcccaagggccagacctcttgggtctacctgccttgtctgctgtgcggcggatgcgttgggactgaattctagggaggccacagctctggtcaggcctggctctgctgagcagctgtcctgagaatggccgctccacctgccagccagctgaggcttccctccctccttgcactgctggctggaagtggctggaagagatggagggaattaacctccttgcctggcacctggcttctgctaggaaccatggtcaaaggtgagagtgaggagggaacagaaagggagtgttgagctcggggtggctcatgttggttacagcatgaggggtcagcactcgcaggtctgctgcccaccctgcccccaggggctgcctttttgggtgtcagtttgtgaccaacggccttggctcccacgggtgctgctctcccagcaccatgcatggagaccactgggccccactgttccctgtcctccctgggcccagttcacagcaggtgtcaaggctgtgtgtgagatctggctagagcaggcccacctggccctgagatgccatccccacctcccttttggagctgggttgggtggtggtggggacaagcaacagagggagtgggactccaaacacatgtgggggtgacactgtgcacttggtggcctgggccccactgacccccagcctatcaccacaggacctgcacacaaacagcccaaggcacagcaagggctcctacaatgacttcagcttcgtgacgcacaccaatagagagggcgtccccatgcgtaagggcgagcacctgggcgagttcaacctgggctccaccatcgtgctcatcttcgaggcccccaaggacttcaatttccagctgaaaacaggacagaaaatccgctttggggaagccctgggctcgctctagagtctctttcctgattatggctgctaagggatcttttccaaacagagtgagggtcttttcaagagggaggcccatgaggccatccaggtaagggcctgcctcagcgtggttgggagtctgaccaggtaggacttgaatgattcggctaccacctgttccagaggtgcagacaagaggtggcgagagcccccatcatgcccctcaacctatcccgttccttctgcctacaaataaaaagtgcaggctggaatgatctcagtcacatttggatctttttaaacactgtatagacggaagagcctgcattcctgaccgaaccttcagttggtctcggttgtcgttttttcttgctgctcctccccccatcacctgagctgttttctgttggccccttttgttttttggccttaacgctcctgctgcacagggtgaggtgcctccttggcacagactgtggatgcctctcccccagcagagccacacagccttcgtgacaactgctttccgttcccacattcacctcatcctgctctttagaaaaagcagtctttgtgcttgtggctgaacgcatcaccctggactctgctagtgtcttctgaggacactgatgacactgattaatgatacagacctttgcaggacctgatgagtgacccttctggagctggccaggtcctctgcagcaggcaagaccaatcaatcactgaacctgcctcatggcaccagagtgaacagggcaggcaggtagtaggcccagctggggaaatgggagagttcctgtccccctccacatatccctacatgaaatatgggaaagttgctgctattgattcagggtctgtcttggaggcagaggacccttggtggatagttggtcagtgcctggaaaacctgtcccagtttatcaggaacgcaggcctggggagcccccagtggcggggacagggccagatttcatgttgaccctggggatgctgtgaatttctcctgcaggagagacatcattgaattttttcaactgtatcagtagcacagtatttttgtatgaaaagtgggagacttctgaacagtaattcatttaattgcaaagcattttgaaataaaaaaaatcaaacttaaaactgtgttctgttcctggaggtggcctgaggcctccccgacagcccagcacctgcgttcctggtgcgaacacgctagcacagggcctgccgcagggcctggatgcgggcaacgcaggcgccaatgggctggcgctgagcctggagctcctctgccagcagctggatctgcatttccacctggggccatggagggacaggcagggctgagagggagcacagcccggggcgtccccagggacacctggggatggcctggggcctcacctgttccagctctttctgcacctgctgctctacttcctggtcctcaggccccggctcctctctgttcagctccagccacctgcgcaggctgctcgcttgccgccgacaggacctgaggggtggagatacccactgcctgccaggctgggtccttggcagagccccatccggctcagggagaggcacctcagctaattctgatgcgggtatcgggtggagagaggtggtctggtagggcccctgacctgaactgcaggcccctgcttgggagccaaacacttgttctttttcctctcccagtctcctccgccctccccagcagacagcaactcaggtgggcctgggcaagaacacactccttgtctctctccccctgtgcagagccaaggatgaggcgccagtctgttgccctggaagctctgaggttgctgcatgttgaatggtccccagaccactgagtgcagctgagtcacgggcctgtctcctctgcatttttttttttttttgagatggagtgttgctgtgttgcccaggctggagtgcaatggcgtgatctcagctcactgcaacctccgcctcccaggttgaagcgattcttctgcctcagccttccaagtagttgggactacatgcgtgcaccaccatgcccggctaatttttgtatttttagtagagatggggtttcaccatattggccaggctggtcttgaactcctaaccccgtgatctgcctggatcacagcctctcaaagtgctgggatgacaggtgtgagtcactgcgcctggcccttctctgcacctttaatatcagtgttataattagtcactggggacagcatggcctcatcgggtttttagagttttgctcaactttatcgtcccccccataggaagcagagcctctgtgcacaggtgagtctgacgacttgggccttcctaagcagcactgagccgggtagagagccatggtggagatggggtctttctggacagcacacactgagggctccccacacccctccatggctagaccgagaccacctacaggaccctggcagctggctcgggggaaatggaactgcctgcccacctctccaggcaacacctgctcctgtagccagggctgcagggcgtttcgcagggctcaccagaggttctgcttggtggtctggtagtgcagtagttgctgctggatctcctcaagttcagcctcaaggtccaggctgcctatggcgacagaagtaagcttgtttcagactattttcccctcggggaccagggtaaatagcaagtcccaggtccgggagtggcctgagtgctttctgccctgacaggccccaggtacacacctgcagttgaaagtccaggcccagccctggtggctgagaagtccccaggaaggagtagatgggggtcagggacactggccagggatgaggggaccgggggcttatccctaggagtagcccgctgtgctgacacctgcaaaggaaagaagggtagatgctgagcaaggaagctaggaggaagccagggagggggacaccaagtccttgtcactgcctgccctgcaggggtgggggaagaccaggctcccagctgcaggagctgggcttcccaggcactggccgtgccagctcagtgtctagcctgcccctgcacacagggcctggtactgtaggggaaagtcccgcaagcaaccagggagcaccccgtgtcaccacagtccgcctcacgcctccactgcctgagcagctgttcctagccttgccttacccaaccctccacccccacctgctctaagctcatgaccttgctgagctttgacatcagtgagaagtggtcagtgagaggccactgctctacagccttttccatgccctcctctcctggtgagagtggacttgccccttccatcaccggacaggggtcaaaaccctttcaaacccacattcaaaccattccagccagggtaagtggccccacatggcctaactcaccacaggaactggttccttcctgtcccctcatcccctttcaggaaccagctgctttggtggccttagagcagctgtcacttccattactgagctctcacaccccctggccatccccacccaggctccctgcttggagcctcctcccctctctccttcccctgtactctcctcctagaggccgcagtggctctggggttaccttcggcctgtgctgaagattcttctcaatctctggccctgacctcttccttgaaggtcagactcaacgtttgctttctctcaaatttgacatcaagagcctggttcaaaacactcttgacacttcaccccaaaccagtccccacccccagttccttcttccagtcaaagaactctgtttcccaagttattcaagccagcagcccacatcagcctggattccttctttcccctcattcagcaactccctcagagcagcatatcctgcctcatctgcctccaagagagtacctgtcccctctgtggcaaccgctgagcccaggccaccagtactacttgcctggaccacgtggtcatggtgaccacagcctgcacagaaacctgacatggtgctccctgccaaaacccttccccgacttcctactcttctcaaatcccaggctacttctcactgtggcctgcaggaccctacgtgatctgcagccactttactggcctgcaggcaggggtttttctttgcttgtctctgactagaatataagcttcaggatggcagggcccttggctggctgttcactgctgtggcccttggacctggtgtgcagtggctacctatgcttgtcaaatggatgagtggcctccctg

SEQ ID NO: 103332 - DNA, 1242 bp, Homo sapiens
cacgccattgcactccagcctgggcaacacagcaacactccatctcaaaaaaaaaaaaaaatgcagaggagacaggcccgtgactcagctgcactcagtggtctggggaccattcaacatgcagcaacctcagagcttccagggcaacagactggcgcctcatccttggctctgcacagggggagagagacaaggagtgtgttcttgcccaggcccacctgagttgctgtctgctggggagggcggaggagactgggagaggaaaaagaacaagtgtttggctcccaagcaggggcctgcagttcaggtcaggggccctaccagaccacctctctccacccgatacccgcatcagaattagctgaggtgcctctccctgagccggatggggctctgccaaggacccagcctggcaggcagtgggtatctccacccctcaggtcctgtcggcggcaagcgagcagcctgcgcaggtggctggagctgaacagagaggagccggggcctgaggaccaggaagtagagcagcaggtgcagaaagagctggaacaggtgaggccccaggccatccccaggtgtccctggggacgccccgggctgtgctccctctcagccctgcctgtccctccatggccccaggtggaaatgcagatccagctgctggcagaggagctccaggctcagcgccagcccattggcgcctgcgttgcccgcatccaggccctgcggcaggccctgtgctagcgtgttcgcaccaggaacgcaggtgctgggctgtcggggaggcctcaggccacctccaggaacagaacacagttttaagtttgattttttttatttcaaaatgctttgcaattaaatgaattactgttcagaagtctcccacttttcatacaaaaatactgtgctactgatacagttgaaaaaattcaatgatgtctctcctgcaggagaaattcacagcatccccagggtcaacatgaaatctggccctgtccccgccactgggggctccccaggcctgcgttcctgataaactgggacaggttttccaggcactgaccaactatccaccaagggtcctctgcctccaagacagaccctgaatcaatagcagcaactttcccatatttcatgtagggatatgtggagggggacaggaactctcccatttccccagctgggcctactacctgcctgccctgttcactctggtgccatgaggcaggttcagtgattgat

SEQ ID NO: 103333 - DNA, 1022 bp, Homo sapiens
cctgaggagccccgcggacaaggttgagcgagtcgtgggctttttttccgtccccacgtgggcacggcccgggctgcgtgagctcacttcctccacatcttatctcctgccgggcgcgggtacgggaagtgaagagcgtacgggaagtgaggcggccgcgggaagtgagggggtgcctgcagtgaggcggctgcaggaagtgagggggtgccggctggcattggcggggcccgggctgagagctccgtctccttggtgctgccggagggcctgggggcaggccgcctggggaagagggcggcgcccgagggccagggagcgggtggccggcttactgcctttgcccagagccggttcccctcagcacccagagttgtctgagaggaggttccctgtctttgggcggctaggatagacccctgcgagtcctgcctgccctcttcccagggcctcctgggctgcctgccactgactctggtccatgtcgcccagggaggaccattttccccgtctcctacttgggaagtttgcctgcttctagctcaggaatgcagggaaggcagggttgtcgccccactagacgcacgccgctgcatggtggccaggcctcagctgagctggggagaaagtcagccccttgcccccaccctcgcccccgggggaagtgcatggcccgcagtcaggccactggacacaggatttggggccctggaagtttctgctgaggcttcaagaggggtggtcctggcgttccaggcgcttcccatcagacagcaggagccagttctcagggtccttggctgaacacacaagctgcaaagctacatatactccggcagagctggctgcgggctgcagactgcaggtgacagtgccatatccctcactgcctgctccgccttgctaaggcttgaaccagaatccactaggagcaggactgtaagtgtatacacgcatacccctacacacacacacccctgcacctacacacaccctcatgcacacaccccctacctacacac

SEQ ID NO: 103334 - DNA, 1034 bp, Homo sapiens
actgcaacctctgcttcctaggttcaagcgattctcccacctcagcctcccgagtagctgggattacaggcgtgcaccaccacacctggctaatttttgtatgtttagtaaagatggggtttcaccatgttggccaggctggtgttgaacttctcacctcaggtgatctgcccaccttgacctcccaaagtgctgggattacagacactaagtcaccacgtctggcctaaagcactttttctgaattccaccccagtctgcccttcctgagtgcctgggcagggcccttggggagctgctggtggggctctgaatgtgccaggggtatccgggacatcttgcaggctagtgggactgccaaaaacgattctcaaagatgagtggggagttgggcagggataggagaatctggtgtgtagagaaatagcctgaaggcactttgtgcttgcctggcctctctgcccagacgttggggaggctgatgcctgcctgtggtttcttgtactagccgttaagaccccagccatcttccttgaggggcttctgccagcccccagggaatgagaattagccaagagccaggaaatgagaattagctgaggacaccttttacccctgttccgcagctaccttctgttccctggcacagggcatccccttagaagtagtgcatgaaattcacacagctgggacctggcagagaatacaggtggcttgactgaggcagggaggcctccatctgcaggtggcctgagagcctgcagagcctcacagtggcactaggtggcactcccacccaagggagtcctaacagagtgggaggcgtggaaataaaggactccatggcctgaaggaaataaatacaaggtaggaaagtaaatttccagacaattttttttccctaatggaaattcacttgtaagtgattgttcaaaatccagaggcatttccccactgaaaatatgtgtggtggaggtctggttggaaggtggggtagtgctaatctcggccaacttgtgggctggtttatgggt

SEQ ID NO: 103335 - DNA, 1052 bp, Homo sapiens
gctgaggctggtggatcacatgagatcaggagtttgagaccagcctggccaacatggtgaaaactcatctctactaaaaatactaaagttagccaggtgtggtggcgggtgcctgtaatcccagctactagggaggctgaggcagaagaatcacttgagcccgggaggcagaggttggagtgagccaagattgcggcactgcactctagcctgggtgacagagcaagtctctgtctcaagaatgaatgaatgaattaataaataaataaatatttcagtccttcccctacaaggacattttcttatctacagtacagttgtcaaaaccaagacatttacattgctacaatattgttattgagtgtttaaattttgccgattaatccagtaattttaattttaagaataatatttaatggttcatttttgcttggttatagcctccatccctgtgagatcactgccctgagccaatccctacagcccttacggaagctgccttttagagcctttcgcacaggtaaggagcaattagagatggtggtgaccctctctctgcctcagtttggtcatctgtaaattgggataaacatagggttgttgttagagttaaatgagttagtatgtggaaagtacctggcatgcagttatcactgaagcgttaggttttctttttctttttttttttttttgagacagtcttgctctgtcgcccaggctggaatgcaatgatgcaatctcggcttactaaacctccacctcctgggtttaagcaattctcattctccaagtagctgggacacagatgtgcaccaccacgcctggctaatttttattgttaatttttgttgtttttttaatatttcaaagactgtgtgcatactggctaatttgtgtatttttagtagagatgaagttttgctatgatgcccaggctggtctcaaactcctggcctcaagtgatctgccgaccttggcctcccaaagtgttggcattacaggcctgagccaccgtgcccggcctcattatgtctttttgattatagccattc

SEQ ID NO: 103336 - DNA, 2038 bp, Homo sapiens
tcttcatatcctcctgggagccactggcatggagcagccgccgatgggaaccgtcagagttctagggacatttccaagtcagtctattagagaagagtgagtggcacgtcctggaatgttggccaactctcctaggtttcttttgcttccccatttgctagtggatggggagatgggttgggggtggggggtctctatgtgccttgcttttgcaggttgacagtctatgccacactggagcagaaaaactgacatgagccagagggaaaagtgtgccacggctatgttctaggcccactgcctcagacatagcattgagacgagtgaaatacacacttggtcatccacggaggcttccaaggccatggccaaatacagttagaagagagccaggcttccgtaccagctctgaatgatgctaaccagattctgtcattctacatccactttgcccagactgtatagacacgacctatgtttcacctcaatacctctcccttcctgggacagggttcttagacactaaatgcttctctctgacttttttgcttaagggagtgggatgagtagtacattttgcccttgtccaggcatgtttaaggagctcctactggacaggttgcagactagcagtgagtcaacagagccctgtttgccagctctgttgccagtatagatgcagtgatgtggcggctatgtttcccagagacaacagtgggcacagctatagtgtcaccaacatggcagagatagtttcaactgtgcctgttacaggtgtggcactcgaaggaccagaagcagcggtttggaacatgggtaactgggagcagaggactggaagaaacagagctgggctccttccctgtcctgacaatgtaggagaggagttgttgtgaggccagccctgcccgtcgttgaaattctggacctaccctctagctaggtcccttcccctgctccaaagttgagaagggggccccactgcaaacttgaaattacttacctgaaggtgatgtatatacctaggctccagctgcgctcagccacacctgtcttaacattcagtttcggcactgagccagctgcagtgttgtcaggggtccccaggcccgtggtccctaaccacgatgggacatggtaatcggctgctggcacaccacctgcccagagctacaggaggtctggttctggggtggagttggtacagtttctgagtatgggaacttccctccccaagtggtgggaagttacagttaactacagcttactcaactatcacttccagaggtttagtgtttttaatatgggaaagaggagaaatctcaggtctaatcagggttctgcccatcagcttttcactgaaactttcaactgtgttttgttttttgtttttttttccatctttcagtttctagctgtgtttgccttctccctccgcgttccctcctctttttttgcttttggtctcctttccagcttcatgtctccatgagttcagctgtacctcatctcctgttaaagcagatcatgtccactttttcttactgaccttactctaagctacagtagctgagggaggtacggtgaagacatgtagcgtttgccttattcggagcctgaggagcccagaaacccatgctgtgaatcccaaaactcagcgctcctcaagagctgtgaaaatcatgatactttgtcacaattttgcctgaaagggtctttggcacgggctccagagccaacctgaggtccattccagatcccactatctgggcgtgagacctcccccgtggctccttccttgcccactgagccaagagcagcagggagcgtacaggacgggagcagcagatccaaggccgcggtgcagccaatgaatgcacggccgtcgctccgtctccaggctggaattccgtctcataatcaatgccatgtacattaagatctgcgaaagaccaacttttaggcagtgatacttttctcccattccctggggtggggggagtatgcagttggtgctttctgtaattcccttgttctg

SEQ ID NO: 103337 - DNA, 1052 bp, Homo sapiens
gctgtgcagagtcgagagctggatgctcttttgatacagaaactaatggaactggagaccttctttgccaaggaagaggagcaggaacaatcatcaggctgttgagaagcgattcagtttgagggtctcaattttagggtttttttgttttgttttgtttttgggttttttttttttttttggacctccttggaaaaggttgcctaattttgccctaccgccaaaccactcaaaaatgcacagtccatgaatttttacctatttcaaggtgcaacctttttagaaactggtgaaggagggtcctctacttttactgctgagtatagaacctcaggaatgctccctttctcctggaaatggacctgaacgacatccagccacctcctcagtctctgccatccacaggaggaagcagcagcctatcttcagtaacactaggattccaaggacacacaggatttgcacgtccatatgaaagttccgctttgtttacggtggtgctagaccaagattattagaaacgtggcctagggagggggacctggcgtcctgtcctgtgtggtctcactggctcatttcagtagttgaggaaagatgagctgttgtgttttcttatcttttgtctgcccaggacctattgatgtgagtgtatgtgagagtgtttgtgtgtgtgtggctttttcccatcgttttctcccctctgtgactgggtcactagtgccagaggagcccgtccaggccccattcgaagtaagttgcactttttaatgttgtggtgtggattattttcatttgttttattttcttttttgttgttgtttttgtactattattgctgcatgtgtggagcctttaaatgtgattttaaaacatttttttaaggagaaaaacaatacatgtcttaagaatacatgataggcatttgacccagttgatcgctgcatggaagagacatttttcctattcatgtgtttcaggcaatcccttccccatctccagcttctagtgtaactcattagagggagcactttttttcatctgggttctcattc

SEQ ID NO: 103338 - DNA, 1045 bp, Homo sapiens
gctacaagcgcctcagatataaaagactcctggacggattttcatccagcacagagcagctgaatccatatttggcagctagtggatgggataagaggcctaacagtaagcccatggcactttattctctcgaatccatcaagatgaccttcatagatttgagcaacaagatgccgtccctgctgtttggttctgaaatcttcccagtatcctttcatgtgaaatcatccagctcagattgcacgactgagtcctcaaggacttttcctgagcactgtgctccggcaaggcttgccttaggagaggccctccagtgcccgtctcaacctcccaagtggaccttttctttcttcttgtcccacggttgccctgggatggcaacattcagggaagacactggcgtccatagtcagacccacactcaggctcctccccagcctccagctcctctccaagactatggaggcactgccatagtccagaccagagcagactgctctgtccttggccttcacacacttctagcactttgttccccaggatgttaccgaatctggacaaaaaaacggagcttctccagccacatgcctaccatgcagaggctcttcatgacccagtttacacagggcctgaaagggttacggtctccagcctccatagcagacaaggtcttctgttctctgccctactcggtgggcagagtcctatccatttggagccagcatggtccttctgtctgctccttcgaaatctcttctcttcattcccctcactgcaagcggcaaccaagtctgggcaccacaagcaggtaaaatctgtcccctgttctttacaaatgtcccatatttgcttcctgtctctggggagatgagaggggaactgcgggaaatgcaaggctatttagagtcctcttgggtctgcattttctatttaccttgcgaaatctctgctgagaaaaatccaatagtaattcttaagcataggacccccaccccctgctcagttttcctgtagaacctacttctgtatttcacaccattctttt

SEQ ID NO: 103339 - DNA, 3030 bp, Homo sapiens
atgaactggttgtaaacaaagtagaaagtgaatgtgttttaaatcaacaagtgtcccttaattctcaagaacatgcaaatttgccaactgactctctactgcatttaaacaaagagatgcctttagcaacaggcagagatgcccatcagagccatcaccctccattagagggtagagcagatgtcattgctgatatacaaaccattcccattcagacaaaaataaaagacatctctccaccaggtaaccaaacctgtggtgcctcttcaaactgtcccaccttaaacatcaaaccagtaagcctagagagaaaaaaggaaatggctgattcaggaacaaaagctctacattccaggctgcgctcaaataagagagaagcagctggctttcctcaagtggtctctgtcatagaatgtcacagcgttcaatctcaggatatctctagctgtcatcgtgtaagaaaaaatgtatcccaggaaaacatgtgttctgcttctgctgctttcaagtccagcaaaatcagcctgcaagttgataactctttgataacaaaatatgaaaatgcatttcagcaccgtgatcactgctgccaaggaacaggacactctgtggaaaaaagcagctgtaaagtgagttacacatcacaggaaagggaacttgatgggaaagaaacgaatggcagccttccaggagataagatcagaaacaaaatggtagcaggcttgttaaatagtggaatttcaaacaaaaccattcacacctccagtagcatcaaactcagtgaggaagggctggaaggaaaggagcaggatgtatccaaagaaactgtattttgtaagtataacatctctgatcatgctatacaagaactaaaccagactgtaaacattccaggtcctgaaaaagtgttggaccagtctcctactgttatgttctccagttttaaaaatgtaaaatcagttgaaacactcgatcagaaggcagatgaagtccttgactgtcagagtaaccaaaacagaccagatgaatgcaaaagtgaaggtcagtcagccaaggagatgctaagtagtgaccagagagagactgtcaccgagcctcacggggaggtaaaccacaaccaaaaggatctgctggtcagctcaggcagtaataactcactaccttgtggtagtccaaagaaatgcaatttgaaaggagcctttgtcaagatgtctggttgtgatgagtccacagaaggtatggtagacatcgtctacacggactgtagtaataagcttgcagaaggtgtgctggacgtgaaggcatctaatctactggattgtggtgcaaggcaagagaaactggcatttcaagaggactccaggagtaccttgtctcggagagaactggatgctgcacatacaggaacaactggtcaggattcagatttcccagttactgctgcttctacagtggactttctcaaaataaaaaaatcatgtgaagaaaacgtatgcagatctttaaaagactgtgaaatggaaaagtgtccagactcttgtgcccatgagatggagtctgttgcagatcatgaaccaaataaaagaatattgggcagagtaaatttgtctttaaatgatagccattatggacagcaagataaaggaacatctctcagagaaacacaagaaatgactgaaggatcaagactagaaccaaactctgagtttggcaaagaaagtacctttggaatttcctcaaaagagtcgatgtcttgccatgatgaaagctctgtttccctaagaagcctgaaatccattgaaataatgccttctcaagaaaattcagaaactaatgttaacagtgaagaaactgacctgaaaaatctttgtaaaccaaaagatggtgaaatgctttgtgaaaatgtaaaggactgcacagtccttcctgagatgaaggaaatagtatcaagagattggagtaattctagtgacagagacagcgtatgtacctgtgtggaaaagaatgcttgcaaagcttgtcaccctcacgagaattcctctgacagacatttgcctttgacagtgaaaacagatattaaagtgaaaggagaagaaaccgaagagcatcagaggggacgactgggttacttaactgttggggagcaatctgaggagttggttaccagagaaactggcgatggcgatcccgtgagcaacatctctcagacccattttaaatgccgggggatacttaatcatgctgaaaaacagcagagccctgaggttttggactacatgttgcagaaagaagagaaatatatacgtcaacaaaaagcacatacgatatcgcaacagtgcatatcatctagtctgttgttagatgatgcacaaaatcagaaccaaccgaaggctgacaaagatgagtccaccatgatcaatgaaatcaccctagcaaagctggccaaggacagcattgtggcacagactcagaagttagaagaccagaaggaggaaaggttacatcatccattaaggaaggacactgagtcatgcacaagtccttgccttcttggtgcccctcggaaagcacaagacccctcctctgctgggtgtgatcaaatacatggtgcctttgcgaagaaaggagttcttcccttaaagaagcagccccatcgaacttgtaagaaagtttcctatcaggagcaaatcattgttgggagaaaaataggtaaaatcagaagttctgcctttttaaagagttcttccaatcccatccccacaaaagcgcacagacttctcagtttgtgtactctgtctgcacctacacgattagaacctgaaacagcacctaccaagagcttggttagtcacataccaaagcagatgtctacaccgtgccatcccttgaggagcctgaattttaggaagactaccaaagaatcagccttactaaacaagctgtccatccttgcctccaaactggccccagccatgaagactcagaagctaagataccgacggtgttcctctgaacttcttccaatggcta

SEQ ID NO: 103340 - DNA, 1142 bp, Homo sapiens
tcagaaggaaatgtacagattacagctgaaactctgctaaaatccgccgaagtacaaggtatgaaggtcaatgggactaagacggataataatgaaggacacaaaaatggcaatgtgagtaaagatctctcagctggatgcggtgaattccaagaagtagacaaaatcatgaccagtgatgaggtttcagaaaccagcacattagttaccccagaacctttaacctttgtggaccctgtattaacagaagcaactcctaaagaaaaagaatgtgaagaattaaaaagttgtccttggttgtcattaccaggaaacagtgccatttctaatgtggacaatgggaaggaagagttgtgtaaaccaaacctggtctgtgaagcagatgacaatcaccaacagcttcatggccaccataatgaacaacccagttctacacatgatagtcccacagccacaagccctttgaaagaaaattctgaagtttcatgtttcacatcagacttgtctggtccagaatccagaacaatatccttagaaaactgtggttttgaaggtggtggtttgctaaagagatctgctgaaaagacagacagttcttatttttataggggggatgatcaagggaagaacttggcttctagagaagaaaatgaggaacggcttttgattcctaggagtgaaagaggtggaccttttctttttaatgccagggaaccagaaaaggagattagtggtcgttgttctggtgaaaaagagcctgttgtttctccaaaggaaaatatccacaataactgcattcaagacagtctccatacagggaactctagttctttaatgcccaattcttttactgaagccacagaagtaatgttaaataaaaatgatttgaaaattactgtacacgttcaaggtaacttgacaaaccctgaggaccataaagaaacttttactaatatgagccatcctggtggacactctgaagaaagcagtttttcctccttgatgcagattgaagaggcaggacagacaacccctgtagagcccaatatattaagtaaatctttttacactaaagactgtaactccttagtcagcatccagagaaatctggaaggcaacacccagttaaatgaagcatcatg

SEQ ID NO: 103341 - DNA, 1030 bp, Homo sapiens
cgtggtggctcacgcctgtaatcccagcactttgggaggccaaggtgggcagatcatcaggtcaggagatcgagaccatcctggctaatacggtgaaaccccatctcgcctaaaaatacacacacaaaaaattagccgggcgtagtggcgggtgcctgtagtcccagctactccggaggctgaggcaggagaatggcgtgaacccgggatgtggagcttgcagtgagcggaggttgtgccactacattccagcctgggcgacagagcgagacttcgtctcaaaaataaataaataaataaatttgcaactaataattttgggatttgatcaagatcaccctgctgagggtgaactatcttagaacaggcacagtggaagggacagctgcaagagccaagctgaattgtgaaagaatgtattcagttctgaactccactcttgtaggaggaaggtcaaaatctgttacgcatgcaaaggttactagcaaggatgtggaatagattggtcttatttaagaactgtgcaccaaagataatcagagatggacatgtgacatcccacatggatgatttagcattgagaactctataccatgcttggtttttattgtttgtttttttggtgcttacatataagctatagagtgttaaactttttacatatttttttccccataatggtagatccacctgggttgaatatgttgtaaacactttggttctaggatacaatacattggttgtattcaactcagacacagaaaaagttcagaatttttttttttttttttttttgagatggagtctactctgtcgcccaggctggagtgcagtggcacaatctgaattgtcttttaactgtaacatacaaaagcgtagtatacgtttttttttttttttcgagatgaagtctctgtcacccaggctggagtgcagtggcgcgatctccgctcactgcaacctccgcctcctgggttcaagccattctcctgcctcagcctccagagtagctgggattacaggcacccgc

SEQ ID NO: 103342 - DNA, 1019 bp, Homo sapiens
aggtatttatttttctacaaattcattaaggagaaatttttggtgccagataatgctggcatttaaagtagaacttattttcttcgttgtagccggtttgaactgaggcagccttcttctaacctatcaaggttttaaacttttatcccttcctgtgatttgtgtcagggtgaatcatttgatgtaaaagacttgactccataatctgcatctgtcctaatgctgtcatctggagtagagactcagccagttccacttgattcctccatgtctgccgtggtacaggaattatactctgaactcccagtaagtgtctccagagagcttcatgctgaccctgagccaagtgtgattccagatgtaaaacctggagcctcaagctctcttttaagtcagaatagggcattgcccttggagctgcagaggactcatgtggagagttgttgtgaagaaacctatgagaccttggatcatgggagtgagcctgggcgatgtgggctagtggactccacagcaggaggttctgtggcatctgggatcttggatagggcaaagagaagcgagagcatggagccaaaggtcttcagagatccagggggccaggcaggaattataagagaaccctctgagggagcaaaggaagatccacatcaacattccacagctgctgaagaaaagactagcccgagtcaggtaagaaatgaaatctccattccgaagagttgagtgtgaatgacagctttctctggataaaatacagatgctgacggttggctcatgatttattcttgaaacatttccgaaatgtcgattttgaagttaactttgttttgatgatcttttaaaacatttatgtcacatcagacacttgaagagaggaagtgcttagtaaaaaagtgtcagttctctgaagcagcgactgtatatgaaatgttgagtctgtgaaaatcatggtatttcagcatttgatgttaagaaatgatatagatatactcagtccttatgttttggtaggttgg

SEQ ID NO: 103343 - DNA, 1589 bp, Homo sapiens
tcggggcgggcctagtaggcgcttcaggcttaggggcggaacagcgcgggccgcgcgggcgtaggcggggtatctggaggaggcgcagggaacctggagagggtccagccctcagtgccccggccagaggcgggaaggggctctagagcttcggtgagtggagctgcccgccccggactggggattgggggggcttgagataggggaccttggcccaggttcgagttccaggctccatccccattccgctgtgtgaccttggacaagtctctctccctctctgagcctcaacggcctcagctgtgaaacggagtcagggaaggtctgctgagagttcgcacagaccgaggtttggggaaggaacttctgccttcctcctctttgtggttgccttgctcaggacattggcagcaaaacgagaatggtgggagtgtctcttaagtctcgagtgaccttgagcaagtcccttgcccggagtcacactttcatcatctacaaaatgagtgggctaacctcttttaagatctctttactatttgggtgttattggtgtagatggagacaaggtgatgagcacccattcagcgcaatgcttcccctatgggggtgtgatagaatatcttctcctaggtttgactagcccctggcccgaattccccttagttcctggattctgtggttctatttgttctccatcgctccttgtaactggaggagtgacttcttccgagagtcacttggcaccacttcacagcagaggaacaccagtatcttcactggcctaaaatcaaagagtggttgcaaggaaaaatctgacattccaaccttttcgtttgtatttctgtggcagggaggcaagatgacttctctgccccaagcttggaacagctaaagggaaaaacagtgcaagatgagaacaacaaaggtctacaaactcgtcatccacaagaagggctttgggggcagtggtcagtatcgattggtctttagaggttttgtaagttggctgaggttctggtgtgtgcaatacctagaaattacacactgactcgtgtgacaattgaggctaaacaggcgactaaacagactaaagcagcaactgtcatacagtaacaataggaggatggcaggacccttctaatgcatttgcattcagacttttaaggaacattgtgaatgctgccggtttactacccttcatttgttgaattgcattattaattacaaatcttccgtgtatgttccataaaattccagcctgcactggtttggcagataagagaaactaaaatcgtttatcagtttttacattgagtgagagagaagtggcatagatgtgcatagagcaggtatgatcaaagcatgaacctttgcctggcttgtaggcatgggaagaaggagcaggatacagcatgttattctgcactgagctatagtctgagtatctactctgcttctaattttcctggtgaccttgggcaagctcctagtgtaccttatctgaaagttgaagggctttagaatagtttctcttaacatctattttttttcctttcttttcttttctttttttttttgggacacggtcc

SEQ ID NO: 103344 - DNA, 1034 bp, Homo sapiens
gtacgatctcagctcgctacaacctctgtctctggggttcaagcgatttgtatgcctcagcctcccaagtagcttggattacaggcgcccaccatcatgcctggctaatttttgtgtttttagtagagacagggtttcaccatgttggccaggctggtctcgaactgctgacctcaggtgatcttcctgcctagacctcccaaagtgctgagattacaggtgttagccaccatacccagcctcttccttcttaaattctttattttccctcccttctccctttttctctccatttttgttgattgcttaggctctggtcttatttcacctaaaaagcagagaattgtttaaattctaagctcctgaaaggaagagactgtgtgttgcccgtgtcagatgatcaattgtgttgcttactgagttgagtgtttatagattagaatatatggatctgctttttcaaaatatgttatctgagccagatattgtttctgttttagaaactatcagtgtggaccagactgtgactcaagtgttccggctgagaccttatcaggatgtctatgttaatgtcgtagaccctaaggtatgtctttgttttgtacttgaatatctttttggaataagcacccttcctcaaggttagattactaaggaaacaatgggttacttaagtgtagtgttagcctattaaatgtgtggcctgctaggtgtggtaatttcagtacatcaggaggctgagacaggaggatcacttgaggccaggagttcaagaccagcctgagcagcatagttagaccttgtctttattaaaactttcctttttcttttttttgaaatggagtatcactgttgcccaggctggagtgcagtggcgtgatctcggctcactgcaactggtgcctcccaggttcaagccattctcctgcctcagcctcctgagtagctaggattacaggcctgcaccaccgcacccagctaatttttgtatttttgtagagacagggtttcaccatattggccaggctgttctt

SEQ ID NO: 103345 - DNA, 1059 bp, Homo sapiens
tatgtaggttgcatttaaaacccaccaccacttttcttgaagcttgtcctaaccattttctgtatgtgaaactatatgtaaaactttctattaaaatactaacattttaaaatgtattctcatttttcttcaagaagtgatgttataatagataaaaattattgtccagaaagtactattgacattaatagggaaataaagtacataggtaagtgtcatgtttgtgtgccagaatccagactaaaatacagaatgagtcccccactacccatcacactcaatgtgctacagcagctataggatcagttgtagatttaccaactatactgaaaagtgtgcttttgcaggatataattctgttcatcagagttctgctactgaatggtcttccagtagttttcttttttgcaataagtttttttccatggtaagtgggcattaccttctgactataaagtgtggcaaagtaatgtcagagatatcatttgattattccttttaggatgtgacccttgacctagtggaattaacttttaaggatcagtatattggccgtggggatatgtggcgactaaagaaaagtttggtaagatgtgattttttttgaaagtctgttactttttccattatgtgaataatccctgtttattatgggagaagaatataaaatcgtttctgattttatatcagcatctacagacaattattgtcaacgtcttctgtgttcttccattctcttttcactgttcttttgatcttttgtttactgttacagatttttactcagcatttttggtttagataggaagttatactgtattttacattggaatagaaccgtacttttcaggttttcactttatcccatttgctcctcacatctcctcatggacaggtatttattatccctaatttatagaggtagaaactgagattgagaagttaggtaattgcccaaggctagatagtaagttgactcttggccaaaacccagatcctgtggcttccagatcacactgctttttgctataccctcttcccgttttccacatgtattca

SEQ ID NO: 103346 - DNA, 1115 bp, Homo sapiens
aagcagtggaggcgtatggatgtccatataataaaatgtgtaaaagtataaaatgttagattgttggctggccacagtggctcacgcctgtaatcctagcactttgggaggccaaggtgggcggatcacgaggtcaggagatcaggaccatactggctaacacggtgaaaccccgtctctactaaaaatacaaaaaattagctgggcgtggtggcgggcgcctgtagtcgcagctacttgggagactgaggcaggagaatggcgtgaacccgggaggcggagcttgcagtgagccgagatcacgccactgccctccagcctggacgacagagcaaaactccgtctcaaaaaaaaaaaaaaaaaagttagattgttgtagctcaaacaaaccacaaaatgcactatagtagtttgaggcttattaatggaaaaagttgatgaagccccctggcattctgtaaaaaaggaagtagaaaaaaaaaaggagatagagactcgtaattttacaactggaaaaaccctagatgcacgtattgaatcatactttctcattttacaaattaggaaacaggtttagaaacataaaatgactggcacattggctcctgatttgttacctttttaactatattgctgtactcttgatttattaaaactatttctatattttagtttgtgaagaaaaaagagactttgtgaaatcccctttaaattcaaaaagtggctgggtgtggtggctcacacttgtaatcccaacactttgggatgctgaggtgggtagattgttgcttgagcccaggagttgaagaccagcctgggcaacatagtgagaccccatttctacaaaaaaatacaaaaattagctgggtgtggtgacacacgcctgtagtccagctacccgggaggctgagaggtgggaggatcgcttgagcctgggaggtagaggctgcagtgagctgggatcacaccactacactccagcctggatgacagagcaagaccctgcctcaaaaaaaaaattcagaaagtatttcaggtgcggtggctcacacctgtaatctcagcactttgagaggccaaggtgggctgagtgtgcttgagccccaggagttcaa

SEQ ID NO: 103347 - DNA, 1088 bp, Homo sapiens
ttgagcccaggagtttgaaaccactctgggcaacgtagggagaccccctctctacaaaaaaatacaaaaattttgtggcctggtggtgcactcccatagttccagctactcgagaggctgaagtgggaagatcgtttcatcctggagcctgggagtttgaggctgcagtgagctgtgattgtgtcactgcactccagccttgggtggcaagagtgagatcctgtctcaaaacaaaggaaaaaaagaagtccaacattgcaagattcttttatcattgctttaaaaaaaattgtggttaaaaagcctatcataaaatttaccatcttaaccatttttaagtgtatagttcaatagtgttaagaacatttacactgttgtgaagcagatcttcagaactttttcatcttatagaactgaaactgtatatggcattgctttttaatacaattgtgtttttatttcaggtggtgtttcgttctacgtcggctatggtttacatatttattcagatgagctgtgaaatgtgggattttgatatttatggtactgtgtctatgtgctgattgtaactgctaaggggagaattttctggaactgcaaatgctaattcatgaatgcccagggtcccccacatcatcttctaacaaactttaaatatcattgtgagaataatcatatttggaggttagagtgttttctcgttctaaagatacactacttttttcaataatcaaatttttttcaaactgcattgtatgttgaagtcatagcctcttagtagtgaggcagatattaaatttggcttcaaaaaataaagaaataaataaacttggcttcttagtttgagaatgaaaccactttgtacatctggcttttatgatcttgttttaagatgtacaaaacaggccgggcacagcggttcatgcctgtaatcctagcactttgggaggctgaggtgggcggatcacctgaggtcaggagttggagaccagcctgaccaacatcgggaaaccccatacctactaaaaatacaaaaattagctgggcttggtggtgggcgcctgtaatcccagctactcaggatgctg

SEQ ID NO: 103348 - DNA, 1053 bp, Homo sapiens
gcgagcagagatcacgccgctgcactccaacctggttgatagaaaaagacactatctcaaaaaaaaattcttttttttttttttaaataaataggctggctgcagtggctgacacctgtaataccagcactttcggaggcttaggcagcgggatcacctgaggtcaggagctcaagagcagcctggccaacatggcgaaaccccatctttactaaaaatacataaaaaacttgccaggcatggtggtgcatgcctgtcataccagctacttgggaggctgaggcaggaaaatcacttaaacctgggaggtggaggttgcagtgagctgagattgtgccactgcattccagcctgggtgatggagttagactgtctcaaataaatgaataaataaataataaataaaattgtaaaagtaaccatgttactagaatttgaatatggagaggtatatcaagtaaaaaatgatacccttctcctgctccccagtgtgagtccttttttaaggggaaccattgttagcagtgtggtatgattatcccggcatttatgtgttagccgaaatatattgtttgcaaataacagagatgtactgatttagtttaaacaaaaagcgaaatttactgtaaggatacagaggcttaaatggagcagccaggaaaggctcaaacaccatgtcgaagaaccttagtggctctgggaaccatagcagcaggaattatgagagccatatttcagcttccagcaaccctgtctctgctctctgttcagaatttacattcctggtagagagggtctgatctgttcagctccagttaggtgtccatctgccactggccagaggtggaagtgatgatacgcgtacacatcactatgtatatcatcttcccacatgtctgtacccaggtgctcagggaattctagagcataatgtcttctattagtaaatcttcttgtcatattggaatatcactgatttttcatagtaagaatcatagaggctagaaataaaaagtgacttgccagatttacaaagtcatcccaagattttgg

SEQ ID NO: 103349 - DNA, 1021 bp, Homo sapiens
tggagtttcaccatgttggccaggctggtctcaaactcctgatttcaagtgatccgcctgctttggcctcccaaagtgctgggatttcaggcatgagccaccatacccagccctcacagcatgaaatttgagcatttaaggctgcacagggcaagtatgaggtgtcaatgaggggtattaacaaaggtgacagcgacttattcctgtggtcaagtagttcttaatatggaagagaaaagacagatgcgtatacatttaactagaatgtggcagttgctataataaaaatatgggcagaatgctctgagagtgtagagatgcttgtctgtgacagggttctgaaaagctgtaacatcattattgtggaatttttgttttatttctagtgtttgataagcactacatcaaccgcaactttgaccgaactgggcagatgtcagtggtgatcacgcccggggtgggtgtctttgaagtggaccgcctactcatgatcctgaccaagcagcggatgatagataatggtaatgctctctggtttgtgccctgtctccacatgttcctagcctgatttccccttagaactgtgagcttcactgacttcttagagtgtgaggagctctacatagtgttctgtgtgtcacaacgtctgtggatgtcaataggtgtcaggtgctaaaatttcatggtcaaatcagtttgggaaatgctgggtcatgcaaagataagcaggttccataatgacaggtcttcctcagtttttaatatgttagtgtaggttgtttttctctaaaggttgtgtcagggtactctgagttccccaaacatatttggcactagagaagccttcctggagggatgatttcaagggacccatgtgctgtcagccgattttctttctttctttttttttttagacggagtctcgctctgtctcccaggctggagtgcagtggtgtgatcttggctcactgcaagctccgcctcctgggttcacactattctcctgcctcagcctcccaag

SEQ ID NO: 103350 - DNA, 1051 bp, Homo sapiens
cttgaacccagaaggtggaggttgcagtgagccgtgatctcacgccactgcatgtcagcctgggcagcagagcaagactgtcaaaaaaaaaaaggagtttggaaagtaaatcctgatgccactaaagaagctctgttaagtgatgtggattgttttactttttactgagatattacaaagttactgttcctttctggccttaaaaatttaaacatggaagtttggttgtctttttttaaacaagtcatgacctgtaggacagtcaaaggctaattgtcaagcaccgaataatgatacgttagtagggcacttggaaaagaggaaacagacaaaatgaatgtatttacttctttgttggataggcagcactatgaggttataaatcatacaatggtaagttagctttgcctactacccatttaaataacatgatttatagatagggacacttgtctctgccattccctccccacaattctttttgtcttttctttttttaggaattggtgtggatttggtgtgcatgggagagcaaccgttacatgctgtcccattgttcaaggtaattagatttcggatttgtttactaaaggccagttggagtatagttagaaagagaaaaattccaggcgctgtggcatgcacttatagtcccacttactcgagaggctgaagtgggaagatcccttaagcctaggagtttcggtatagtttgctatgaacatgcctatgaataaccactgcactccagcctgggcagcaaagcaagactctatctctaaaaaaattatttttgagacgatgtcttgttcttgtcctccaggctggagtgcaatggtgcgatgttggctcactgcaacctctgcctcccgggttcaatcagttctcctgcctcagcctcccgagtagctatgattacaggcgcctgccaccatgccaggctaatttttgtatttttagtagagacggggtttcaccatgttggccaggctggtcttgaacacctgattgcaggtggtccgcccgccttggcctcccaaattgctgggat

SEQ ID NO: 103351 - DNA, 1089 bp, Homo sapiens
aagccactcagataccagtggggataaagacaaagatgcagatatgcattgcagcaaaggggaaatatgataaaaaggtcagatcttagtataaagaaatgaaaattctggctgtgtgcagtggctcttgcctgtaaccccagtgctttgggtggctgaggaaggaggattgtttgaagccaggagtttgagaccgatctgggcaacaaatatagtgagaccccatttctgtaaaaactaaaaaagaattagccaggtgtattggcacatacctgtagtcccagctacttgggaggctaaaacgggaagattgcccaagcccaggaatccattgctgtggtgagctataattgcgccattgcacgctaacctgggtggctaagtgagatcttgtctctggaaacaaacaaaccaagaaaataaatgaaaattgtaacaagagtgggaattcttgttttcttctttccaaagaggtttaaaatatattaataattatatcacatgctacaaaaagtgtggtgaaattgacacttgagtacctggttggtgtaccatacttttgcaaagcatttcagccatgtgtattgagagcaaatgtttatgctatttgaaccaggcacttccattttggggcatgcgatgtaaggaaataattgaagtgataatatgcaaatacatctgggtttagttttatttataattgtgagaagttgaaaacaatagatcaatggctgaaatatgaaatatccacttgatggaatatatttgcaactgataaaaatgcaagttttaagaattttaacaagtgtttgttgttgtcgttgtttgtttttttgagatggaatcttgctctgtctcccaagctggagtgcagtggcgtgatcttggcttactgcaacttctgcctcccaggttcaagcaattcctgtgccctagcctcctgagtagctgggattacaggcacccgccaccacacccagcctaatttttgtatttttagtggagacagggtttcacatgttggccagggttgtctcaaactcttgatttcaagtgacccacccgcctcagcctcccaaagtgctggga

SEQ ID NO: 103352 - DNA, 1058 bp, Homo sapiens
gcaaacaaatgcaaacatatttcatttctttatagtttgacagttttgctcatttctctcactccctgacatttataatgcccaagattcttgtcagccttggtttatcattctacctagctctggtttcactgtggttctgtggtttttctttgtgactcaactccatgataactggcagatgtcctggagaacatgatggagccaccacagcgagactccagtgcaccagggaggtttcacgttggcagtgcagaatccatgctgcatgttcgacctggtggatacacgccccagagagcactgattaaccccttcgctccctctcggatgcccatgaagcttacgtccaacagaaggcgctggatgcacacttttcctgtgggtaagttggttgcttaagagagagccttggactaggagctcctagccctggtcctcagtgtcggtcacccatgtgtccttggtcaggtgcctctgttgctccacctgtaagatgggataaccatgcccactttggccatcccaggggttcttgtaaagatccttgaagatgcacttgggaataggctttgtaactaattagctgtataaacctgagggcttttttgtttgtttctgcccttttttttttttttttcttttgagacagggtctcactctagttgcctaggctggagtgcagtggtgcagtctcagctcactgcagcctcaaccttcagggctcaggtgattctcccacctcagcctcccaagtagctgggactgtaggtacgtgccaccaggcctggctagttttttgtatttttagtagagacagggtttcaccatgttgcctaggctggtcttgaactcctggacacaagcaatctgcccaccttaacctcccagagtgctgggattatagatgtgagccaccgcatccggccctttgtttctatttgagaggaactatgcattgccacctgctttctttcctaagtcagatgtccctcattcttgttcattccttcttctcttagatctcttggatattgatatcctgtcttggttacaag

SEQ ID NO: 103353 - DNA, 1086 bp, Homo sapiens
ttgcctttaatatttaaaagttaaataagtgagaaatagatctgaatcatttggctgtaactggggggtcatgcctaaaccccgttctgcccccttatctctgctataatcagtcacactacttgtttctttctgtgtcctttcccctccattattgtctccactggttcccttccaggtcacttagaactcttggtgtttcttcagtgaccttcatcttttcatgcttctgtgcttctcctcctcccactcttcatgtacactttattggaaccatattctgcaaacagtttgcttcgcttcttcctcctgtttagctggcctttcagtagccaaggccctccttcatcagggttccctgtcttcctcattcctatcctcagaggctctcttccttcttggctaatcttgtggtctcctgcacgttttgcctctttcaggtttgggatttcacaggtatcatttcatctacccagatgccctcttccttcaatcgctgttaactttgttgaacacttagctctacaagttctcctttcccaggaagcctcattttgtagacttgactaattgtaatttgtttcctactctgccttttttgcacttaaacatcttctgcttcttagagtcacagttgttactctcctaggtattaacagaatcatttggtgtttcacttgtatttccctcttactgagtttgtgttagccctcctggcaaggggccatgcctcctatacttgtatatttcactgtggctattcagttgacacacctgaggcagaatatcctaaaatattcttaacagattagacaggatgataaaggtgaggctccttagtaggatgggtcctgcttggaagagcagatgtcctttgggagccaccctctgtggtgtgttcttctttcaatctcaccaacatctgtatcccagtagctggaaagaagggagagtatagttaagtgcacagcactagctatcaggtgggaatgatgctcagtggttctttatctgggtagggccatccggagaagccatccagatccaccaccagacccgacagaatatggcggagctacaaggcag

SEQ ID NO: 103354 - DNA, 1001 bp, Homo sapiens
aaaataagtggcaggttgctcgtgtttgtgtgatctcttttagcaaagaatgataccagtaacctcagagtaaagttctggctcattcccaattttagattgatcatttttctttgatcgattcttttgtactgtttgaaatactcagcacagaatttgcacttggtttacatttttatttttagctccagtttgcctttttcaaccataactggtcagaactcttttgcagagtgagccttcttaagacaagctgtttttatctttccataggtatgaatcctaggacccagaataaggattctctagaggacagtgtttctacctctccagacccaagtaagagggggcagctgactggggaaaggggtagacagggagtgtggggtggtcagagcatgaggaaacaagaggaagccctgtgggaagtgagtggtcctgaggtacacatacctctggggtatgggaaggcgatgtggtgagggaggactctctggactctgtgatggaaagtgagggggtgtgtgactgaatgacctgttttggaaggtgattcaggggcacctgggaaaggtagcagattccctataaggcccccatgctggtccagagctggccttcacccttaactgcctaatgatatctccatgaaaaagttggaaagacataataggctgttaactggaatcatttacctgcctgtagttgaaatatttggctgaattgcattccttttgattgtctttttgaatagctatgcagtaagagaatgtctaaatatctgtaataataaaatagcagagaaaatcctaccatttgataaactttacttagctgtgaccaatggatgtatatcactgagtctttttgtccccacttttttttttttttttgagacagtgtcttgctctgtcacccaggctggagtgcagtgacgtgatctcggctcactgccacctctgcctcccaggttcaagtgattcttctgcctcagcctcttg

SEQ ID NO: 103355 - DNA, 1009 bp, Homo sapiens
tagatgattctatttctctacaaccctgtcaccggagtttgttacctttgctcatcattgttattttagtggttctgaggtgtagaacttcctcagagtccctcttttcagaaccagaagatactggggttagaaaagaggctgcactcttttcctagagacagaacacccttaaacttacaatcaggatcctttctcatcatgagatctcgaactaagcatttgaacagtctgtgtcttgttgtgtgcccagcagaaagcatttctacaagatttttgtaatcctgagggtcagaaggctgatgatggccaggatgatctaagaggacataaagatagatttgtcttctgtttctggcttccccactggggctttgatcaggtcctcatcttctgttttagccaggaagtaaaaacaagctcaccttctcggctgccatatagaaaaatggagatgattaattaggctattcgggcctatgttttggattcctgaattattaatgagtttataaggcctgtgtagagcatgaattagatctgttgcaggctaaatcatcttccccaagtcagtggtgccacgtggggcatctttctgctgtgacttagcacacaaattttgttcttcattgacgggagggctgatgaggcagcaggggctacaacacattataagctgttagcatggtacaaaaataaagtgagtatcccattcagaacttagagacaaacgctcagagtttttcggcttcgtattgctcccttctttggaaagttaaaagatagtcttcacttaaattacttaaagaggtaactgccctattattttaactcagtgaagctcaaccagggaggattttcctaaccagggaggatttccctcccccaggggaacatgtcaatgcctgcagacatttctggttttcacagctaggggatgccactggcatctagtgagtagagtccaaggatgctgctgcggtacccaggacagcccccacaacaaaga

SEQ ID NO: 103356 - DNA, 1004 bp, Homo sapiens
attgttaaaactctgtctcttaaagttccagcctcctaactttcccagatatccttacttgatttttcctcccacccttttgaatctgttacttatttttgcagtgctagaagtattccttatttctgctactgtatgctgtttgctcccaaacgaggctgagctcccctcctttccccacctagccactctgcagtccttgggagaggctcgtgcttgggcctccctgctcttggaacgttgatgtgcttcgacatgtaattctgcctgccctgccgtaatctcacctgcattgcggctgcagctcacagtcagcagaaaatgaaaaatatcagctgtgaatcccatttgcatgatgggattggataagcatgtgcactgcattgtctaacaaactctgtttctctctctttctccctcccctaccctgtttcttcccaatcctggcaattttaccatctttcaccctgaacttttttccccactcttccctccccttccctcccctggccccccatcccacacttgccatggtgaccacatgtaccttttccccctgttacgtgaggcagttctgacactgtctgctccccctgtagtgccaggcttctgttgcacagttggagtggactggaagtctctcactactccggcgtgcctcccccttaccaccgactacttccctgaccgccagggcctgcagaatgactacacagagggctgttatgatctccttccagaagcagacatcgacaggtcagtgtcagagaaaaaggcacttggcttggttggtgagggtttcggatatatcccacacatgcatcagaacactggatttgtgctggcttcagcaacacatatattaaaattggaacgatatagaggagattagcatggccgttaaataaaaaattttaaaaaaacattgaattgtattttatctttttttttccttttttttttttaactgagagagggtctcactctgtcgctcgggttggagt

SEQ ID NO: 103357 - DNA, 1126 bp, Homo sapiens
gcagcccaagacacagaaacccaatcctgctgtcccgcccccgctgagcagtagcccactctatagccgaggtgagtttttctccttggatttctatttttttctcttctactgtgtatgtggaagtgggttttcaagatggtaggtagtagataaatttagtagtaatcgttttcgacatagaagttttctttataaattctacttaagtgaggaataaagtctcctttaggtatggatttattttaaatgctctctttaatttacaactctccctttaaggcagtggatgtggccaagttcaggaatgggacagcctggcttggacagacacctgggaatagtaggcagctgagtcactactgagctgtcaacgtttctaaacctatatttaattgtttctagtacagtacctggcacacagcagattgtcagatgttacctaaacctgaagtttacatttgttcttattttcttattctggattcatctgtctcttctttatcactgaagcttggtggcttgaagcaagaatgggtcatctatgagtggcagattaggctagtaagtaacagagaatcggtgttgctaattgaatcagagccaggcaatggagagctcctctaaaataagtctaacagagggaattaagtgcaggtgcctggaatcagaaagcagtaatcacttcctggaacaatcaatgagctgtcttagtctcctgtctcttcattattgctaacaagaccccccctcccctgatcacctagtgataaccttggatcatctttgtccccatgaaagcttcttgggccagaggatcagagaactgtggccctgttggagcatgcggtcatccagtccaggccctgttgtttatgtgtgaagctttggactccccctggattttctttgaaagccccttgtgacatttatcacatgttgccttgtattcatcttccagaccctactgaatgttaacctttttgagtgccaagactatttctgttcatctttttgtcctccacaatggaaactacatgcctggcatacagtaatatgcaacagtatgggttaataagtatatgaatttggctgggcgtaatcctagcacgttgggaggctgagg

SEQ ID NO: 103358 - DNA, 1037 bp, Homo sapiens
aatactaagtgtgagccaggccctattccagcagggaacagaacagcatcagccctcccctcagagtctacagtctatggcagagtcagatgttaaactaataaaccacaagtatatatttgatcacagattgtgaagaataaataccatgcaggataaacacagaaataactggggtgcacctaatttagaatgggggtgtcaggtacgatgtcagatgctcatgaaccttgtcccatggcattgtcttcccaacagccagcagagtgtttgttgcatgaatgaagaaggaatgcttggatgagggcttgccctctttcttgctgtagaaagtgagatttggtgcccaagatcacacaagctggcaagtgaaagtgctggggttggacctggggtcccctgagtagcttctgttttgtatgcagctggcctgctactcccttggcaccatcggggaaatttccacattcacagtgaatattatttcagcctctgctgtcctcctctctcctcttgaccgctcacatgctgcctgtcactgtgtgactgtctcagagctgaatgagtgttaccagtggaaggtgtccaggttcttggcacctcaaagagttggacaaaatgcacaaacaaagcaaggaaagaatgaagcagcaaaaggagagatttattgaaaatgaaagtacactccacagtgtgggagtgagctggagcataggggctcaagggctcctttacagaattttttagggtttaaataccttctagaagtgtcccgttggttacttggtgtacacgctatgtaaatgaagtggtggctcgcaatcagtctgattggttgctgaagtgaagttacaaagttacacttctatgcaaacgtctgtttggttgtaaaaatcaaaccaatcagagacactttcagttttccatctgcctcacagaaaaagcggagagtggtttgtgaagggagtaacctccggtccttttgttacttaggtgtggaaagttggggttttccttttgatttagttctaggaagt

SEQ ID NO: 103359 - DNA, 1066 bp, Homo sapiens
ggctgagacaggagaattgcttgaacccaggaggtggaggttgcagtgagccgagatcgggccattgcactccagcttgggcaacaagagcgaaactccatctcaaaaaaaaaaaaaaaaaaagaaacaacatgagcaaatatttgcagcaaatcaataaatggtccttttagactgaaacttggtatagcagtttaggattagtgagagctaggaccagaaagctaggttggctgccaccttggagtgagaacctcgaatgccaaggtgggcagcttatgctggtgtagtagagttccattttagtaacacagtcatctcttacagaactttcctctccagaggatgaggtatcaggttgttcagctttgagtgtgccatctaggtgctatcagctagcaccttcaggctctaatctgctcctggttggtttaataacagaaaaatctgccaacctcaggagttttttgtttgttttttttaaccaagaataactttcttccatgaaactgcccctaagagaaagtgttacattgttttctgaatctatatggatgagaaacaattgtctgttataggaatgagcttcaaacagatggaggaaattattatttttctgttaggccttgtgtcccgaaaccgccctgaggaggaggaccagtattggctgagtatgggcagaacgttccacaaagtgacgctgaaggataagatgatcacagtgacgcgataccttcccaagtgagtatttggatatttaaagtcttcagttattgtcctgaattatggccacatactaaattgtgtgtatagtacatcattcaaactgaggaagttcagtggttggtttttcttttggagttttgtttgtttgtttctagggttattttagggttatagcttacctacttccaaaagggatttgattcatcttataatgtttagcatgattcatgacaagcctatttcaaataaagattgtgaggagagaagaaggaaagagtttaagaagatctgagaaatttctagtaccgttccctgggataagttggttactacagttgag

SEQ ID NO: 103360 - DNA, 1036 bp, Homo sapiens
catatgccttggtttcacactctggtcttaaacttgtctcacacactcagtcatgctagctggctggcttttctaggcctttgggtatgtggcctctttataaacagtaagtgttaacagttgataagacactgttgggaccacacttggttgggaaggcaggaagagtgtggtgtcatgggaggtgggattcaaactggcattgtaggaagcaaagcgtttacatgggggtgggtgagacttgaggaagagaaaacattgccttgggctgccttccctgcccctctccacctcacagctagatcaggttcctccctgtgcttgccagcatcctgggcctacgtccatcagagcacttaccagtattctgctgggagccagttgtcagttgacttctccctgacttgactgtgtgctctgaggccagaggctgtgtgccatgcctggcacatagtaggtgtgtaatggatatttattgaatgatgggttgggggatgctgagggtctccctgtagagatgtgaggtgagcatgttaggggaggctagaccttgactgtatggtatgagggtctgtcatgcccgcaggaacctgcacacattaggctttccagaagtaacattgaacaagcaaacgtgaggtatggtggggacatggaattggaaagacagtgtgggaatttggatgctaggctgtccttacacattctcatggcaagaggaatcctttgaaagttttaaaaattctattacaggccaggcgtggtggctcacgcctgtaatcccagcacgttgggagactgagaggtcagggttacttgagcccaggagttcaagatcagggtaggtaacatagtgagaccccatctctacaaaaaattagcctagagtggtggtgaatgctgaggtgggaggattgcttgagcctgggaggttgaggctaggctgtaattagcctcagttgcgccactgcattccagtctgggcgacagcaagaccctgtctcaataaaaaatgaaaataaaaattttattagaa

SEQ ID NO: 103361 - DNA, 1055 bp, Homo sapiens
ctcagcctccccagtagctgggattacaggcgtgcaccaccatggccagctaattttttttatttttagtagagacagggtttcaccgtgttggccaggttggtcccaaactcctgacctcaagtgatccacccacctcagcctcccaaagtgctgggattacaggcgtgagccaccatgcgcagccgtaaaaaccattcttagctcactggctgtaaaaaaatcagagggctggccagatttggcctgcaagctgtagtttaccaactgctgctctagggagtggcattaggtaccaaggacagtctgtgtgtaaggaatgatctgctgaccatgagtcttttcacctgaactccttcacatgtacataaacctcaacaccatcagcacctctgcttctatatgttctggcagttagaagggacacagtggaacaatgagataaaattaccctgtgtgctgtccaccaggttttgcctctactcattgccatctttgagggtcagaaacagtgctgaggacatgactgaaaagcagagaaattatagtcgcaaatatattagattgctgtttagaaccctctcctgattgtccaggtgaacgctaaaatccacatgcatgacccatcagtagggctggaagtaaactcctgaatagtcaggggaaacaaaatgctatgagatggccaaagcagagagccctgctgacatgctcagaaatgcccaactgtttccccaaggaacacttcatgttagaatgcgttgggggtacctgcatcagcatctccgcagccacaagtttccaaggtttcgtattggagtttgcagtcacttacgggaagtggcagcagtatcaataaaatgggcacccaaatatttcagttattctacctttggaattgaggaaaagttccagaaaagcagagaacttgagatgtgtcaagtgccattcctgaatttctatgataaccagacataaaaagtaaaaagattccgaaaggaaagagggtactacttaagaatgatggaaggaggggtcattgaaaaagtcctccg

SEQ ID NO: 103362 - DNA, 1433 bp, Homo sapiens
atttttgtttcacagacatggctgcttgaattccacaagggtagggtagggagggaatgacagctttagaaagcccctcacaatgtgagtgcttgtgtatctgacattatatatgtcttagcttgctgatgattttgttacacaaccagtggaggagaaggtatggctgcttctgtatcccctgtttgctaaaaaaaaactaagcaagaacttaccctgccttgaatcctctcctcccatctggctgcccatgtttagtaacaggcagaaaaaacctcctggctcaatgtatctctccaagagggcgactggtcacccagccaggtgggaggccaggatgttgccaccaaagcccttaccctgcagccccaccaagctgctctgcggccttttcatcttccttggcataggtctgaaggaatttcagagctatgtgggagggtgagagcatccaagccacactctgatgagacctgagagagcttggacacaccttccaacctgggtgctttctcccacacagatgggatattctgcccaggaaggtgtgagtttctgctaatgcttcgcatttggatattgtctttctgggtggcgctctctctctctctctctttttttttttttttaattttccctatcctcttcatatgtccttgtttctctccttccctccttgtttttatttttattttttgttttttatacctgtctccttcccctgatggttaaccactggtacacattccgtttcttcgcttccttgcaactgctgctgctgcttcctcctcctgtgacttcaggacggggccttctttatggagtttgtccgcagcccacgcacagcatcgtccgccttctaccctcaggttagtccaactccagggcttcgcatgcctgtcccactggcagacgccatgagctggccttctgttaggctctgaacacatggaattgggctgcaactaagtttggggggcagttgaacttgaatttggtctcagaattgtacattctcttccatgttgtttgtggcggcgaagggggggatggaagaggttaatgtagaagaacatatgattgtaccagtgatgactcaagtgtttctcatcactgtctgtttcacatagttgtcactgattctctgccactttgcagcatcttcacttttaggttttatgagcaacatgaaatatgcttagttaagggctgaacacttatttttttcccctcccaatacaaccagataaatttataacagtgtggcaggaagtggtgaaaaaacacagcaaatatttattcataggcatgtgctaatgcataggccaaaggtgtagctcacctagcttctggatttcacttaaattatttgtcagttaaaagatttggatgagccgggtgcggtggctcacgcctgtaatcccagcactttg

SEQ ID NO: 103363 - DNA, 1330 bp, Homo sapiens
aaagttttcagagtaacagaatgatgggattggaactgttcttgacagacgatgcaaatggagctggctcacagggagggtttttgagggagaggctgcaatcaggggctatttagaagaatgttacagccctccctggccagaggaagtacaggcatgatttagagatgcatgtgaatctgcagagggcaggccgtgggactaggcctgtctttagatgcaaagctggagaagagagctatcagatggctctgagagttgaacctgagcaaactgaaaggtagaagaaaggaggttttgggtgggaaagggtgagtcacggtaggcagaagatgtacattgtgatgttcacctatttgtctctaaatgtggtctttcagtcctgctgtcctcataaggagtgattctgacttctccactctttctatggagatttttctttagtgtaaatcgtgtggtttgaggcaggtgctgaagcgatttctttggtcctggggatttactgtgaagagtggcctctcatctgccctggttggagggtgggagttcccagctgctctgatagaaggcagtgcacacaagactgggtagagtctctagacaactttagctgtgccactagggaccaaggggtagtgggaatgagcagaatgggaaggattgcattaatttttgtttattttttgtgaatgcttactgagtgaataagccagtacagcttatttactgtgttttcctgtcagttatttttggaatcaagtattcatttttaaatctcctgcaggtatctgtggaccaaacagccactcctatgttggacggcaccagtttgggcatatgcacaggccaatccatggacagaggcaacagccagacctttgggaactcccagaacataggagaacagggctactcctccacaaactccagtgacagcaggtgagattcagagtggccaaactcatgttcctggggagtggggacagtctgatctcaaaggctgcagaggctgaagtccaaagctctgggccgagttctgactctgccacaagtcacatgcgaccctgggcaagttagtccttaaccacatctgtatgatgggactaatgatctgtttcctgccatcctcacaggatagctaagaggttcccacagagatgtaggaaagtgtcaggcaccacacaggagtacagggcttccggaagggggctctgtccagtctgtcttgttcactgtggtgcctgtggcacaatgtcttgcacgtcatagcatgctgtcagtaaggaaaagaacaaacagtggatgaatcactaattgtggccaaacatga

SEQ ID NO: 103364 - DNA, 2065 bp, Homo sapiens
ttgggggaatgccctccctctgacctcaagccgccagtttcccctggtcaatgcatgcttattcaagactcaatgctggattcaaggctctgacccaggggccttctgtcaccttgtacttactctgtcagagctcttagcacaacagaatgaagatctttctctcatttgtctcctgcctcaaccagctccttgagagcaggatcacctcttattttccatttctgtatcaccagtgccaggcatgttgcttggcacctggtaggcacttagcaccatgcttgctggatttaattacgctgctcagaactggaactctggaatatggcagaactggaataacaaggaaatgggaaacggccagttgactgagccagttcatgccatcctgtctatacggaggccccaactggaagtcagtactgtttccttaccagctgagttgtcatcatggaaatgttaaaattgataactgatttgaaaaagcatgtgattctcagttctcactctgagggtcttgatgtgctgttttgcacagcctttgccgtatacactctcgtctccctgagaatacgatttccttattcaaataatgaaatgctactacagcagtttaaatgaatgagctgaaggtacatgtatcaacatggataaatgtcagaagcatgatgtggactggaaaaccaacttataaaatgatataatattatgccctttatttaaaaacttagaatcccgaaagaataccttatattctctatcatacgtgtttatataataaaattatttaagaataatattacactaaccatttatttctggggagagagaaagagtaatgggagtgggagagtctaaggagatttttttttaataagaatatctgaaatcagtatagagaagtgtcaaatttgtgaaagtagaatagtggcatatgtggatttttttttttttttttttttttttgagacagagtctcacttcgtcgcctaggctggagtgcagtagtgctaatctcagctcattgcaacctccacctcctaggttcaagtgattctcctgcctcagcctcccgagtagctgggattacaggcatgcaccaccataccagctaatttttgtatttttggtagagatgggatttcaccatgttggccagactggtcttgaactcctggcctcaagtgatccacccccctcagcctcccaaagtgctggggttacaggcgtgagccactgctcccggccatctgaatttcttcatgcccttctgcatgtttgaaatatttgatgatgatacgagtttacattttaaaatataatttatatcaagtacaacatgtctaatctgggggtggagggtagggtctcctcagtgctcctgtcactcccttgtctccagagcatgactgagggctgccccttcaagatgcctctctgcaggaatttcagagtttcaatgtctctcctagaaaatgctggaagagcagctcatcacacatgcatctggcgaagcctggcggaccttcatctacggcttctatttctacaagatagtaacggacaaagagcccgaccgaggttagagccgaggcgaatgcggttgcccacaggggcaagtgtttttcctggtgacttgctctttcacatgatggtgcttcctgagctgcatgtgtgactttgtattataagttgacagatctgtcaacttccttgagcctttgtacttaatttaagcatagccagagtgacaagggtttcttaagctacagtgtgttcttggtgagaacagtgtgggtgaaagataaagctaaaagaggccaagggacctggtgtgaggaaattcccacacatcagtttttggtagctgtttttaattagagtgccccacccccttgcccacccagcccaggtggttctgattatattatcatgggctccagtctgtgatttatagcacttttcacttgctagatctccagttcaggctccatttctaaccccaggaaactatcaagtcctagcaagttttccaagtaatattttaagtatctgtggggttttt

SEQ ID NO: 103365 - DNA, 1064 bp, Homo sapiens
aggatgtttcagagacgtgtcaatcaagttcctgaccaggctaaggccctaaaatacgctcagaagcaaagaaaaggtcaggcttctgttctgcctggctgggcactgccagacctagggtttctgtttgttttttgcctccctgaggcacagtcttaagagatcctgagaacatgtacccccagacctagggtttctataaactataatccacccctcattctcccttacccccatgaattcaacagttttcttcagctgaagtggtcagtttagttctgggttctgcagatagaagccctgagtgggtttttctcactgacaaagataaacagctcttgcgtcagcaattttaatgagcttctgttgtaaggcaggagagctccagctaggtcactaatggcattcaggcaaactggcattcagctgccagatgtaccactcaccattctctcaaaagactaagtccaggaagtgtggttagcaagatgaatatgagagcagagattaaccaaaagttgacagaaaccggagtaagagaacgcctgaaagagctgctgagctaaattaattgaatgtggctgaaaggatgagttgataaagataatgtaaagataatgattttaagtgatatgttttttgcttttgcattaagaggtaattaaagagaaaggactagaacacgttattgtcgatgacttggtggctgaaatcactccaaaaggcagagccctagtacttgacagtttaaagaaggagctcctacaaaaaaataaaaacattccttgctcagcctgtcagtctttaagattgacctagattgtgttgttctgtggtattatttttgaaagtaatatctgccataaattagaaaaccattcccaaaataaaattcattttttagccgggcatggtggctcacgcctgtaatcccagcactttgggaggccaaggcaggcggatcacctgaggtcaggagttcaagaccaacatggagaaaccccgtctctaataaaaatacaaaaaattagccgggcgtggtgatgcatgcctgtaatcccagc

SEQ ID NO: 103366 - DNA, 1054 bp, Homo sapiens
cttgcgtcggcctcccaaagtgctgggattacacacgtgagccactgtgcccggctggtgttgtatattctgtaggtttggacaaatgtatagtgacacgtatctaacatgatatcctacagaatagtttaaccgccctaaaactcagtctgcttttataaagttttattggaatacagccaggcaccttcattatgtaacgtttgtggctgcttttgcactacaatagcagagttgagtagttgcaacagaaaccatatgtctcacaaaatgtaaaatatttataatggggccttttacagaaaggtttccaatatctagatgatttccaggaaacttctggaatctgcagttttcttttaggcacttgtatatagtttcatatctggatacttagttatttgttcttcttcatcccactccttttctcactctcttggggcccctcctgtgtgctgacatagctgccactgtcccagagcagaggactgtgaccctggatgttgacgtgaacaaccgcacagaccggctggagtggtgcagctgttattaccatggcaacttttctctgaatgcagcctttgagatcaagctgcactggatggcggtgaccgcagcagtactcttcgagatggtgagaaccttcatgcatgttgtcaggcctttggctcacctcacagtgggcatggagatgcttgatagagattcatgtcactttaattttttagttcaggctcttattaccattcatcgggactattggagtaacctttttaaaaaatttaaacatagtaaaaattttaagcaatcaaaaaaggtagaatcagggtttcttagccttagcagtattgacatctgaggccagataattctctgtgggggagtcctgcaccttatgggaaattgagcaacaaccctagcctctacccactaaatgctagtagcacagccccaggtgtggtaagcaaaatgtccccagatattgtcacatgtccccaggaagggggagtattgctccctcttgagaatcactggtttagagtgaaaagtaagt

SEQ ID NO: 103367 - DNA, 1055 bp, Homo sapiens
aaagttagccgggtgtggtggcatgtgcctctaatcccagctactcgggaggctgaggcatgagaatcacttgaacccggcaggccgaggttgcagtgagccaagatcgcaccactgcattccagcctgggtgaccaagcaagactctccctcaaaaaaaaaaaaaaaaaaattagttggccatagtggtgcatgtctgtggtcctagctacttgggagattaaggtaggaggatcacttgagctcgggaattcaaggcttcagtgagctatgaccatggcaactaacatgcatttacagtttatcttctgtttgtactttaatatcatgctcctttcagctttgggtataagaagtcattcgaatgagccttatattgagttctggtagctcacactgactgctgaggacttcaccttcctagacccagctatagcttgcttgggggaagggatggtgtgaacacacagctgtcctttctttgacccttgggatggaggccagtctttctcaaagggcgtagtatggagaagcagaggttaggctcaaggggactgattgccaagagtagtaaagggtacagaagactggcccagagagaattacaaaccttgtgatcacaacccaatatttattcttattttcctttcaggctttgaacccgaaacgtactgggatcgaatgcacctcttccaggaagccattgcacacaggtttgtcccttagcaagtgtgaagagtgggaaggaaatcagtgtttatcttgaatagcagttaccaaagtgaaactcatttttttagctcctagagaaagggatgtattccaccaatggcaaattcactgcttatctccaacaggactctttacattggtttttgagataagcgctgcctccctgtttcctgtaactattgtttttcagacctcattattttcttcttccagttgagtggagaacatagaactctctccttagcctccaacaagaccctaggccaagctattcaggaaataatataaaatgaaaaattaaaaaatgtgtcaagagcccaaca

SEQ ID NO: 103368 - DNA, 1076 bp, Homo sapiens
cacctaaaccccccaccttccacacctaaagccccccaccttccacaactaaacccctccaccttccacacctaagcccccccaccttccacacctaacctctcccacctttcacacttaaacctctcccctgttccacacctgtcagaatcttcctccagggattcccaaatgtttcctctctgaattcctctttccctttctttcaaaacactctgaatgtattccagtgacttgggggcccttggagggcaggggtatgctttttcctatttgtgtttccttctataatgcctagcaaggtgcctgcctagagtagtttcatatgtagcttttgcatagggtggagctttaagtgcaactgtggctctaaatgacacatcagcccacccataaggtccatctcagaaagagctaaaaaagtgtccatcttcctcagcccctaggctgtgacctacagctcctccttcatcttcctcagcccctaggctgtgacctacagctcctccttcatcttcctcagcccctaggctgtgacctaccgctcctccttcatcttcctcagcccctaggctgtgacctacagctcctccttcatcttccttggggcaggtggagatgattatatcccctcccctgcccttactgcgtttctgtcttgcattctccctgagtggacagtcaggtggccaggaaccatgtggttaaattgcctttttgttctttcctggtgacctaaggaagaaatgaggtaaaaaaaaattactctggtaaaaaaaaatcaggctgatccatgctgaggaaatcagtagccttaattagaaagtagagagaaagcaggctgggtgtggtggctcacgcctgtaatcccagcagtttgggaggccgaagcaggcggatcacctgaggtcagcagttcaagaccagcctggccaaaatggtgaaaccccgtctctactaaaaatacaaaaattaactggtcatggtggcgcgtgcctgtaatcctagctacttgggaggctggaagcacaagaattgcttgaacccgggaggtggaggttgcggtgagccaagat

SEQ ID NO: 103369 - DNA, 1018 bp, Homo sapiens
gaggatccccttgaactccgccttagacctatacattcagaaattcgggcggtgagactcagacatctgcattgtaaccagctctcacaggcgatttttagctggcttaagtctgagaattactgcccatgattatagtaaatgtatcctttgctggccttttggagggagttccgaaaaaaaactgccaatacaaaggctccctaaaatcttaagtcatttggaaagctcatttgaaggcttttgatgttaatatcagatgaaatatgtagttggggccaatatttaggattgttcaggtaagaaaggtgcttgaagagttgcctttcctctggtgtccttgttacacacataactgggtgtgtttggaaaccagcaacaccgttgcccgtatgttgatttgttggtgatcttgacttgagcactattagcatgctgttgtggtgaggcaggttttcttccagaccgggggacggtctaggtctggaggctgaactttatgtaattcagggggtcctttaaaagaaaatctaaaatatagttttgcatattttacaaaaatgggactgacgaatgcatttccttggaagggaccctgaaccttaattttctgtgggataaagctgcctctgtccacagcaggtcacacttaagcccctcctccccagtaactgagtggtgctgggattatgcaggctgaggcctctccacacattttcatgaagtggttgctcaccctctaagtgagacgtaaagactgcagtgttcggagccctttgggaaataaatgtggtgaaaagaaaggagggacgaggtttaaaggaaggggaaatggaggttaaggaaaaatggctagaaggtgtgttctggaacaatcagaaacctgaggcaacttgaaatgggggaaaaaggcaagaatggagagatgttaccagaacgaaatctagtttgagcagagaaaaagactggctttctagtaggcttgtaaaatgctttcctgcagcaagctacttgtgtc

SEQ ID NO: 103370 - DNA, 1184 bp, Homo sapiens
tctccataatttgaagaagcaagaaatgtttctgaagtgaagcataaaggagtatcttcaagctctatctcatacctaccagcttgcatagagtataatagtgggaagaaatattgtgaaagattctagaacctaagtcctttctaggctaggcaattctaggctacacaattcgtagtctctgtaaataccatttgataactgaaataaacctataaagtgggattaaatgttagtccagaagactaagtgatttaaggaaagagggaaaataaccagatagatttctggtggatattcatagacagacataatttcatcatgtattatggccctaagtcatctattttatattaaaacatagatggtaactgtaaagttatcaaatgtaaaaattactgggctagcattgtgttttaacactgatacaccagttgattacagtgttgacagaaaacgggcagaaacacgtttaaagtacctgcagaatatatatatagaaatcttttttttttaatcagtgttgaccaggttggcctcgaacgtgtagcctcacctccccgagtgccagggcaaccggcctgagccacagcggctccctagaaatcttaagtgcaggaaacaaaactacagtttaaggaaacaggagtcggagaggaggggcatttggcccaaccactggcaaaaggctgttgttgcaacaactgtgagattctgggaagtggggaaatgagcaggtgctgtgtaaaagtgcacagctgactgccccaggtgagacagatcagtgtcacagagagtaggaggattttgaggtgtgattagtattttttttttttttcttaaagagatggtctcgttctggaacccaggctggagtgcagtcgtggcacgatcataattcactgtagccttgagctcctgggctcaagtgaacctcctgagcagctgggactacagatgcatgccaccgtgcccagctaattattaaattgtatagacaggatctctatatggtacccaagttggtctcaaactcctggcctcaagcagtcctcctgcctcagcctattaaagtgctgggattacaggagtgagctaccacacccaaccagtaggaaatcttaaagccacattgatactacagtttgaaatatgtaaaaactagggagctatgtttcccacta

SEQ ID NO: 103371 - DNA, 1033 bp, Homo sapiens
gcagtttcagataaatcatgggcattgctggactgatggttgctttgagcccacaggagctccctttttgaattgtgtggagaagtgtgttctgatgaggcattttactatgcctgttgatctatgggaaatctaggcgaaagtaatggggaagattagaaagaattagccaaccaggctacagttgatatttaaaagatccatttaaaacaagctgatagtgtttcgttaagcagtacatcttgtgcatgcaaaaatgaattcacccctcccacctctttcttcaattaatggaaaactgttaagggaagctgatacagagagacaacttgctcctttccatcagctttataataaactgtttaacgtgaggtttcagtagctccttggttttgcctctttaaattatgacgtgcacaaaccttcttttcaatgcaatgcatctgaaagttttgatacttgtaacttttttttttttttggttgcaattgtttaagaatcatggatttattttttgtaactctttggctattgtccttgtgtatcctgacagcgccatgtgtgtcagcccatgtcaatcaagatgggtgattatgaaatgccagacttctaaaataaatgttttggaattcaatgggtaaataaatgctgctttggggatattatctctgtttggtcttgatttttcccccctcgaggaactgtttaaccagtcacaaattgtggtttgaatctctcaaacatggaagcatttgtagtacattatccaagttttcctcccctctcattacattacatattttgcagcacacacataggattcatagattttaaatagttttctgtgaacccagctaacatagcctctctgatcaattttcctgataactggtgctttttaatgagcctcgcagaacaaaatgcagtcttccacagtatagcacctctgaaacattgtgggctctgttgaacttgagagtgtatttaacactgaaggtaaatacggagcttatacacgtcctcaagttttctt

SEQ ID NO: 103372 - DNA, 1511 bp, Homo sapiens
ctctctctctctttctttctttctttttctttctcagagatggggtttcaccatgttgcccaggctagtcttaaactcctgggctcaaacaagcctcccaccttggcctcccaaactgttgggattgcaggcatgagccactgctcctggctccatttattttcttttatactgtatttttactgtaacttttctgggtttacatacacaaatcattaccattgtgttacagttgcctacagtattcactacagtaacctgctgtacaggtttgtagcccaggagcaacaggctataccatacagcctaggtgtgtaggctatcccatctagtttgtgtaaagacactctgtgatgttcccacaagggtgaaacttcctatgacgcatttctcagaacatatcctgttgttaagtgacacgtgactgtatgctaatcgatagcctgcttctctgggctttccacaactgaactcccaatgagaaaaagggaaagagctcttttaccaaggacccgccaacatgtgccgcgtttgcaccaaaaccgtgaagaaggcggcccgggtcatcatagaaaagtactacacacgcctgggcaacgacttccacacgaacaagcgcgtgtgcaaggagatcgccattatccccagcaagaagctccgcaacaagatagcaggctatgtcacgcatctgatgaaatggattcagagaggcccagtaagaggtatctccatcaagctgcaggaggaggagagagaaaggagagacaattatgttcctgaggtctcagccttggatcaggagataattgaagtagatcctgacactaaggaaatgctgaagcttttggacttcggcagtctgtccaacctgcaggtcactcagcctacagttgggatgaacttcaaaatgcctcggggacctgtttgaattttttctgcagtgctgtattattttcaataaatctggcacaacagcaaaaaaaaaaaaaaaaaaaaagggaaagaagaaaaaattatagcagctctcttcatccctcatctttgctggtgtctcattgtcaatgaggccccttcacacccatcatttgagagagtcattgctgtcaatgctgtattacagatgttcaaagagagggttgcaaatgccaagtgagctgtcaatggtctactgcttgttggtagctgagctgagaatcaaactagccaagtaggttctctcttcagccccttacttcccaaaactcacagactctgcacttaggctgttgatttctttgtgtggcaagagttcaggagctggccattccactgtggggtcctttgccaagaagcacagtttagccagtgagaggtggacattgtaccattgggtctcctggggagaagctcccaggctggtaggagaggtggaacccccaagggtcctggacagatgagtgtggaaggaggaagaggagacaggacagttcccacatagtgatgagtccttaccctgcataatgctgggttct

SEQ ID NO: 103373 - DNA, 1013 bp, Homo sapiens
gctcaagcgatgttcccacctcactctcccaagtagctgggactacaggcatgtgccaccatgcttggcgaattttttaattttttgtagaagcagggcctcactatattgcccaggcttgtcttgaactcctggcctctaataataatagtagtcgtcataataaatgtaattattaattattattattgttattattaaagctctctaaatggcattttactctgtgtaaaccagggaagaggtgaaggagaacccagtgctctagctgtggcccactgctgtgatgttgatgagcagcctcctgggctcctctctgctgttttctagctgctatttccatgggtcagttaggcagcaaaggcctcctgcagtctctaacggctccttaggggagaacatgctgggtaatttttctgcagcagctgaggggcccttcaggtggcagggatgggctaagtttcctcctaatttgagtccaccttttgtgttcatttcaggccctggttttggtggttgtgctgggctggctgtttgtccccatctatattaaggctggggtaagtatctgctctgttatttcatttcctgctggcaaatgtatctgtcagcttggtcttcctagagggcagaggagacattatgggataaatggcagaaaaatctgtggattggctttcactcccaggttatgaaattcccgactgtctgcagtggcattatatggatatattcctcctcctcctccagggcaagggtctggctccttagtgatgcccagtgacaggtttattgggctgggataacacctagctactcctacagtggtagggcatatgggattaaaatgagcaaatggctggaggtcaggggccatctggccacctcgcagacttctctggccagcaaaagttatgaatccttgaccacacttctgtggctctgatattaggatggtgtcactgttctgtctgctctgggccctctggtcactgtggctggcagtgacctcc

SEQ ID NO: 103374 - DNA, 1023 bp, Homo sapiens
gtgttgaagggaaatcagccagttgtaaattttgcccaggtggataaatgtgtacatgtgtaattataggctagctggaagaaaaccattagtttgctgttaatttatgcatttgaagccagtgtgatacagccatctgtacctactggagctgcagaagggaagtccactcagtcacatccagaaaaaggcagactaagaatcagaagccatgtgattgatgtctgacgtgagtctgtctcaggtagattccgggtgtcagtgtggtttataatccttgaatattgttttagaaactttggtctccctggttcctgccacttttcctgtccgtcctcctccccattttttttttaaaagaaagctgttttcccctcatcatatccctcttgagttttgcctggactttccctctcaagtgtgtcaatcaggtaaactgaggaatgcatggaagctgaggatggagcttgatgggctccctgtcctgggtgtttgctctctgaagtggaggcctgaggaaggtagtacttccacaaaagggagggacccgggccccagcctcaagctagtgggggaggcagatagcctgaatccaggggattttctgggcttcttaaaatgtccattgtgagttccccgtgtttgggattccactcattttggcattcacagtgcctggaatgtcttagattttcagcaatgcgtgttgaataaatgaatgacataggcatttatttttaaatctttgcttgctttttacatgagcctggcccttagttaaccttttcttgtggctacacaaagtatgctcactggttactaatgacttgggatgcatttgtcaaactgattatattagttttctagggatgccataacaaagtagcacagaccagatggctcaagcagcagacatttattttctcacagttctagaggctagaagttggaggccaagatgtcagcagggttggtttcttctgaggcctctctccttggttgcagatggtcatatctcactct

SEQ ID NO: 103375 - DNA, 1077 bp, Homo sapiens
gctctctatagccatgagttcaattgtttttgatttttagatggcacaagtaagtgagaacatgtgatgttttgtctttctgtgcctgacttatttatactggattattctcaggtgaccaggaaaatatgcaggaaactccacatgctgatgtgtattgataaggacatcagttaacctatgttccagatgatacttttaacctttcaaccctctctggtttagcaaggcagtgtccagccactaaccagtgcttgtaccctttcccggctccaggactgcgaggcctgatgctttcggtcatgctggcctctctcatgagctccctgacctccatcttcaacagcgccagcaccctcttcaccattgacctctacaccaagatgcggaagcaagcgtcggagaaagagctcctgatagctggacggtgagtgaaccctggttcccacctagaatcctctggagaagtacagacgtagaagtgaactagagttcccttgtctttggctttggtgaaagtaatcatagcatctgggtagagggaagagacattggagtacatcaaattcaagtgatcactttccagatacaaaaatttgaaccatacctttaaatgaaataatcactttttcagtctttcaaatgcttctgaatggctcttatttcttcccctcctcacatcacccccctatccacatcttcataaaactccaccagtattttaatagggtgtaaaatttccacctactctgataggtgaatgcattgtctctagcagtttccatgtatatcacatggaggtaatggattaagtcttccacacatgaacacagaggagtttatcagtcatattcattaatgattgggctgtgttacaaaggagcagggaagggactaattccaagaggatgcttggagagttaagtcaacccaggggaccctgagcagcctgggggccttgaagatagtggaagtgagatggagggaaacaagaggaaaaaaatcgataccagaatgtcctttttcaccttcacaattttcgagaagaccctatattgtcatagcattttttttttt

SEQ ID NO: 103376 - DNA, 1050 bp, Homo sapiens
cctgatggactaaaattaggggtttatataacagggaagatatgtaaccatgtgtgggaaaacaggaattaggggtggggataaggaagagaagtcggtcaacaggaagctggtggtgggttagacaattataatgggcaaggggtctggcttctcattgtccaggtgtgttgatctagtgagtttcagctctttgaccctatctgggagaactgatggttgatttcctgagagaggaactcagataagacaaaggtaactttctcaagttgtaacactgggaggatcagtttctatgcttattcaaataaaccacagacatcagttctatgggacaactgggccagttccgtatccacagtgtttgggtaaatctgtcaggcattcatttattcacttattttttctcttcaatcatgaaacctgggtccctgcccttcacctggcctattgctagaaatatacagaagacaaaaaaatcaaatttcttgcctagagaggtttccagtatagaatgtggctgcagccagtggggaaatcaatggtgcccctgcataatgaccctggagcagagatgacaggtttgatggcagagtaaaagtgaaggcaatggagggggaagcattatgatcagctctaagacttgaagctcgagggtcggagtgcccgaggccaccattaatggagccagggattccagatcagaggcaaatgatggatgacaaggagaatgatgacttcacttatgtttggtgcattcaaggcactaaggtggagacacccaaccggcagtgggaaagtgagatctgcagattggtcaggagagagaccttggctggagttatccatgggggggtccttctcttcagaagcatggtttaagcacccaccctctgccagtcactgtgcatggcatcagggatgcctctatgagtaagaagccatggttccatcaccaggaaggggccacacacaggactttcactcacaggtgcttaggaaatgctgaataatctgaacgcacagggccctaagggtaagttaagtccc

SEQ ID NO: 103377 - DNA, 1010 bp, Homo sapiens
aggttctggtgtgtgttttatttacttacatttactacatttcctagttatacaagtaatacatgttctttaaagacattttgaaaaatacagaaaaaaaaaaaggtgaaagtgttttggaaatcagcactgaccaacatcaggcttacttcttttttaaatttttgctaatttcataggcaaaaaaaaactctctgtattattttagtgtgcatttatttcatcacaagtgaagtttggtgcttgtaaagactgtgttttcagtggacttgtacaatgtttaaattcctctcctgcaggctcctgagtcctataagaatgtgacagatgtggtaaatacctgccatgatgctggaatcagcaagaaagccattaaactgagaccaattgctgtgatcaaaggatagaaccttggacagcagggctgcctgacaccaccaaccctctctgaagtggaagtggactgacatgctcttctgacatcagactcaaggcgggacaagttgcaaagtgtgcagctgtaactgctcacgccaaaatggctgatggggaggctgctgctttcaggggcccgtgcttgtaaaataaccttccaggaagaggcacattgcccacctttggaaagggaggaatatgccttctccttggttgttccacagagttttaggaaaatctgttagggatgggtagatgtcaaactgccttacgcagtcatactgatctttagccatcagattgatcttcttcacaccaagctctgtttacattccgagaggtgtcatgaagaaagttctgttcaataaggttttggaatgtttcctttcgtctgttgctttgtcagtttgtccattcatccacccatttaggcatcacccctgcactcagcaaaaccctaaatacccctcttacttggagagcacccagggagttgtaatcaggctgttagatgaatggatagtggaacacattgaagagggagtatggggaggtttaaggaatagcggcccaaa

SEQ ID NO: 103378 - DNA, 1026 bp, Homo sapiens
agtccattttattgtgtgagaatttaataatttgtgccagcctgaccctctagactatttaacctagcagatgtacgaagtgtcaactagtgtttcagaacattcccctgagtacttctctgcattttgtcatggatttgattaatcatgaaggcaacaaaatgtattttgctactactattcccatgcattcacatattgagaaaggagtaatgaagaccatcttgtggctatttgtttacacatcccattctctttcaagttcctagagggcaaatgttgactttgtgtcccacaaactgtcactgcactctgaaagattctcaagtacgtcttgactgagcaaatagatgaactcagaaacacattaaagggaaagttggctttcattgggtttttttgtggaatgaatttgaatgtagcctacctttctgcagtaaatctgaactgttcatttaagggaaagctaactggtttggactttgtggctcttgttccagatgcgctggtagctatggagaaggccatgaagagagacaagattatagtcaatgatcggcagttggcttgtgctcgaatcgcttccccagagggtcaagactatctgaagggaatggcagctgctgggaactatgcctgggtcaaccgctcttccatgaccttcttaacccgtcaggtacagtagaagttgctcttctgttccgagtcattcatgatgatgttaagtgctttaaaacatagtgcagtccaggctggacacggtggctcatgcctgtaatcccaacactttgggaggccgagggggggcggatcacaaggttaggagatccagaccatcctggctaacacggtgaaaccccgtctctactaaaaatacaaaaaattagcttagctggtcgtcgtggcgggtgcatgtagtcccagctactcgggaggctgaggcagcagaatggtgtgaacctggaaagtggagcttgcagtgagccgagatcgtgccactgcactccagcctgggtgacagagtga

SEQ ID NO: 103379 - DNA, 1308 bp, Homo sapiens
ccatggtggtttgctgcacctgtcagtccatcatctaggttttaagccccacgtgcattaggtatttgtcctaatgctctccctcccctttcctcccactcctcgacaggctctggtatgtgatgttcccctccctgtgtccatgtgttctcattgttcagctcccacttatgagtgagaacccgtggtgtttggttttctgttcctgtgttagttttttatatgtgtataccaagcatataatgatataacaaaattcaggagctagtctacgttattttgttgtgtagaatattgtaaatgaaacacttctatagcttaggaatttttttgttactgaaacactatttgtatgtttattttgttgttagtttgtttttatctttttggtttttaaatagattaaaaaaaaaactggaataaaaactatcttaccagacatttttacatttgcagttggggaccctgggagcaggcaaccattatgcagaaatccaggttgtggatgagattttcaatgagtatgctgctaaaaaaatgggcatcgaccataagggacaggtgtgtgtgatgatccacagtggaagcagaggcttgggccaccaagtagccacaggtatattctagactttgtgctaaaatgtacattttatgggcaaccagatagaaatttaagagcgaaaactctgaaatatactgcatgggttttatcctgagtcctcaacaattaaataacttggacaaattcactgggccataactttcttgtctaaaaaaatgagtataatagttatttcatatagaattatcatggaaagttaataatatatgtaaagcacttaatgtttgacattagtaaacactcaataaatgttagttgcagttattgttatgtttactcttatgagttactatctggccaagaaagagcaagaaatgtgtaaagagtggaatttatgaaataggctttcatttggcagattatgtatcatatacctgctctgcaacagtagatgtgatggtggatttgctgatgaaagaggcagatactttgcactcaaattgtctcatgaagtaaaggtcatgtccatttaaaagaaaaaataaatattaaaaggtagcaattaattatataggagagtcaaacaaaacacatttaagaaaaagattttggagatggcttcatggacccagtgttgagctggatctcacagtttggacaattacacacaaagactggtgacaaaggcagcatgaacaaaagcaggaagcagcgaaatattggataggtccttttggatagcttgg

SEQ ID NO: 103380 - DNA, 1621 bp, Homo sapiens
gaccgtaattcataaatgattaaggtgtgtacctggttgaattagtcgttagagagtgatagctgattaaggttacagagttgttgttgttgttttttgttttgttttgtttttgtctgtttaatcactacctcatggaattcaggatcagagaggcaaaactgaatataaaaaagatttgaaaattaacaaggagcagtataaatgtcaagtagaactataatgatgtctaatagggcatttatcattttatattggaattatttatatgactgcattcctcaaaaaaccagttactgagagcttaaactttgtatctgactcaaggcttggaacacaggagatagtaaatgtcgagtttttctctgccctttaaggatgtggtcatccttaggttttgatctgcctttgctgtgagatgactagcaccttttatacttatccagagacttggaggaggccttggagatgggggtggactggtccttaagagaagggtatgcctgggctgaagacaaggagcactgcgaggagtacggaaggatgctgcaggctgaccccaataaagtttctgcaagggcgaagaaaagaggccttcctcaggtaactcactttggaggggcaacatgttaatttttttttcatattttgtttttattgggggaaaaaaatctatatcttacatttagcaaacatattcccaggtttttttatggtatatcaaaaaatacaaatttgtttatgcttcatttttattctaaaaaaactatcagggctggatgcggtggctcacaccagctttgagaggccaaggaggaaggttcgcttgaggccaggagttcgagaccagcctgggcaacataagaagacttagtctctacaaaaattaaaaaaaaaaaaaattagccaggcatggtggcacatgcaagtaatcccagctactcagaaggctaagacaggaggactgcttgagcctaggagtttgaggctgcagtgagctgtgatcacgccagtgcactccagcctgggtgacagagcaatcaggagcttgcaaatgttcataaaataagaaataatgaattagaagtgaatgggagaaaaatagaatatgtttatcaggttcatacgtcaaaattacatatatacatattttgacagtctacagatggtatccatgagataagaatatactagatgtttgaaattacagctagttgtgaaggctttgccactaattcagtgtgacacgtgggcaagactgtcttctctggatctcattttcttatggaaaactgggatggttaaaactaggcaacctctaaagactcttccagcactgacattctctagttctctaaatcatctattaatattagctgtagttgtggtatatgttctttcagttataaataatggtggatgtccatgaactcatagatgtttcaaaatcatttgaacttggaccttgtctaagagtcaacatttaccaacatttatcccaaaatttgactctttgtgatgtttaaaatatcccatgaaccatttaaaagcttgattttttttgtttatgaagctttttttaaaaaattaatttatttactttaagttctgggatacatgt

SEQ ID NO: 103381 - DNA, 1061 bp, Homo sapiens
aaataaaagtacttatgtctaaaattttgaggtcactgttaatgtcctttttgaatggaaacatgcagccttaaatgcacaaattgggaaagaagaaaggctggaatatcagtgaccctagaaagcacaacaaattataccctaaaaaagtagaaagatggaataattaggagtaaaattagtgaaatggaaagatatgttatagaaaggaccaagaaacgcaaaagttggttatttgaaaagactgaaaaaattcatgaacctgtgaaaacagtggtcaagaagaaaagagaggcatattttgatctctgttttacatgttactcaatgttcattgctgcctcccttgtccataaagtgcctttagtgtgtatgttactttagattatcttggtgtcatcaagctttactcagcaaagaaccactttgttgtctactttaaaacatagttatctttaaaagaatgggtatctttatagttccatattaatggcgagaaactgcaggtaacagtgccttaccagctggttttgctaacttttctctattttgtaggtggtgtcgggtttgacatcaactgtggtgtccgcttgctaagaaccaatttagatgaaagtgatgtccagcctgtgaaggagcaacttgcccaagctatgtttgaccacattcctgttggggtggggtcaaaaggtgtcatcccaatgaatgccaagtaagagcacacgtttccagtacatggtatgggagggataataaccacatgaccttcagcttcctttccagtgcagtacacttgagagatgaggattgttcagttacttttcaggaagtagtaagaactgtttttttaagcatgaggtacagcccatttattggagacattagtcaaccgatgttataacagcctttgacatagagtagtatttataataacatcatatccaccaacgtttattgagcactttctatgtgtaaggtgctgagcatcatatcatttcatccagacaataaccctattatcttccctaacttacaagaaagaaaactgaggtttagagagg

SEQ ID NO: 103382 - DNA, 1056 bp, Homo sapiens
aggctacagtgagctatgatcacaccgctgcactctagtctggcatgatctcaaaaaagaaaatccatatatttggaaattaagtagtatacttttaagtaacccatgagtcaaaaacaaaactatggaaatgagaaaataactaatgtaagtagaaaatacttgtgtctaaaaattgacattgagttaagtaaaggacacccttctatgctattggagggagtgtaaattggcacagccattatggtaaacagtatggagattcctcaaaaaatcgaaaatagaactaccatatgatccagcaattgcatcactgggtgtatatccaaaggaaatgaaatcagtatccaaagagatacctgccctcccatgttcattgtagcattgttcacagtagccaagatacggaaacagcctgaatgcattattcaaccttaataaagaaagaaatcaatcttttaaaattgaagggaaaagacagggaatcctgccatttactacagcatggatgaaactagaggatatgctgagaaataggccagacacagaaacgaaaatactacatgattttgcccatatgtgcaatctaaaaatgttaaactcacagagagagtagaatggtgctaacagggtggatgttagagtatacagaatttcagttttaagatgaatgagttctggaaatctaatgtataacatagtgactgtagttaataataatgtattgtattgtattacttttaatggcaaaaagcacaattacttttgcaccagcctaatacctatagtcccaggcaattcagaggctgaggtgggaggatagcttgagcccaggacttggaggcttcagtgagctatgacctagcctgggcaacaaagcaagaccctgtctctaaaataaaatattgtgtacttgacattttctaagaaaataaatcttaaatgttctcaccagaaaaacagaaggggaagtaactgtgagatcataaataggttaattagcttgattgtgataattacttcacaatgtaaatgtacattgtgtacacctaaata

SEQ ID NO: 103383 - DNA, 1063 bp, Homo sapiens
agtcaccactagagcacaataaaatgtaatttgctattggcttaaacacagaataaacatactaggttagatgactacgttttatgtttagaattggactttttgattcatttggtttttttttttaattttcaaaaaaccattgatatttttgaagcttgaggattaagacctttgggctttgtgagagtatagttggaagatttttctttatcacaaaaagatgctgaatctgttgaattcttaaatgtggttttgagggtatgagaataaacaaaacaatttgtgaacattgcagaatttttcttaaggtatattttccgatgggagcagctcgtagtctttgataggaagttttctgtgtgcttaaggtaacgtgaaagtgtttggtaaagagtaaagcacagtaaatattgcatacagtgcattctgtccagtgcctacacttgccgcgcatgtactcagacattgcttttcactttccttggtactaggttgaaggtgttttctatgtgaatgatgctctggagaaattgatgtttgaggaattaaggaatgcctgtcgaggtggtggtaagtacattagagtttcacttgtgttagtacggtagtgccttccctgtggcctgaaaaagtggcaactcaaataattataattctgaaatattgtcaaggagtgattacaacttaaaagtaagaccaaaagcacttacttatttgtgatcacattgtcagccagttggcgttatagaacggatttgaagctccatctggaatttgaagctgggtagaacttgtttctcagctaaccttgaacaataatagcaagtgacctaccatttgttttgcacttactatattccaggcatgttactaggtgctttgcagagattatctcatgcaatacttacagtgactctaaaaggagctcccttccatcttgcatctcaaacatccttctaggctttgttgtcttagtagccctaatgactacctcttcacgttatacagtctaaaaacatgaatataattcatgctaaaaatcaagtgtgttgtcttttct

SEQ ID NO: 103384 - DNA, 1463 bp, Homo sapiens
tgtatatccagattcattctgaaacataaatgttcagctatggtatttactcaaacaggtttttctttctcagctgctggcgttatctttttcccctcccagctgagggtgtaaactccaagccaatgcaccgaacctgacccagactcaaggtgttttcataagctgctgaaaagcatttccaaaacaaaagataactagattatactttaaacttctggatttcgcttagctgtagtttagaggaaatcgactaataaagatcctaaagttatacactacaggacagtacaacttaaccagaggaaagacattggcctgaagaattttgagcctcggcgcttgccgttgctcatctgctgcggcgctggtcgcgcctgcgctttggttcttggaaggcggtgctctgagaagccggactacgcggcagcggctcttcaaagcggagccgggagtttttgctacagttttcgccaccatgagtcgcagctataatgatgagctgcagttcttggagaagatcaataaaaactgctggaggatcaagaagggcttcgtgcccaacatgcaggtaaggcaggagagcaaatggcggggccttccgtgctccgtccccggcccggccggcgtccactgcgccctctggacctcccctgaccactgggtccgccccggccccttgcagagtttccctcatcccgtccttctcccctcacggttctggggccgcccaacctgttccggcaccacctcccgccaggagaggtccccgaaccacgaggacaagctaagtgcggtggatatgggaatctaaataaatacgaaattggggtttccaaagcgttttcacagatcagtctcataaacgtatcgtgagctgttttacgttcacagaaacttcagtgatcttttccagggtggaacagccagccccaggttcatttgctgggactggaattcacctcctctgagtcatgctggttatttaaataacgtttacaaacctttgttcactaaaccaggttttcagcattcagtatcgcatgttggtttttaataaagcgatgtcatttcttgcagtagcgcagggcagggcctgtttgattttaatattcacttcacagaaggacctcgaggatctgtcggtgacatagcttcctctacccacctaggaagaagctcagccaggacttgatgtccggtttacttctttgacgtcccagatggagacttgagggctcaggatcatcagatagtttgaaagcctgggctctgtatctctcggccttcatcaccatctgtgctcatatttttattaatgtgaaaaaagaaaacgtttatgaagttttgcaacgtatttttaaatagtttttgaaatccctgaaggtgccaagtaaatgcttcaaaggtttaccgtctcgtctcacgtcttggtaaacagctcccaatagtcactccattct

SEQ ID NO: 103385 - DNA, 1071 bp, Homo sapiens
gctgtgcacctgggggtacaggtacgctggggccggggctgggcggcccgcggggagtggggagtgcttggggtgggtgcagggcgggttggcgtcatctgtgggctgcaggcgcgggcgtggccgggcgataggccaagtgcggggacgccgggggggccttcacgggaggcccgggctcttccgggcgtcgcggagccggagggtgcaggcgacgggaagcgcgggtggtcggctggggtccggctcctggagaacatggcccggcctcccgggggctctggtcccctcctcggtgagtcatggcttctggttttgcagtaaacggaaccagggagaggagggaacgcacaatttccacaactggttagatttcaagttggaaatgatgagcttggcttgggttaaacctttctggactgtgaggggtccgagttaatttcttcagctgttggagtatttcaatgaaaaagtttggaaattgctagaagttaaaaatctgccctcaatccgaggccaccggtagcttgtatcgctgctgtgaagcggcaacaattttagattctgttgtgttcatgcgccgagcaccgcggtgagcgcttggacttcgccgccgaaaagttttagaaaggacagcgtgtaggcgtgtttcagaccatttcattttcttgggtgaaatgttgcttttttgctaaaactgaggcaaacgttgatcttgagagcttgcagtttgggggcagtaaagttgagaaaggatcatattctgttattggtttgtgggactgcaggtgaagctgctttgtttccctaaaagatactttttggggacaataatttgggagtaaagcggcaaggtaagagtggtcctcttcaaatactgagctagtgaatttgaaacttgagtgtgctaaggaaaaatgaaaaagatgttccctggggatttttaggtgaattcttcaaaacaaaagcaaaccttcctacgttttcaccttatttttagggaattgggtaaaatgaggccgttattctgaacttctcgccctttcattttcctggttaagacattattag

SEQ ID NO: 103386 - DNA, 2591 bp, Homo sapiens
tttcaaagatgtcaaaaaaaatttgtgcatcttagaattgaggaaagcatggattagtgatagaggattactgtatcccgtcccccaggtggagagttttagccattagaaatctatagattaggcattcattgataaatacttttgataattttctcaaaactataagcttgatagggtaatgcgtgcctatagtcctagctcctctggaggctgaggtgagaggattgcttgagcccaggaatttgaggctgccatgagctgtgattgtgccacttcactccagcctgggcaacagagtgagactctgtctctaaaaacaaacgaaaacaaaaacaaaaatgtagctggacatggtggcttatacctgtaatcccagcaacccaggaggctgaggcaggaggattgcttgaggccaggagcttgagaccagcctggacaacatagtgagaccttgtctcttcatcacttagttcttctagggtcatactgtgtacttatgtatgcttcagatgtgctattgaaggtattagaagtaggtagttcttactatgcttatctgtctttcttggcagttctaatacccgatttacaattacattgaactacaaggatcccctcactggagatgaagagaccttggcttcatatgggattgtttctggggacttgatatgtttgattcttcaagatgacattccagcgcctaatataccttcatccacagattcagagcattcttcactccagaataatgagcaaccctctttggccaccagctccaatcagactagcatgcaggatgaacaaccaagtgattcattccaaggacaggcagcccagtctggtgtttggaatgacgacagtatggtgggtattaaacaccaatatatcaaatagagtaggtgataagtcatattgaacacctcagttgaattctgttccagtcaggataattatcatcgatagattgcacattttatatatatttttttctttttttttttttttgagacagagtctcactctgtcaccaggctggagtgcagtggcgcaatctctgctcactgcaacctctgcctcccagttcaagcgattctcctgcctcagcctcccgagtagctgggactagaggtgcacaccaccacgcccagctaatttttgtatttttagtagagacggggtttcagcatgttggtcaggatggtctcgatctcttgacctcgtgatctgccctcctcggcctcccaaagtgctgggattacaggcatgagccactgcgcctggctgcagattatatttttatagaatatattttttttaactgccaaatgcctgtaccaatatggggctggcatcccaaagtacctagtgtctgtctgttttgttcacatactctccttcagatcagttattccttgacttctattattgttcctaagctcatgattcctagccttgcttctctgatctggtccgctcattaaggctatagatgtggtctaattatttccagatgacttgcaggatatttatacctggattttaaattgtcattgcagactttagatgttgaacataaatttggaaatatgtgtgctcagttcccttctttgtcagtggcactgctggttttctgtgatttttgactccttaaatctagcccattaataagctttgtcagttcttcttttccatttcgggttccatggctttattcctcagtctgttttctggatttgccttcttcctacatggttctgatgctattgttcccttgctgtctttcataactctatctcataaacttgtgctcataatttttgagctgaaaaagacaatatatctctagttcaaccctgtcattttacagaagaggaaaatggtgtctgtcctcctgtacctagtgctcaaggctttctgaaaagttactccactcaacttttttagggctagtttctgttcttccttcctttaaactgtcatctccaatcagaacagacccatcattttcccccgcccccaccaaccagcacattcacctgcttgcatgcatgtgcacacacacaacctggtgactacttttgtgactttgctcttgctgttcacccagactggaacctgttacctttcctccctctctagtctatatttctacccatcttcctaagcccttgccaaccatagcccaatagttttctttaatttctttgtattgattatctgattatctttattgccttgtacatgcctcctcatttttcccaccttttttttttttggtgacaggatcccactccctcacccaggctggagtgcagtggcacaatctcagctcactgcaaccctacccttccggggtcaagcgattctcccacctcagcctcccgagtagttgggaccacagacaccaccacgcctggctaatttttgtatttttggtagagatggggtttcaccatgttgctcaggctggtcttgaactcctgacctcaagtgacctgcccaccttggccacccaaagtaatgggattacagatgtgagccaccgtgcctggcctttatccgcccttttaattttttgaatggtg

SEQ ID NO: 103387 - DNA, 2754 bp, Homo sapiens
ggaaacaagctttctgagcaaacttaatataggtaacttagttttttttgaagccatgtattacatctcaaagccctgaactgcaagtttagagatctgggttcgtttcaaatttttattagctggtaaccttgattatgttatttaatctttctgatttataattataggatctataaaaaggcgatacctgccatgcctattttataggattgttataaagtgcaaataagaaaacattttgaaaataaagacattatgaagttgtaaggtattatccttcagcatttgttcagcaaacattgaatacctgctatgtgctaggtactttactggggttacaaaaatgggtgacatgtagtctggttttttataaacttgcagtcatggaaggatgcagatatgtaatcagaaaattgcaatacagtgcagtgtgataaggtgcagtaatcaagcccgttgcaaggcagagttgtggtctgtgttacctcttttgaagaagtggaaaatactgggatgagtaagaaggcactggcagaaagtgaacttgataatgagtcagagatcaggtaatgaaggactttgtatgctaagggatttagaagtttggtcttcatttgtagacctgcatttctcagtgtcctctgaaaatctagtttcatgagatggtgtcacagggatgttgactgctgaggacggaggatagtgttttttggtaaagtgttaggcacacactattattgttattagactcctcagtgcttatataatgcgaatagtgtattttgtgaatatggagggtgaagttaggtggctgcagcatgcagtattttccacacttattccgtgtgcaccaccttttttcctaagaacatctaaggcacaattgagggaaatgctgtttatgttggggaggtactggtgaattttaagctgcgacatagtacatgatcagatttttaattgtcaagaaaattctggcagcagggactggggtgtattggaagacaagaaagttgaagaagggatacttgcaacggaagctcttgctggatgtcgggaaataaatgatgagagtttgaagtgccaatagagcaggaaggggcaaattttagacatatttaggagttagtttcagggaactttgaagactgatcagatgtggaacaaggtttagttagggagggaggagtctaggatgatttccaggttcttgacataccagctagaattaacagaggtaaggaattcaggatggaagagtaggtcgcaggcttatttatttgtaaggactcacttaaaatgtctcccatttctgaacccaatgatgtactttgactttcagcacttagttcactttaggatacaaaaatgtatagtgtaaaaataagtctttaattaattcattgttttgttttcctttttcagttagggcctagtcaaaattttgaagctgagtcaattcaagataatgcgcatatggcagagggcacaggtttctatccctcagaacccatgctctgtagtgaatcggtggaagggcaagtgccacattcattagagaccttgtatcaatcagctgactgttctgatgccaatgatgccttgatagtgttgatacatcttctcatgttggagtcaggttacatacctcaggtaagtactgcaagcaaaacacagacatcttatgattgctcatacatgtggatggttcctgctctcaagttgcccgtagtctgagagtggcagagagagacaaaaatataaagcactgtgctatattggtgaagttctgggagaaacatactcatatataggatgccaggaattcatggaggagaacatttagaatattgcttctcaaactttaatgcgctttggaatacctggggaccttattaaaatgcagattctgatttagtaactgtagaatggaccgtgaacttcttcatactcctgcataataccaatgttgctggtctgtgagccatgttataagttacaaagatacagagtagttcggtgatcagtgcacacctgcagcatgccatgcactgacctagaaattaggatataaaaatattgggatatttcttgtcttcaaggagtccatacatagaggagagagatgaataaaaagatactcagaaataacacaggtaaacatagataataatacaattgaagtgtaatggaaatatgaatagaatgctaggggatgaaaggaaatggcaaacaatttttctttgaaaaaggctttacggaggaagtgatatttgagccggagttttaaataatcatatggctttgctaggagagaagtgagtctttgaagagagagatcaatccctgtttccatgatgcagttttacctatttgaacaaaaattttgattaaaagtgttctaatatattatcttatacaatatggttatcctacaatataaaatatattggcaatgttaatgatttgatgcattttattaagaggactgtgtggagtgattatttcaaacaagttaggagtcttttggatttttaatctttttgagagtaacacctttcttcattatttgtttccctttcatttcgttccccagggcaccgaagccaaagcactgtccatgccggagaagtggaagttgagcggggtgtataagctgcagtacatgcatcctctctgcgagggcagctccgctactctcacctgtgtgcctttgggaaacctgattgttgtaaatggtaattggatagc

SEQ ID NO: 103388 - DNA, 2848 bp, Homo sapiens
tgtaatattttgctctgggggataatatttaatattatccaatattatcagtatttgataataggagtgaaatgagcctattacacatgaactccttggagaatactttttctttatgcctgtggatggctttatttttttaacgaaggtcttgaactgagacatggggagctagacctggggtcaccatttatccaagttggcatccctgtgaccagcaatgcacaacaacaatgctaagtttactggggccttagtaagtatgtgttttatttgctgggcctcccccaacaaatgtcactctgtatgaataacttttcctgtttatttttcatattaagaaatttcactggaatagcaatgcattccatctctgtgttttagttcaggtaccactttgtttcatatcaactcctagtgttctgtcataatcacacatactggagatccatttgaatgactaggagctttcatttttgttctgttttgttttttgagatttatccttttagttagaaagatagcgtggtaagattgggagggctgcgtttgttgtttttttattcagtatagctcatctttttcgtttagcaaaggcagttgctttggtaagccttaggtcaaaggtttaggtcagaggttttcagtatgttctgtagctactcctttctgctgagatgaaagttaggtagaagccctatcaccacttaaaccttgagcagcaaaatgtttatctgtttcatttattgaagttctgtgtaagattctgtttgaaaaaatgttggtttttttttttcctgctaaaatctattttgaaagctactgactcatgccatcttgatctttgacatgttggatagttctcattcccctcttacaaagtttcttttttcttttttttgagacagggtcttgctctgtcgcccaggctggagtgcagtaggcagagcatggatcattgcatccttgacctcctaggctcaagcagtcttcctccttggcctcctgagtagctaggaccacaggcgtgtaccaccacacctggctattttttattttattttttgtagagatgaagtgtcactgtgttgcccaggctggtctcaaactcctgggtttgaagcaatattcctgccttgacttcccaaagtgctgggattacaggtgtgaaccatgcctggcctcttacgaaatttctatttctttagtcataagattctttgaaatgttatttaaaagtctcaaaactaggtttaatagctttggtggtacttcacatttgtcaggacatgactgtctgatgacactaggacctagcaatgtctattcagcagttcatcataattagcaaatgtagcttttactttggcattcttgtacacagagtgtcaacagtttctgccttcatctaatcattctgctacatcacatcataacttgcaaggttggagttaccaaatagtaaatgtgtagttgcaaattttgccttgattttttataaaagcacttaatgacgtgtataataacctctattcactagattcaggatacttaatataaaaagaataactgctgaatgtcttgatgatttcctaatttctgatgttttgtttctttactgttcttggcaaatcagctcttggcagacttgcatggcagccagccgttccaggattgattctttgaaaaggagcagtgtgtctttaaatctttccttcacccaaggcatcctgcttggtgcacatgtgcataagcacatcactgggctctttcatggaatgagatgaagtgcgcctttgtatacatgattaaaattgaaccctctggtgatgtcaagtatatttatcctttgggtctggaagagagatgatgctgtgaaaactagcaagattattttaatgaacaaaggaagactcattgccaagggttaaataaaaaataaatggagtttttagtgacttcattagaaataatgattttattgtgtttagttgcctctgattaaccttgttgcatatctttaagttactaataagctgctgcctagtggattttatataaagatgcttactgtagtttttaaaggtggtgttgtagagtgattttacttcatgtgatgccaggtttacacttttgaacttgctatcagagaaagaaataggcgaagaacagtttgttttgtataatgtgtccttagtatattaggagctaggaaatgcaagcccatactaaaaaagaaaggcagttgatgaagtgacagaattctttatcatctttcttttgtttatttacagctacactaaaaatcaacaatgagattagaagtgtgaaaagattgcagctgctaccagaatcttttatttgcaaagagaaactaggtaatacaaacattatttaacttttggggtgaaactctgtgaaattcatataagaaaaaaatctgaaagataatgttcaaaagactgaaaatttctatatgagattaaagcatattgaagacaatgtggtttgtttaagaatgcaaaggtttaaaaaatgtgaaagttttgcttataatttgaggagtttgtttctttcctgtttttcttagggtcatagtgtgctgaattatattgttatgagataacactagtatgtaatttattacactctgatgatagttcatagtttctgtactaatctttggagatctccctattgagatctccatattggtatttaaccaatatggaggggatctgtgtttcatgaaagtaattcaatgtcaagttcattattgaagattattggaggaaaaactacaatcaaaatgtttgtttaaacctatataaatttgatggctatttta

SEQ ID NO: 103389 - DNA, 1060 bp, Homo sapiens
acgcttatctggtgtagtggtggtgtctcctttaaacagttgagcaaaaaggtgaggatcagaggggcaggttatttgtccaaggctatacacttggtaaatagcaaaacaagtgggaacctcggctgcagtttgctagtgcgtccgtactttactatgagtcacctggggatcttattaaaatataggttctgatttggtaggtctgtgggggcctgagattcagtagttctaaacagttccaggtattgtcagttctggtgatctgtcgcccacatgttgagtagcagtgtggtgactaaaaatgagtgcttttgagccacacggacttgggtttgtgcactgttctgccactaaccatggggccttggacaggctttctgtaccttgacctgtttttaaaatggagatagtaattaggaaagaacttctgatgtgaaagcttgaaaaacgcttgacacaggtgctgatacatagtcatcatgcgataaatgctattaatttaccaggttctaagcgttaacaggagcagttctccactgtatccttagtgcccagaacagattgatagctatcaggaaatcttcgtatgtatgaatctctcacaagtcttttctacaactgcagcctatgagctagagaggttgggcacagctctactaatttgatatcatggaatttttagcttttatatctaagattcagtttcatcaagtcttgcactgtacttcttccatgagggaatttggttcatgcttatctttgtgaattatttgtgaatatttattcaccatgttgattgggtttggcagaaatagaggacagttttttcacttgattttgggttttgattttactttaaaaaatattctaggggaaaatgtagccaacatatacaaagatcttcagaaactctctcgcctctttaaagaccagctggtgtatcctcttctggcttttacccgacaaggtaagagatgaaatactgtcacaatttaaatgactgtaaagaatagtaagtatacttaatattcttggtgagtatgacatctgactgccc

SEQ ID NO: 103390 - DNA, 1105 bp, Homo sapiens
cctgggctcaagtgatcctccctcctcagcctcataagtagctgagaactgtaggcatgcgcccccacacctggccaatttttgtttgtttgtttgtttgtttttagtggagacaaagtcttgcagtgttgctcaggctggtctccaactcaaaaaagaattgaaaatatagtaaaaaaagaaaagacagaatgactgatgtatatggaagcaccgagaaaaagcagagtatgatataaatacttataaaagcaacaaataccctttcacttgtatattcaagtttaggattaaagcacaattattctttaatttttagattgtggcccacaagctcatttgtaagctgttcagatttttctgtagataaaatgttacggagctagagcttttataaatcttacttccatgctaatgtagtaacttgtagagaagatatcatcttttattcaaactcttttgtatacttaaagttgaatgggtttctctttcctcatttcacatatttcaaataaataagtacattaaaaaatacttagttatggtcatgcttctgatagccgagtcattcaggacatcgttgggagaaagtagtgtaaccagaatatggatgaaagcctaagtcagcttgacctccagtaatgaacgtgggctgtaacacagaagctcagaggttgttgcccagtttggtgtaacgtgagatgttggattagaagcaggtgacacacctaaatgagattagggggagaagaggtagtgtaggaccagttaatgcaggaagagagtagccacatgttcctccatagtccctgaggaatcacactgcattgaattaccatgtagcacagagcagcaatgatcacccttaaccatcaataaagtgtttgaattagataagaaagtacaaatgatatagtgtgtgttatataaatggttagtttttttttttttttatgcttaacgggtaagtttcacttttcttaggagaaaaacaaaacccactgtttaatgcaggacgaatgaaatgtttttaaatccttatttttcccttttcctttgtagacaatactgtcagagttcaagacacagattggaaagaagtagg

SEQ ID NO: 103391 - DNA, 1139 bp, Homo sapiens
tgtgattgatttgtaatttcatttctggagctccatttgtttttgtttctaaactacagatgtcaactccttggggtgctgatctcgagtgttattttctgattgtggtgttgagagttgcactcccagaaaccttttaagagatacatttatagccctaggggtggtatgacccaaaggttcctctgtgacaaggttggccttgggaatagttggctgccaatctccctgctcttggttctcctctagattgaagtttgttttctgatgctgttcttaccagattaaaaaaaagtgtaaattacatggtggtcttgacttttattacagaaagatatgtagtaaatattcagaacagatacacaatgttacttggacatttcagaattatcagagaacatagcataggcagataatttttgtaagggttttctgtttgtttgttttttttttttttagcagcgctctgtcttctaataaaggcctgatttatgaaatgaatgaaaacagagctagtttggttgaactggacttggggtgggtgctttggctacacacctactcaaatccacctcttctctcgacttctctctctctgcagctctttcttgggttctgtggtggaactttctgggctgtgaagcaatgctgttgaaaggccatttggtattagggactcctgtttgtggctcctgggatgaggtggttatgattttgttttccttgtgttttgaacacttagcccctaatttgtaacttaagtagaagatacctttttaaaaagttttactgctttgagtgctaatcaggtacttgttcttcaaagatagccttttatttgaagaacattttgcttttcagacttaaatacacaaaattcaagatttattttttctacaagaaaaaggccaaacacaaatgacttacacaaacaactgtagaaacatgctatagtgacaatctgattcacaacataggaataaaacactactagcatctacagaaaataggaatattgccaatgtcttcctgcttttttaaaaattctgttttgcatataaggaaatggcttggaatgttatgtgctgcaagaatattttgagtcctacatacaagtgaatttttttttttgctacaca

SEQ ID NO: 103392 - DNA, 1035 bp, Homo sapiens
atctttttacttcaatcttaatacttttgtttggattttatttcatagttttctaggagggctgagctaaaacatgtcctgaacacctgctgggtgccaagcaatgtgctctgagcttcactctcttgacccatgcacaagatacctgcactagcttgccagatgagaacttccagaaggcagttgatgttcagttttatggggtttgctgctgtgtttgttaccatgtgagtgaagacctatcatccccttaaattttggaaagatagaattgagtgttagttctatcttgaatgtatctgaatattagttaattcagcagggacggaatgttaggctagagaatgtagtaatgaagagaatctagggaactgatggaagagaaaggatatgccactgttcctggaaagctgattttacatttaaccaaagtacggtaccattttatcgcgctgacgggaggaagatctggaagaacttttctgtggctggtagagctgtccgctaaggctgcgtttttaaatccctgttcattgtgaacaaatcaaataggtctttgttgtgtttcagcttccccgagtcagcttggagggaaaatgctagcctctctctggctcaaagttgtgaaacaaagcaagaaaaacaacaaacataacattttagagtctatacagcatgactcccctctccctcctttttgccctttcccatttcaaaatgtcacaattattaaaggttacatgtttggaaggaacaggtactagtctatgtgacagaacagactattttagggtcgccatgagacctatgtgtccttggttcctatgttcatacacagaccaatggggaaagtattattattattattattattattttgagacagagtctcactctgttgcccaggctggagtgcagtggtgcgatctcggctcactgcaagctccgcctcccgggttcacgccattctcctgcctcagcctccctagtagctgggactacaggcgcccgctaccacgcccggctaatttttta

SEQ ID NO: 103393 - DNA, 1081 bp, Homo sapiens
tcatctgcctttgtaactagctctgcccatggccgtggcccacaggttgagaaactttgtccagcctattaccattcagttgtatgttttgagctgtcttttattactaagtgaaaactgggtgagattgttgaagagggacgattgccacaggggtttcctgtgttcttaatctcctgaaacttgaggacctcatggttacaccctgccctacaagttttctcttacccgtttattcaggatgtcacacagcattatttattaatatttgaaaggtctacccctgagtaaggagggtggatatatatttttttaagtggaagaaaccaaacttcaactcctatagctctctgtgcttgaatcttgtaacaggctgctcttataagcagtgccccagatccttctaatgggggaacctcacctgcccttgtcaggaaagaagggggaagggcccaggaaccttccagtctgagaggctggtattctggttctttcatcgtgtgacttatactagtgatccctatcttcttgggggcaagtggggaagccattctcctcttgaagccggttatcagagaactatgaactcatagcgaggtgacaggattttaggatgtgcatttgtcaattccaagttattgtccaggcgtgtgtgtgtgtgtgtgtgtgtgtgtgtgtgtaaggggactcctagaatcactggctaatcatcaaaccttatgttaatcaatatttatactctcttctgttagatttcttttaacagaataactttaaaaggtacccacatctgatattttgaatttcacctcccgtctcttttccctatgccccacttggctttcttcagaaattccaagggagtggtgaaagaattaagtgagcagcagcaggaggatgaagcaaagttctaccggattataaatggtctgatctattccttgccatcacctgacctcccccaagcatgactgtgggatattgaccccaggacccccacctccacccaccttgggggtctagaagaatgtgtcgacaatgatgcctgcaaagcagcagcttcatgtgtctgactgcccac

SEQ ID NO: 103394 - DNA, 1133 bp, Homo sapiens
cccaccaggaatgccgtttcctttttatggatctgttgggaaccagagagaatcaacagatcaatgacataggatccgaagtgcaatgatagtcacttctagtttggcatttcacaaactctgtacagcaaggtattggtaggttactcaatttcaaaagggccccatggccaaatatgtttaggaaccgctgtttgtatttctttttttggagacgcattgtatataatatatgtcaaaggctttcggaattcctgcaggaaagaaatcagctttgttaaatccaaactgatgatttgactcaataagttagttgcagagctggaaaaagtagtctaactcccttcccagtgctctttcccctataccagtctgcctctcatgcttagacagcgttcagcggtgatccaaatcaccaagcacctggtgctggaaacattgtaggtgccagaagcagcctcctggtcccaaagagagcccaagatattagaacatagccatgttagccccttgcctcccacttcgcaacatgagacatgtcttccttttgctgtccacagggaagggagagagggaggtaaaaatggaagtggctttggcctggagcagcttctagttatgcccaagcaatgtagattgtttggtaatcagccaagatccatccaggttcccaggagcataaaagcaatcatctcctttttggtccttcaaaaccaaactggagtggtgacgtcagggccagagaccctctccttctgtgggcattggatcacttagaactctcaacctcagaaaagcctgccttcaagctggcttttgacgggctattggctggagactgggtcagtattgaaagtgctagctgtgcacctggctgccagaaagccacttggcctttaggacagtcctcttcacattgccctcttccctcactcatgatcaggtctggatttaagagcaagagaccccaggataattcagaagtcctctctctcctcctgttcaagactcttggtctgggattcaataataagtagcagacctgacataagaaagatcagataggtccaattgccagtgactattgggagccataatttggcagctggagactggtaggctcaggcctgatt

SEQ ID NO: 103395 - DNA, 1127 bp, Homo sapiens
ttgctaaatgcggcatactcagagcacacttctcagcaccccaccctctccctccctcctgagactcctcccccgaccctactacaccccctttccctactcccagatctacctgggagagaaacatgcacagcttcaactccaaaattaaaattcaatgttttaatcagaaaacaaaaacctccaattcttcctaacctcagcacaacgctctagaccctttaactttggtaaagtgagtcacatccccatctgcataaaaaaatctttactgcttttgggaaatgtttacaatggcctttaatttcccagtatttcacaagggagccagacagacaaggagtctagccatcccctggcgggaccccacgctcagcatcctcctccactgtctgtcttttggatatagacaaacccctcccaagtcctgcaggacagtcagcaggctttccagtcctccctagaaggcagtgtgtgtggagggaggttggttaaataccatgtttaatcgacctcggaagctatgcatgagcaagataagtccagccattgtggcacctaacacaccctcagcatggcccgtactaaaaacacttttcagaggactgggagaggggtgtccatgcccagaaaacgtaagccatcggggccagaaaaatgaggacaatagctttaatgctattaatgtatcctggactttacaaaatctctagatacctttttgataaaggtgcttacggttaatgacaaacagctaacattcgttgctttgtgcctggcactgttcaaatcattgggccagtttacttctaaatcttcacagtaactctgtgaagcaggtactattacaaaccccattttacggatgagaaaattaaggtttagagaagttaagaaatgtcccaaggtcacatagttaggaagtagtaaagcctgactcccaaaccatgctcaaagccataccttccatttgtggagtatttcgtatttttaaaactcttatgcatgcaataataaccatcacctagaagaaatagatagattttatatatatatatatatagagagagagagagagagagagagagagagagagattgattgattttagatagatatagatagat

SEQ ID NO: 103396 - DNA, 1023 bp, Homo sapiens
aaaaataataaataaataaataaatgctgctgttaggtcaagaaagacaaggactaaaacaccgaccactagattttcccctgaaaactatttattacttttaaccaagtgctggccaagtctccctggccttggatggaaggcatatcaattgcacatcatcagccaagtactgattggatggtttcaattgcaaaggggaaatcttatctccaagtcataaggtgggatttctgacagaaggaagagcacacattaggtgaagaatgctagactaggaaggaatggagtcagatggcatgggcaccagtcttggtttatctacttgctccctgtgtgaccttaagactccctgtagctcttaccatcttcacatacaatatgatgggtggtgagcagagcagggttctctgagagacttttcatagtctcttctcaagtctaaaattcaaagacatttccctatcttagtcagggatggctacataatttgcaggatccctttttcaaaatgtgcagtgtggggggggaatgctgttaaagatactaaatataaagctttttctttccttccactatctctctcttgacttgtcataatgctgttttaattgctatttaatatcattctaggtaaaataaataaatgaaattttacattattcacgtggattttaccatttacttttacattgtgcaatgcaaaattttaaatgcaaatatgaaaacattgaactcataagcagaatcaataaaattacacaattcatatttcatagttcctacatgctgtattagtcagttcccacactgctaataaagacatacccgagactgggtaacttataaagaaaaagaggtttaggctgggcgtggtggctcatgcctgtaatcccagcactttgggaggccgaggcaggtggatcacgaggtcaggagatcgagaccatgctggctaacacggtgaaaccccgtctctactaaaaatacaaaaaattagccgggcgtggtggtgggtgccta

SEQ ID NO: 103397 - DNA, 1109 bp, Homo sapiens
ccatttgaaaatggaagctgttggctgggcacagtggctcacgcctgtaatcccagcactttgggaggccgaggtgggcagatcacaagatcaagagattgagaccatcctggctaacacggtgaaaccccgtctctactaaaaaaaaaaaaaacaaaaaattaaccgggagtggtggtgggtgcctgtagtcccagctactcggggggctaaggcaggagaatggcgtgaacccaggaggtggagtttgcatgagccaagatcgtgccactgcattccagcctgggcaacggagcgagactctgtcaaaaaaaaaaaaaaaaaaaaaaaaaaaaagaaagaaaagaaaagaaagaaaatggaagctgttatgattggtgtttgtctggagaaggaggctacactgagactttgcactggcacagggccctgtccacacacctccgggcttctgcagatagggaaactccctaggacaagctggcagttctgacaaatgcccagataaatcttgctggtgccaagctgtctgggacctgttgcctctgcccagctccttccaaatacccaggcccttccctgatgagatgactggcttccagccctgggatacgccttaatgaaccagcattgtggacatcacccagaacttctctgcaagtggacacactgtgaaggcaggaggcttgatgaaagacagtatttctttcaatatgcgtgctcaagggcaggggctgggagggctcctcaggggagatcttgggccagtatcatctgagatacctttcaggtagtcttcatcctcagagttcatcctggggctggaagagtgctctggaccactggataggggattgaccacacaatgacagtttggatgagagctgaacaatgtcttcaagacagatatttcctccagttcacctgtggtcctcatgcaacaacaaccagcaggacacctgggctctgattaggtttctggccatcatggggctcctagggcaaaggggaaattcttccccctcactgggtccctgtctgtgatctcgcctcccgctcaccacttgctagctcagggagactttcatcaagtttgcagtgagaagaaa

SEQ ID NO: 103398 - DNA, 1088 bp, Homo sapiens
aaacagtaaaagtcatagaaggacatcatcttaaagggtgagcaagcatttaaatgtgagtatgctgacacaggagacaataggaggaagatggtctcttggggaggggaggtgggcaggcagagagaaatgtcctgccctctagggaattccaggggccagggaagaaggtgaagagagagtagggttggggtgagcaatttgggaacagagagaaggagaaggagcagccctgggacaacattcaggactctacaggaaaagaggcaaaagaaaacagtggggtacatatgaaagagactggtcagggagcaaagggtgcctcagcaccaaaaggctctaaatcagtcagatcaaagtcagtgtgctgcaaattaattctttctgagtctcccttctcaggtcccccatctgcccctcagctgccccgtctctttgccatggtctccctttttctacaccttggtctccccacttctgcctgaagaattcctgttaacattgcttttagggcaaatctactggtagtgaattatctcggcttttatagatgtgtaaaagtcttcattttttcttaattgttcaaatatatttttgttgcgtgcagaattctaattttagcattttctgcatcaacactttaaatacgccatcccattatcttctggcctgcatagtttctgatgagaagtctgctgtcattcttgtttttgtttctctgtacttatggtgtcgcttttttctggctgctttgaaaaattcctctttgtttcactgttttctgcaattcaattaaaagttcctcagtatgtaggtattgaaggaacatacctcaaaataataagagccatctatgacaaatccacagccaacatcattctgaatgggcaaaagctggaaacgttccccttgaaaaccggcaaaagacaaggttgtcctctctcaccactccaatttaacatagtattggaagtcttggccaagagagtcaggcaagagaaagaaataaagcacatccaaataggaagaaaggaagtcaagctatccctgtttgccattgatgtgattctatacctagaaaatcccca

SEQ ID NO: 103399 - DNA, 1049 bp, Homo sapiens
ttcgtttaatatttattgaggatctgctttgtgccatgcactgctctcaagcccggaaagaggatggtgacctagaatgagaggtccctgttcttgtatagctgatcgtctagttgtgggtagggggaacagacaattaacaaatggatagctgaataaatgagtaaaacaacttcagacagagttcagaactaaaaagaaaataaataaaactgtctggctggagaagcactagttaggatggggtaaccccaccccacgtatcctgggcccaccgttgagctcactggcaccttctgtggtcagttcccaggcatgcagacagacattgctttcctgcatctcctcttctccttctgaagactttctctggtgccacaggagtgtgctctgcccacacacagggactgactacccaccgcacccccagggcaaccttcaacccatgagggcaagagcctgttggataaatacttcaactcctctatctcttagtgggacaatttggaggcatgtttcacaccatacctcaggggtctccaacaagactgagtctcagtttccctcaagggtaaccaactcagtaacacatcctgttaacacacccatctgtgtcatactttcatgactcccccaacctcttgtgctccctgagattgccttgcaaataatccacctataccaagtctctttcggtgtctgattggcaggaagccaaactgagatacatggtcaaggtcagcctctctgagaaactgatgtttgagccgagatgcaaatcatgtgaagtaaccaagatgcagaggtctggaggggagggctttccagctaaaaagaggagcaagagctcaagccctaagacaggaaggagctgatgtgggctgggcccagaggcagctggtatggccggagcacaggaagcacaggggagcatgatgggagatgaagctggagaaataggcaattaaacttcattcaccctgatgatagtttcctttgctgtgcagaagctctttggtttaattagatctcacttgtcaatgtttgcc

SEQ ID NO: 103400 - DNA, 1038 bp, Homo sapiens
aggaaggaaggaaggaaggaaaggaaggaaggaaggaaggaagcaaggaaggcaggcaggcaggcaggcaataataccaagttgctctcattaagtgcttattacgctgggtactgctaagtgccttacctacatgaaatcatttaatccttataataacaagcctacattgtggttaatattattattacctccattttaaggataaagaaactaaggcacaggaagttcagtagattgtccaaggtcatgcagctggtaagtcagggagccaggattccaaccatgcagtgttatttcagtgcccaggctctgagccagtgacgaaaacagcaaatatttgaggtcaaggtgtaatccctcccatatgcaaggcacctggtgaattacaaagctctttgtggaaaggcttccaagggtggagatgggggcagaaatttccagggtcctcagccagagattctctgataacacaggtagaaaataccaagggctgcagagatgcgaaaaggaaaccagagcggccaacagcgcactgcacagaggccctctggttttagagtcaactcaggtgctgctctgtctccatctcctacagcagttgtccgatcacctgtaattttagcccccagaacaacactcctgagacacttctctcattcacctcccggcaccccccagggccagcttcagcccgtgaaattccagcacagttcagcaaagcacagaccagacatggcgtcccacaccagtgagctggcagctgcttcctttgtaaccagacaggtacacaaagaaaagcagagatcagggcagaaggcttcgggctcagtcagggcaggccatttctgttttttttctctttttttctctctctttttttttttgagacagaatctcactctgtcacccaggctggagtgcagtggcgcaatctcagctcactgcaatctttagggcaggccatttctctgtgggccttggcaaggcctggaggcagatgcagaggtttgcaccgcctcaccataaaagggagcg

SEQ ID NO: 103401 - DNA, 1099 bp, Homo sapiens
taagactcaaggtcacttcagggcctgtcactgattgtgggagggcttggtaaaaattgaacctcattaacaccactgaagaagctgatagacaagaaatgggattaagactcaatactcatcaaaataaggctttccttatccacagcctacctgagcagtgcctcactctggaaaatgtggttcatggctcggctcaaacattttctgttgctgagaggacttctctcatggaagtctggctcagatgaacacatgtgtgatctgatggaacctttgtttaagtgaatgaggagggtatttggaagacttagatcaaacgtgtgccccattgggcagtcactatctgctcccctgacagggagaaaccccagtgacaggatagaaagctccaaagatcctgaggaagtttggaaggtcaaacttcaccactgcaaggactgagagatccaagaatctcagaatccaggttggtctccagggtgcagttctgaacaaatgagtgcagtggataaaaagcttatacttaaggtgggaaggtgggtgtgggttccagttccttctttggctgattctcttttggcctggatttcctcacttgtcatccatgccatgtcacaaacccagtgcctacagggaccaggcacagaagctggatatttgagtatcagacatattggaatattactcactcctaccaaatatgtttatggttccccattctcttggtttccattttggagagctaaacaggtactaaaaatgatttctttattataagacaagcaataaaacagtgggcaagtgtgatgataaacagcatctgagctttggctttggagttggggagacaatagagagtggcagtaactgtggtgaaccgtacagtccaggtcccttctggaggggacagctgctgtccagctccagcctatcaggatgtgagtctagtgatgccagatttccagtctcttaggacaagcaagaaatccaaatttttaatgtaacatcttctgaaaagatacacacacacacacacacacacacacacacacacacacacacacacacacgtggaccaaacaaaacatgtccatgg

SEQ ID NO: 103402 - DNA, 1037 bp, Homo sapiens
gtgctcgataaacatgggtgaaatacaggaataaacaaatactgaaaatgggtcattgggtgagcacttagccagtaaaaatctgtgctttgtataaaaagaactttggactgaggttatatgagtcttcctgcaggctggagacctctgttacctttacttctctacttttgttgtcttgagaccagcttttttatttttggtgaggagaacagcaggcagttcaaatgtcagggaaagacaagttcagcttgctttttccttatttctgtcttgttacctgctatcctgccaggttagaaagatggaatcactcccttttgccctatcatcaagacttcagtgttccctggagcactctaaatttgccatcagacttggatcatcctctaataccaagctcctgggtccttcctgaaggctgcctccttgtcttgctgagaagaattaaggtcgcttccctgggaggaattcagcagcacctcttgtaagtcatcaggtgtgctgtaaggatggggcaggcaacatttctttgtactgtgggaaggcctaaatcagtgtttctcaaggtgtgatccttgcaccaccaatcttaagaaatgttctttggagccgggcacagcggctcacgcatataaccccaccttgggaggctgaggcgagaggatcgcttgagcccaggaattgaagaccagtctgggtcacatagtaagattccctgtctctactaatttaaaaaaaaaaaaaagaaaaggtggttgggcctgtagtcccagttactcttgaggcttaggtgggagaatcgcttgagtccacgaggttgaggctgcagtgagccatgattgtaccactgcactccagccagggtgacagagcaagactctatctcaaaaaaaaaaaaatgttatttgggagagctgtttattgtattcccctcttggagagacatgtggctattagcatagtaaaagctctgagaagtcctgctgcatggtgacctgtttagctctgtttaatccagtgttctctgaacatat

SEQ ID NO: 103403 - DNA, 1124 bp, Homo sapiens
gagggaagtatgttcctgtgcatcgaaagcctcaaacatgtgcatacactttaactagcaatcttacttctagaaatttagtcctaagaaataactaggcaatggagtccattgctacattgtttatccccaaattaatctaaatgtctattgcaaatagactgcttagattatggtgcgttcatacagtgaagatctgcacttcctcttctgctaaccgctaaggtgtcatcagtgctgtgctattaaaatcagaagtcaaaggaggtgggtgtggccctcatagccagagttgatagaaatggatttattaatataatggatggtccaaagaaaggtgaatgaaagagtcataaaagatgttgaggtagttctctattgatgccagaatagccctatggtgcacttttgagtaacagaagccaatttgttaaaaacaacaacaacaacaacaacaaaaaaaaaacagagagagagagatgaatgtgcatccagatgcttagagaagagtctgaatgtctgtatactaaatatcaacactagttactctgcgctgtgggattttggatgattttaatttgatccagtgttttctggaaaataaaatttcactacattgacacatcatttgataatcagataaaagaacaatggtgggaaagcaaggactcaagtgacccttgcttttgggtctagagcatcatgtaggaagccagcacagcccatccctttcctaggcgccaccttctggctcctggtgggacttgtaagtcccgtggtcagttacctgattgctcttacggacctgacgctggaaatcctctctctccaaggtccctgcaggagatgggacctgccacagagaatgccgcaagggatgtttctgttgggagctgtgagtggggtggatgtcctctgcctctcttaaatagatgagctagatttgaacctggggctggccaaagggagtctcctctcagaaaccaggatgcagtgggccgtctgtgtcccagccccaaagcagccagggtccagtggattagcacagagccgaccaggcctggagggtggtggtctgggattgggtgagcagccaccagcaggaatagcaattggagggaagg

SEQ ID NO: 103404 - DNA, 1017 bp, Homo sapiens
ccttctctcataattcagtcttgggaattttccctatctccgcatttccaatgcatttgacttggtggggtgtttcagatttgttaaatatttagtagtagaaagaagatgagctttgctgctgggcatatttggattcctagctgtgtgacttctgacaagtttcttaactatcctgagacttgttttcttcctatactcagtggaaataaagctacacattttggggaatggttttaagagtaagatgtactgtttgtaaagtgtgtctgtcttgttcacttttctgtttctgccacctgacacaatgcctggcacatagtaagtgctcagtgaatatttactgaatgaataagaggtttaggcaccatgattgcacagacacgatgttcatagagtagttggtcttctccttctttatcaatgactccatctccctgtcacacttcaaggccagggcaggtggttcagaaataccagaggttggctttatagttctgccattacccactttgaccaaagagggcagcagttagcattctttacttatttattttatttaaaatgaaggtttccttaaaaggatttggatcttctctttaatcattcctccgcaccttcagtgctattgattcctgataatggtcttagggcttgaagacctatgtatgggctcgtttttctcgtacctgttcctacctgagtgcccactatgtgagtgatgtggttgtgagctggaagggaggtgctgagtgagtaggggaacacccgctgcagcaggtgggccttccaaactatggccctgggtgtccacaaccttacagaatgaagcttgtggaacttaaaggtgaggaaagcctacactattttaaaagccacatgaagggtaagttatagatgtaccagggtctccttggcatctgtgctgtataaaatccatagacagagcagccattggctcttgttcaaaccacaagaaagtctcctgcccactcctggtgcattctgggaacagat

SEQ ID NO: 103405 - DNA, 1017 bp, Homo sapiens
tcactatatgaacctgtcctatgatgccccttgcctaggtgagaatcacttcctccctgtgcatctgcctgcacctttggcttcctgcaagacccacccagctgaaatgctacctcctccaggaagccttctgtccaccccaggccaagctagtccacctctcttctgcttggctttcctctctttcttccagcacgtgttctttaatgattggttccttggacactcactagcatcgctaattaccggatggcagggactgcatctgggactccagcacatggcatagagcctagattgtggccagggttcccaaaaatgttgaatgaatgaatgaatgaggctgtgggagggaaccaaaggtaatacaataacgaagacggggatggttttgtgtttggcttcctggagtgctgggtcaggagtccttgttccatagagttactcagaaaaggaagggacaagtaaaaatgtgatctggagaggccgaataccgacattgttccaaaatattgaagactgacctccaaaaagaggcaagtcacaggaccctattacaggagacccccatgaacttgttgatgtgtctgtggaaggacagcacccaaaagctaccaacacatgaagatcccaaggctcagcaccctcaaggaagtcagtggtgacaccaaaattagccccagggagtctccacccaaggcactccttgctagacctgctgactcctctgcaggccctctggcctccagctgcccctcttccttgtggtagcactcaggaaatatgaagagcatggcaggctgtttatccaggccccatctccaggtcctgtgtccctctctgccatagtgtttattgtttgttttattttgccaccccccctccttctcctcaagtccacttgaaattcattgattcactcatctgatatttattcagaagtatttgaggaactatgcatctcagatcctgtgccatgtcttggggattcagtaataagcaggcagacaaggttcc

SEQ ID NO: 103406 - DNA, 2798 bp, Homo sapiens
atgttcctgagtctggagcaagcacccaggccagaataacagagctttcttagttggtgaagacttaaacatctgcctgaggtcaggaggcaatttgcctgccttgtacaaaagctcaggtgaaagactgagatgaatgtctttcctctccctgcctcccaccagacttcctcctggaaaacgctttggtagatttggccaggagctttcttttatgtaaattggataaatacacacaccatacactatccacagatatagccaagtagatttgggtagaggatactatttccagaatagtgtttagctcacctagggggatatgtttgtatacacatttgcatatacccacatggggacataagctaatttttttacaggacacagaattctgttcaatgctgttaaatatgccaatagtttaatctcttctattttgttgtcgttgcttgtttgaagaaaatcatgacattccaagttgacatttttttttcattttaattaaaatttgaaattctgaacaccgtcagcaccctctcttccctatcatgggtcatctgacccctgtccgtctccttgtccctgcttcatgtttgggggcctttctttaactgccttcctggcttagctcagatggcagatgagagtgtagtcaagggcctgggcacaggagggagagctgcagagtgtcctgcctgccttggctggagggacacctctcctgggtgtggagacagcttggttccctttccctagctccctggtgggtgaatgccacctcctgagatcctcacctcttggaattaaaattgttggtcactggggaaagcctgagtttgcaaccagttgtagggtttctgttgtgtttttttttttttttttgaaataaaactataatataaattctcctattaaataaaattattttaagttttagtgtcaaaagtgagatgctgagagtaggtgataatgtatattttacagagtgggggttggcaggatggtgacattgaacatgattgctctctgtctcttttttcagcttatgggtatttatcttctattagtatttgtatcttcagttcattccactttaggaaacagagctgccaattgaaacagaagaagaaaaaaaaaaaaagcagcagacaacacactgtagagtcttgcacacacacaagtgcccaggcaaggtgcttggcagaaccgcagagtgggaagagagtaccggcatcgggtttccttgggatcaatttcattaccgtgtacctttcccattgtggtcatgccatttggcagggggagaatgggaggcttggccttctttgtgaggcagtgtgagcagaagctgatgccagcatgtcactggttttgaagggatgagcccagacttgatgttttgggattgtccttattttaacctcaaggtctcgcatggtggggcccctgaccaacctacacaagttccctcccacaagtggacatcagtgtcttctctgtgaggcatctggccattcgcactccctggtgtggtcagcctctctcacacaaggaggaacttgggtgaaggctgagtgtgaggcacctgaagtttccctgcggagtcgataaattagcagaaccacatccccatctgttaggccttggtgaggaggccctgggcaaagaagggtctttcgcaaagcgatgtcagagggcggttttgagctttctataagctatagctttgtttatttcacccgttcacttactgtataatttaaaatcatttatgtagctgagacacttctgtatttcaatcatatcatgaacattttattttgctaaatcttgtgtcatgtgtaggctgtaatatgtgtacattgtgtttaagagaaaaatgaaacccacatgccgccattttcctgaatcaaattctgcagtggaatggagaggaaaatacttctaggcaagcagctagactggtgaattgggggaaatagaaggaactagtaactgagactcctccagcctcctccctattggaatcccaatggctcctggagtaggaaaaaagtttaaactacattcatgttcttgttctgtgtcactcggccctgggtagtctaccatttacttcaccccaagtcctgctgcccatccagttgggaagccatgattttcctaagaatccagggccatgggagatacaattccaagttctcgcttcctcctttgggcatctcttctgcctcccaatcaaggaagctccatgctcaggctctcagctctcgggccagtgctctgctctgtccagggtaggtaatactgggagactcctgtcttttaccctcccctcgttccagacctgcctcatggtggcaacatggttcttgaacaattaaagaaacaaatgactttttggaatagccctgtctagggcaaactgtggcccccaggagacactacccttccatgccccagacctctgtcttgcatgtgacaattgacaatctggactaccccaagatggcacccaagtgtttggcttctggctacctaaggttaacatgtcactagagtatttttatgagagacaaacattataaaaatctgatggcaaaagcaaaacaaaatggaaagtaggggaggtggatgtgacaacaacttccaaattggctctttggaggcgagaggaaggggagaacttggagaatagtttttgctttgggggtagaggcttcttagattctcccagcatccgcctttccctttagccagtctgctgtcctgaaacccagaagtgatggagagaaacc

SEQ ID NO: 103407 - DNA, 1055 bp, Homo sapiens
tggacagagctgtacccgggatcagatggacaagggcttgaatcgtggctttgcctcctgttacctgggggacttcaagggagtggttcaaggttccaagctaatgtttctctattcacagaatggagctagtaaccgcaatgctactatgtccagcacacgttgagaatttggtctgttttagttaacactaagggaactttggatgtaagttgactcatttgtaaaaggaggaactgggaaatatacagagcatgtgcaacccccggccctccgctgttcaatgaaggcaatgccttccagcccagctgaggggcggcctcattatctttctctgcacagcagccagagctggcagcaagaccaaacccactggatgacctgaaaagaacttgcagttctcacattctgtggggttgctacgaggctacttaaacaggatggtaaattatggataaagtggttggatcatgagatgagctcagttggtaaatatatgatgggggtgaaaccaaaacccactgacaacacaactctactttttctagcctagagtgtctactgaaacaagtattttccaaccatgctccttagagccctactttaccacagaggtacctgggtactctgtgaactgttgggcatccttggaagagtagagagaaagagagagagagagagagagagatgctagaaagaggaagatacgcttagcctaacctgtctcctcttctgtattagtagctaacaaccaggggtgatttttgccccaatccccccaacaggagacatttggcaatgcctggagacatttttggttgtcacaacaggggagatctcctgacacctgtgggcagaggccaggtatgttgctaaacctcctacaatacacaaaacagtcttccgcaacaaagagttacatagctcaaaatgtcaatagcgccaaggttgagaaacccccttctagaccgaacaactcaaaaacacacctttgtgcaaggagccccttgggtaccctaaagacagtttatggtggtgtgggcttcactctggag

SEQ ID NO: 103408 - DNA, 1001 bp, Homo sapiens
gtctcccgagttcaagtgattcttctgcctcagcctcctgagtagctgggactacaggcatgtgccaccatgcccggctaatttttttattttttattttttttctatttttagtacagatggaatttcaccatgttggtcaggctagtctcaaactcttgacctcaaatgatctacctgccttggtctcctaaagttctgggattacaggcgtgagccaccacacctggcctacagaacaataacattgatgatggtagcacacttttattgaacatttactatttgctagatgccatattaagtgttttccatgcagtcactcattcaatccacacagtatgcctgttgctgaggaaacttgggctcagagagcttaataaattgcccaggcaggtcacacagctagtaagaatgcagtgaagctgggatttgaacttacaggtagaagccagggatgagaggtccaaacttagcactcctggcagcagaggtcacagtcaactgaaagactcaggtgtggcctcgaggagggagtggtgtttgaaatagatcaaagaatggataggatgtcaacaagtggagatggtggcgtgaagagcgtgtgaatggaggaggcagtgtgagcaaagataaggagaccagaagtacagggtatggagtgacagggaatgcggtgtggttctccaaaataggacacatcatcttcccctgcgcccaccctactcctccctaattctctctctcaatgaagagtgtggccatctaccttccaccttagccagaaacctgctctggctcccggatgtgcccctctccctgtaccactgcacccattcaatgactggaccctgctgactccgcatctgatatttcctggtccctccacttctcccttcatccccatcacctagatccttggctggaccaccctcaactctcgtccagtcttcctcatcaacagcctcacaacttcatgttttccacccatctccaatgta

SEQ ID NO: 103409 - DNA, 1070 bp, Homo sapiens
acatggtgaaacctcatctctactaaaaataaaaaaaatagccggatgtgatggcaggcacctgtaatcccagctactcgggaggctgaggcaggagaatcgcttgaacctgggaggcagaggttgtagtgagccgagactaggccattgcactctagcctaggcaacaagagtgaaactccgtctcaaaagaaaaaaaaaaaagactgagaaaatcagtagtgaaggtgggaggagacagtaggatggctgaggatgtgtctcaatatgcacctctggggtaaggcctttgggagaagggagaaaagagtaaaacagcctgcatccttactcagctgatttcttcccctttacaggtcgaagtatttccatgggaagaaggtgaatggagagattgagatccgagtggagcaggtaggtgggagctgtgtctttagcactgtcaactgaccttttctgccgctggggctgttcttacatgcaatcttggtccccatcttatgtggtcataatgagccaagattaccagaaaagtccaagcttatacttgggagtctcattaaatttcagaattgtttgggccagtggtttccaaccttttatgttttagcagagaccctttcttcaagggaaatgtcaaataggaactcattctacaaaagagagacacgtagagctgctctgatggaaatgggcaggtggagcccaacttctgtctgttctataccgttccttttggcccctggggcatctccttgcagccacctgggctagagagcatagtttaggaacataatgaagggccttgaatcctgcctctctcattttctaggttttgggtaggtgacttaatctctctctgccttgatttccttatatcattgtggggattaaattatttaaaacctcagaagggaccagaattgcaaatactatctcttgctattgctattaatatcaatatccaggtccctcattttatgtggaaagaaacacagatttttttagggctgtgtagggaggcagtggcagaatcaggagtggaaggtgtggtctcctggctccagatc

SEQ ID NO: 103410 - DNA, 1156 bp, Homo sapiens
gtccggtgtcctgacctagcacatcagataattctacagcagataatggagtaggaccgggtcttgctgtaggtaggaaatgagctctcgacatggcaggaagctaaaacctgcacagaccttaaagtgcagccttagaatatttagaattttatcctggaatgaaggagggccgtggaagaattctgatcagtgatcaggtccctctggcagctctggggacaatggatggaggccggagcatcagaaagctggtaagttgtagttgttttctggtccttggctgcaaatactcttccctgcttaagggagccccctctgcccgggagccctgctccctggcttctggacatggattcaggcaaagagatgctgcccgtgtaatgcttgcttctgcagcctgcacatcattttgatattgtttctggagcctgtgacctcagtcttgtcatcaggcctctgaagggtgcctctgctcttcttttctcatcttcaagccctctgtgtgcccttcccctctgcctgggctcccctttctgtttcacagagatccagtctcagccattggaggcaaggctgtgtgtagattggtgtagtagaaagaacaagggctcgctgggaaatcagaccagaaagtcactttagccataggctttggggacattagcaaccttcatgaaccttctttttctgatttaaaaggaaatcattgtactcacctgtcatggtttgggttccctggaaaaagacttggcgcttctgagatttttgtgcagataagggaagcagaactgggcagagggagatgttgatctatggtgcagtgcaagagaggtctcaatccctcccatgagacaaagagacgaggcctttgaagcttaatgttgatcagccagtgggtgcaggctggtcctagggagggagctaggatgtcccttcagcaggacagttcctgactagggactcacctgggagctggggtaaccaacactctggcagctggacatggggaagtcatgagtgtcttggtcttggagggggagttgagcatttccccacggtatccactacactacctcacaaatgaagtagtgctttgtactgtgcctggtgcatagtagatatcttaaaagtattcatttctctcacctttaag

SEQ ID NO: 103411 - DNA, 1043 bp, Homo sapiens
acaagatcagggcagggctttaggatgttctggatgctttttaataattatgcttcccatcataactggggagaaagggaagtcagggttctaggggttattcgtcccaggaaatagaagtgaaattgtctttattaagtgaaaactttcccctttgccctgcaatgtagctgggcattcaaacggagggcaaaccgatgatctaaaccaaccacttggaaaaacccaatggggacattgtaaccagagggtcctggaggtggggttgatgggtttccttatccccaaagtcactcctgttttgttttgtttttctttgggggttttgtttatttttggggctggcaatccaaaatagaaaatctgatcctttgaggctctaaaggaaaatcagctgcctctaccaaccaccctctatcagcagtggcccaggaaggaggtcaagcatcttcggccgatatttaaacatgggcagcttccttcaggatgatcaccgaggctcccgtgactttgaactccctactctccagaatccaggggctatagcgatggggactgcggaattacgagggctggctgttttacaccggtcacattttctattggcagtgactgattcatgggaaagggctttgaaggaactacttcagtgcacacacaaggtacgaacctctcaggcctttcgaagaactttcataattcatgaaagcccagttctgaagattcacgtatccatctggagacctacaggaagaaagtgattgggttcctctggttcttgcctgcttcactgtggatgggaagaggtgacaacctcagtctccctttgggacctgtccaagggtaggcaaccaccttcaccttcacacagattgaggagacactggactttttacccattttctttaatcttcaatattaatattgtgtttacattgatgagaacaagagttaatgccctaccctctgctgggctgtttgtattgagttgcaatgtgaccagcgaaagctgcatttaataaatgaaagtacagactgtttct

SEQ ID NO: 103412 - DNA, 1038 bp, Homo sapiens
agctgccagcccccagctctcatctcatttgacttctcagccacctccaactgccggtgactcctccatggcacacgttttattttctcctggcttttaggtgctcatcgcagtctctttgtggttcttcaatcttcttggtccctcccaggagttcccattgctggctcctcttctcgttctacctgactcccattttatagatattccatgttacagatacggaaattgcagaaccaagagattaattaagtagttagccaggatgcagacccgagcagcctgcctctagaatgtgaaccactgtgactccgaggaggtgaagttgtcagaactaggcagtgcacggcgtttccttatgtcttccgagacactttcccgtaatctcttcatgccaggaacctgggctgtttccctggttacagggacctgcctctagaggaaaggatggagttaaaaagagagaatgagatggagggagggaggtgtgtatgtatgtgaaagagatcaacagccagggtcaggttgaggattggtaattccatgccaccgtagcaccagggaaacccatccagctaatactctgcccttccatccatgctgtttctttggtttatgcagaacccgggcaagcctaccatctgcacccacccctaccccttcatttggcataggaagcctcactgctcactcacactcacatcccctcccctgctcgccagttttgccagattggagcaaaagaggatacgaactacccatatacctgagtgagctgagaggaggggctcggggaaaaaagatatacagaagaggaggctgtggggggctttggaggataacctttatcaaattcacagtttccccactggttagctctgccacgctggaaaaggtgaatttactctgtgagcaacacctgaattgtttttgttacaaagagggactcagagggctggctagagaccgagatctcataagttctgtttctgtagatgagcaagcagaagtcttccctggttgtaagtagtatgttga

SEQ ID NO: 103413 - DNA, 1078 bp, Homo sapiens
agtgagccatgattgtgccactgcactccatcctgaacagcagggcaacaccctatctcaaaaaaacacatttgttaattacttaagaatgatgacagttacaagttactgagcccttaccatgtgccagaaaccctgccagctgcactcagtctgtcattacctctgttcttcacactgctctttaaggtaactaccattacaggtgaccaaactgaggccccagagaagttaaatgttagcattagaggaggaggaaagcagccttcctccatgccagcctgctcactctgtcgaaggggccaggttactcccaaacccccagggtaccagagcaggccgactggcagccctcggcttgtacccccaaacactgatttatatcaccttttttggggttctatttggttaccaaaaaaagttcagcatgttagctctttgagcagttgcttagcaaccagctaatattacagccaaaacaaacagatcaattggaaaataatggaataagctgtacgcatggacaatagctgcagagttttactaaaatctccttccagccccttcatctactttttctgaagaatgagctcctggatgtacagctttcacttttgatctcagaaatgtcaggcgaaagtcagcggggcatggcagaggttgcgcagacttgcctttgaagccaggttccacaacactaatcaagtgtgtgagttggggctgcttgcttcatctcctcattctttcacttcctcagttaatataggagctaatgatagcctcctgtggggctatggcgggtgcccagcaggagttcattttctgccccttggcctattcagtattggacttctgtgctaggcccctgccccaacccaacccccgccattgcaaactctgccaccttctgtgcagcctgggtagcttcatgtgaccatctcaatttttttgctttctgaaaatgagaaactatatattgatactactcattctttcaaaaactgtgtagtgagcatgtactatgtgtcaggcagtatgctacattgtaggtgatgttgctgtccctgggggtcattca

SEQ ID NO: 103414 - DNA, 1095 bp, Homo sapiens
cataacagtgaatgacacttggtccctggagtcaggcactgtgggttctttgttgccctgtcactttgtttttggacaagtcacttaacttttttttttttttttttttttgagacagagtcttgcggtgtcgccaggccagagtgcagtgttgcaatctcggctcactgcagccttccccttctgggttcgagcgattctcccgcctcaacctcccaatagctgggactacaggcgcgcaccaccaggcccagctaactttgtatttttagtagagacggggtttcaccatgttggccagcatggtctcaatctcttgacttcgtgatctgcccaccttggcctcccaaagtgcatcacttaacttctttaagcctcagtttcttcatctgtgatctgaaagtggtaactgtatcattatcctcatccctaaggttgttacaaagatcagatgagagaaggcgtgccagtgcttagtcctgacatacattcagaggctcccagaatgataccagtactgttgaccagaatcttaatatttgtgatattgggtaaaaaggcactagacggaaggacagagagctccgggttcaaatcccaccaactcattcaatcctcagctggtgttctgggcaagtcacttaacatctttgggtttccgtttcctccttctataaaagaaggataaaattacttgcctcatagggtcctgtttaggagtaaataagagatcctctataaaagccctgagcacatatttgacatccagtaaatactggctagatctgaacatccttacgaaggcatgtgcacatgatagttatttaggagaggtaaagtgatgtagtagaaaagaaaaaaaagcaagacttggattcaaagtacacttgtgccacttcctagctgtgtaagtttgaacgacttacttagcctttttgagcctcacttgactcatctacgagatggtgataacgtcagattcactgattattgtctgggttctacaaaataaggtgtaaagtgcctagtaagtagttgatgtgagaaaatattaatttcccttttcttaatgtttctcacctctctgctggctat

SEQ ID NO: 103415 - DNA, 1003 bp, Homo sapiens
ttcaagtgatccgcccacctcagcctcccaaagtgctgggattacaggcatgagccaccacgcccggccaactctcttatttcaaagaagggaaatagagacacacaaaggttaaacaccttgcctaaggttaaacaccggttggtggcacagctgggatagtacctgaccttcacatcatgtgtccttggatcatgccagagaatggcaggctaagcagacgggaccttgggtgacttaagcttgagtctgttgtcttccctcagcactcatccattttttgctcctggataattttcagaactgaactcttttgagttttattgatttcagttgtccttcattggctttttacacatagctgataaacttccaatgcagttattgctagaaacaacaagattcctagaagcaaagtgatgtctctggaaattttaccctatgacagcattttccagagtgtatgtccaaacagttctaagagctgttaattggacttatttaaaatggggaactggggaggaggatggggagagcggagttctatgtactacataccaaatactgtattaggaagtcctgcagccagaaaatctgattgattttgttgatccccagcatttcccacatctattttatatcaacacacaggaaagactcccctttgattacagaatgcctggtaggacaagttccttagaagcccacacttccttacataaatactggctctattaagaagaacacaattttgagcaaaggaagcgccattgtaaagcagtatttggcgaccatggacattgagccactaactgagagcctcccctatagaaggctcaggtgcatgatattaacactgggcctcagaaagccggagggctaggcagagaaagggtggtccaggaggagttagaagatctacttttgagattctggaaaagaccataaattgaatggatcatgggttcataacttggccgtgatcagagaagagtaaccaagg

SEQ ID NO: 103416 - DNA, 1296 bp, Homo sapiens
atcctgggcaccatgggctgcagaaatccaaggagcatccatcactgagtccaccgcaggccccaggaagcactgctgaaagggaggatctgtaatttgtctcagtccctgaatgagtggggctacttgtcatcatgcagtttcctctccaggaggctcaggatgggtaacacagggctcctgcctaggaggccagaggggaaggagacttcgtttttcatatgccagtgagggtagggaagacaccccatgtctgcacatgtgagctcactggatagggccttatgagaccagcaggactctggagcttccagtcagcctgggacattcccccgtctctatccaaacattattgcttggttcctagagataacaggcaagagagatgcctcacagtgcgagccagcctgtgttcagagcaggaggttcaagagaagccctatcacaggggatgcagtgccttgagagccaaaatgggcagctggaccatccgactgtcttgactgtgtctttggctttcatcccccaggatattttcaatgccgtcatcaaacaaaaccccttccttgtgtaccagctcccctgcttctggaatgtgcagctgtcagaccacacccgctccgagcagtgctacagagacgtgtctgatctaaaggtagggtcaacacagggacatccctggaggtagggtgaggtgggccgagaggacctcccaggggcatggatggctgggagatttatgtgcaatgtggtgagagagataagggcacaggagagcagaatgagtatgcttttcatctttgtggggtgttggtttttttccacccttatttgggctttctggaaagcctaaagcctcctggcgtaagaaccagcttgtgtggttattattcttgccatctgctgctggctcttttggttcatgccagctccccaaatctattcattcaactcaagcaaaaacatttattgagggcctactctgtgccaggtgctatagatgtggatgtgaataattaacctgcttccaagtcatgtatgacttggaggaggagagaaatgtgcaaagaagtaagtatttaaaaaaggacaaagtgctatgacaggtgtgggtgggtcagtcggggagatgcaagcataaatgtctcattcttcctcacagagggcggacaatgacagaaaaagctttcatcaccactctgtaggtaccaaacactgtgaatgaacctggctatagaaagaggaagaagacagggtatattagtcatctactgctatagataatgctgcataaca

SEQ ID NO: 103417 - DNA, 1085 bp, Homo sapiens
tgtgaatagccactgcactccagcctgctcaacatagtaagacccagtctctaaaaaagtaataatagagtggtccctggcatatggtataggcatagagttcagtatatattatatgcattttcagccaggcgtggtggctcatgcctgtaatcccagtactttgggaggctgaggtgagtggatcacctgaggtcaagagttcaaaaccagcctggccaacatggtgaaaccccgtctctgctaaaaatataaaaatttgctgggcgtggtggcgggtgcctgtaatcccagctccttgggaggctgaagcaggagaatcgcctgaacctgggaggtggaggttgcagtgagccaagatcgtgccattgcactccagcctgggtgacaaaggcgaaactccttctcaaaaaataaataaataaatgcattttcacattcagccctcttaataattgatatagttgtcaaacattttacttatggagtcatcatcaggatgaggccccaaattccactcctccacacaccaccacacagccctgggcatgccaacttctctgtgccagtgttcacacctgaaaatgcggataatgggaaaacgtgtggcagagggtcgtctcgaagactgaatgagatctaaagtgtgctagatacctctgcaacccaaaagagggaagggcagacaaacagtgagggtgtgtgcgttcaagtcaaaacatggatgtttcatcacacaggcttctttgaactctgtctcggtgtggtagtaagcaggaaatcctgcaagctctcaagacggagaggataggagaaaaatcccaagatgcaaatcgggcagaggtcattgtttaaggagcagctttgtgggtcggatctcaagggatgggactgcgcagaatgttggacagaatggggaagggaagacctgcaggtggagggggcacgccaggctgtggaatgggtgtggccaggcaagtctgggtatacacggcgggaagagccgtggtcatagaggaagccttactactggacttcagagaagaatggagtcaccactcacttgctttaggtctggagaccta

SEQ ID NO: 103418 - DNA, 1022 bp, Homo sapiens
ctgtgaaatggtattggtaataattgcaagagaaggccttctgcatgatggagttgtctaaaggagccaggtggatcagatgtgaaggcccagagacatgtacgccctaagagattgaccacaaggctaacttgcctaagttgctaagatgcagcagagactgaggccaacatcaacgccagctctggggacagaggagcagttgttatctagacaacactcttgtattgatatgatattgacatgatgcttgttgacacaagataaatatatttgaaaggaagcagtgagggtgagaacaaaaaccctgtaagaaggtggacaaagagtggctcttctctttgggctctcgtctcagcaaacaagggtaatccctcctccctgtcgtgagaaaccaatcccagtccattcccagaaaacgagtaaattaatgtacagtgggaaataccagaatgggaatgcttgagaaatagtatgcctgtcaataaatatgtgctccatgagttaggaaagaaatgcatgcatgcatgcatgaatgaatgaatgaatgaatgaatgaatgaatgatttgggattctagctttatcagattcactaggtgacctgcagcaaatcagttaactgttctgggcctctatttcttctctataaaatggaaataataaaaatgactgcctaatggtgagaattaaatatgttaatgcaagttaagctgttaggtcagaggctggcacttcataaaacctctcagtaagtgaatactgttgttgtgatgatttgccattaccctgtgtcttcaatagtcactgatccagatggcttggcttctccttttaagatgtttgtattctctgtacctcacaggtcagcaagtcctgggcttggtggagaaccagagtgactggtaccttggaaacctgtggaaaaatcaccgcccatggccagcccttggaagaggctacaacacaggtaaatcctcagggtggtatgggaagagttgcagaaggtgatatgaggaccca

SEQ ID NO: 103419 - DNA, 1023 bp, Homo sapiens
gggaggcagctttgtgtgatgaaaataacaggactttgaagtcagacaaacctggatttgaatcgtggctctaccgtattctagctgtgtgccctaggacaagtagcttaaactgtcaacttcagtttcctaatccatacaaacggggattaatatatgtatctcagagagccgctgggaaaaataaaatagatgtatgcagatcttgtgttcctaggaaatattcaataaatgttttgattttgtgtcctcctttttgccaaaggaattattgatcagaagttgataagtaatgggatttgagactccagaatgtgctgcctaaagatggtgactataatagaaaaattagatgttggggtttgtttatttgtgtttttaaaaggagatgggagcttgctgtgttgcccaggctgaccttgaattcctgaactcaagtgatcctcctgcctcagtcttccaagggactgggactagaggcatcactgcacccagatcaatgggtttttttcatgttaactttgagtgacagcctagttgagatgcctggggtagaattggtgatatggggccaaaactcagctgaggcttgagaggggtgaattgtgcagagacattgatttggagagtcctcaacaaaggaatgaatgctctgatcaaagagtcacaagatcaaaacagagaccaggctgttggtgttccatgcgctcatcaacgctgttgattagcattaccccatcctaggaaacatgacaggttgcttccagatgttaccttcaagatctgcattcctttcagattgctcgtcttctgccacagctagcaagatttgcccgaacattgaggtcacagcctcaaatgagcccctcaaagcctcagaatgacaggagagaagcttggtcaggcactccactggcatctaaggtagactgagctctgccaatttccaaagacagatggggctgaagagccaagttttggtaacatggacaaaaaccaaagcaattccagatgttagagccg

SEQ ID NO: 103420 - DNA, 1064 bp, Homo sapiens
acagaagtctaacctgaggctcagggagacttagatttggttaaggtcccacgctgtaaaatagctctctcagattcatgcatggtgtttctatgagactacactgccttttactcagaggaggcatttgaactgaatctaaatgaaaccttagatggtgtgggccagaccagaatggggacctgcattcagagaagcaagtgctccccacgaagaggtcaaggtccgtgtagaggaagtggaactcacaaggtgagggcagcttatggacgagaggaatgaggggcccttccggggaggtgagggagagcatgtgcccacacggggctgagaggcttcagttaagagaccaggcttgtcaggacagcatgcactggtgtgttttgacagagaggagaacgtggagcaaaaggaatagattctaagatctttgagggcaaagactgctcattcctgtttattattcccaatacctgaaatagagtaaatacatcataaatgttcacttgaaagttgtgtggcaggttgaagccaagccaaggagtttagggttgaagccacagcaagagagggcttgtctgcctttttagagttcaataataatgccatgatgtatttaacttttattttggtttcaggggtacatgtgtaggtttgtgatataagtaaattacatgtcatgagggtttggtgtacagattattttgtcacccaaagagtaaacatagtaggccaggcccagtggctcatgcctgtaatcccagcactttgtgaggctgaggcgggtggatcacaaggtcaggagatcaagaccatcctggctaacgtggtgaaaccccatctctactaaaaaatacaaaaaattagccgggcgtggtggcaggagcctgtagtcccagctactcgggaggctgaggcaggagaatggcgtgaacccgggaggtggagcttgcagtgagccaagatcgcaccactgcactccagcctgggtgacagagcgagactccgtgtcagaaaaaaaaaaaaaaaaaaagagtaaacatagcacccaatagatggttttt

SEQ ID NO: 103421 - DNA, 1661 bp, Homo sapiens
ggggcagatcaactgaggtcgggagttcgagaccactctgaccgacttggagaaaccccgtctctactaaaaatacaaaaaattagccaggtgtcgtggtgcatgcctgtaatcccagctacttgggaggctgaggcaggagaatcccctgaacctgggaggcggaggttgcagtgagcctaagtcatgccattgcactccagcctgggcaacaagagcgaaaccccatctcaaaataaataaataaataaataaataaataaataaataaataaataaataaatatgactcactgatgctgattatcaagtaggtactaggaactggtctaaacattttctctaccttgatctccttcagtttgtcttcataaccatctctatcacataaatcctattattatcatccttatttaacaaataaggagaccaattaagagatatgcaacttgcctttgactggtaaagtgatgcaaataggaagagatgaaacagagattcaaaccctggtagtcccaccccagtattcatcttctatatgggattaggcaagattcctgaaaaagcttctaaacccctcatattaaacacaaagactctgttccagtgagtagactatgccattccctgtccccaaattcagcctggctccccctccctggtgcatgtcctgtagatggtggagtgaaaagaggtgcagtttgacaaaagagggcattccatctccttatcttctgatattactgtcagaaacaagttcctggcctctcacttcagctctcttcttttcagccagttatcccctgaacaaaattgcctcaagattacagatgagcagctgtgttttggatgcaggagcattgccatcttgctgacagctgagttttctctggggacatcagctagcccacagcaccccactctttttccacactccttattttcctgtaagctgtggttggtttcctcttgtgaccacaaatgaatcaaaaagagaactgtttcccagttattccttattatgtcaaagcagatgttcaaggtgaggctccggatgacttatcaaaactccagaggtgatttgtgtcctgataacagtgaggtctcagactcacatgtatgcaggtggaaggcaggcagtgtcaatatgcaaagcgtgccaggcataagggggtaagcgccatgtctctaccattgtcaccaagcacagcacctgtctagttgtattgccttttaaaagacagactaggccgggcacagtggctcatgcctgtaatcccagtactttgggaggccgaggcaggtggatcacctgaggtcaggagttcgagaccagcctgaccaaaatggtgaaaccccatttctactaagaacagaaaattagccaggcatggtggtgcatgcctataatcccagctacttgggaggctgaggcaggagaatcacttgaacctgggaggcggaggttgcagtgagccgagattgcaccattgcacttcagcctaggcaacgagagtgaaactccatctcaaaaaataaataaataaataaataaaaataaaagactagatacattggccaacaatatatgtttgaggccctttgagtgaaaaagattatccagatttagtaaccttgaagttcctgtgaaatatgtgatc

SEQ ID NO: 103422 - DNA, 1048 bp, Homo sapiens
tggcatttcttgtaatgctctctctcccctagcccccaacctcccgacaggccccagtgtgtgatgctcttttaacttgcagtgagacctgcctttaacatgcaggaagtagttttccaaatccagaaactgtgagtcccttgaggatccctattatgttttgttcaaccctgagcccccagttactggaacaaggctcagcatagaacaccatggcttaatgcccgataaatgtgtgagaaatacaaaaacagaagaaaggaaaaaggaaagaggagaaaagcatgaataacaacaccttgtctttgctaatattatagccatcaccgacccattgcaagagggatagagtctccgagaggtttttctaggttatgacctttcttgcaagtcaacttccaagactcctgcttttgacctcaaaccaaataattctacctaattcctgattcaaattggtcataaaatgtagcaatcattttgataacacttaacagttcaagaagtgctttcagttagatttaagagctagtttgtggagtacagtagatatgatgatgatggtaataatatctggtaggtagtgagaaagctgaaaatcaaagaagttgacctaactgtctggtaggtaggaaagaaggaaactctaatgcaggtttcctcactacagattcttgactctgtctgtgacctgtatgtcactcaaaattttattgtcctaaatgaggtggccactgcctgacttttgctaagagaactggtgccggtctctttatgaccaatttttacatcatctgtcaacctctgtttcagttggcagttgctctaacgggcaaggtttacccagggaatatccaccttgaatgttggcagttgttctaacgggcaaggtttacccggggaatatccaccttgaatgaaatctctgctcatccaacagaaaaattagtgatatacctgccgtgaatggtggtgtttctcttatctgctttagtatggctttactggtactgtttgacaagaagacaaatgaaaaattcatagggtg

SEQ ID NO: 103423 - DNA, 1176 bp, Homo sapiens
ctggagcttctttgaagtgtcaccctccaccctccgtctttgattcctccttagggtgttctaatcatggagggtcctaggctgtccaggaagccttccatgggcgcccgcacctccacccagtctctaaacccttttcactggtctcataatgatagttgtccctctcccctgagctagcacctatgctgggagtgaatgatcttctatttcttctggggctagcaatccttcctgtagtttagctgtgaatttccattaagccacttgtttggatgggcttctgtgaaagccactgttgaagtaatgatgataatgatccattccatttattgataatgccactcattagattaatggcttcctgtgtactgccttatttaatctcccaacaatcatgtaagcaaaggtgctttcatcatccccattttatggatgaggacacaaagacttagagtggttaagtagtttgcctgaagtcaaagagtcaccaaagagtgattctgcagttagagtcaggcagagggatgctccactgtgcccttacccacgttgtaaaccaggaagctatgagaccaatttttctttaacaaattcactagaatttttatatccaaatagtctcctgcgggagattccacactttaatgatgtttttcttttgctttaattgtcaacatcatggtcctcaaagagtgtttgtacctataattgaacaggtaagattaggagttttcgaagattgagataaagtaagtgccttgctaattcctttgctgcctgaagatgttccaaagcttaaattgaatggtcttttgagaaaatcatctcccacttagcacctaactgttggcaaagcagcgtgctaatcatgggggattcaaaggtgaattagacccacttcctactttgagaggcttttatgtgtaaaagaaaaaagaaacatagaagcagacttacatattatcttatagatgtacatgatacatatatttcaatgtatacatggtatctttatgatataaaattacatattttagtccagtcgtggtgactcacgccttgtaatcccagcactttgggaggccgaggcaggcagatcacctgaggtcaggagttcgagaccagcctgaccaatgtggtgaaaccccgtctctactaaaaatacaaaatgta

SEQ ID NO: 103424 - DNA, 1007 bp, Homo sapiens
tggtacaaccatcgccaccatccatctccagaactttttcatcatcctgaactgaagctttatacctattaatatatataataactgtacattctcccctcccccagcttctggtagccaccagtctcctttctgtctcaatgaatttgaatattctaggtatcccatataagtggagtcatatgatgtttgcgggtttttttttagtgtatgtctggtttatttcacttagcatgatatcttcaagtttgatccattttgtagcatgtatgagaatttccttctcctgggcatacacttcaggactgtcagcatccttagctctgcactcagagcccctctctaggattaactcccagcaccagatgcccattcagacaaccttgtttcatttgcacctttctgaagcaaacagcatacctgctctcgggtctctatgccattgcaaaagctggtccctatgcctgggatgttcatgtcatcagcctgctgaattccatctcattcttaaggcttcccttgactatcactgtgacaggggttggggggtgtttacttggatcacagcatgtgacaccatcatgaccatcaattcccttacctcttcttcccactccctcttcagcctgtgagtaccttaaaagcaaactctcccttgctcttgtgtctcccaaatagctgacatgaagtctgggggtacagtctgctttgttgtctctaatacttctcctgagtttttttgtttgtttgagacagagtctaactctgtcgcccaggctggagtacaatggcgtgatctcggctcactgcaacctccgcctcctgggttcaagcgattctcttgcctcagtttcccaagtagctgaaactacagacatgggccaccacacctgtctaatttttatgtttttactagagacggggtttcaccatattggccaggctggtctcgaactcctgacctcaggtgatctacccgcctcagcctcccaaagtgctgggattat

SEQ ID NO: 103425 - DNA, 1049 bp, Homo sapiens
agaacaaggaaaaaaatcatggctttacaaaaaacaactgtatggtcaacctacaagtaaacagttccctttcctgggcctcaggtacaataaagagatgagacaagaagatatgctacagtcccatccacttgtaggggagttagccattgcagttagacagtttgacaaaagccatctctggctgtggaatcaaaggaggaaaggctgggtactaagtagaaaaatgacatttcgtttcgtggaaaacaagcaaccttgacataactcagatttgtcttacaaggatggaatgagcagaacttgccttgccagagacgcagttcacaatggaggtagtcagagataagaagacagactagggccatgcagagctgaatgcattccttctaccaagtccttttccagggtaaagctctccatccctgtcatagggtctgcaaacatcacagctgctggggtagaggaagggtccattctctagactggatcatgagatcagtcccactggttgtacttcttaggtcacctaaaatccatggaatatttgggaactatgattacagagctagacgtgccctggaatttatcatgcaaagctgaatcccccctcactctgagtaacaacacagaaaacctctttaaatgccagggaaatatcacccttgttgtctgtatcagagactaaaagtattcttaatagtttaaagggtactcaataaatattaccacatggggtattaagcttccagattaccccacctcaaggcatacagcagtacacacacaggtacaactcatgtggctggcatcagcaacataaagaaatagcagcagtaaaagctgcgtgtgaagatacctgagtacagctgccacatgtggaaacatctgtccaaatgggaggaaagtctggctgcccccgtttggtctcatcagtcatttaatggcccatcagtaaaacaggaagaaaatcactatgtgtgtgatggattgcccgacaatacagaactgtatcggcacccgccaccttgaattgggttcatttgtat

SEQ ID NO: 103426 - DNA, 1443 bp, Homo sapiens
tcatcattctggaagccttttgtaagatccagggcgctgaccagggaactttccatgcaccaccttttgggcagattaagtccggggactactgcctcccctgcctgggttcttcagtgtataaaatgagggggtttctggggtagcttttctggctgttttctcgttgaatgtgttgttgatgagtccagagttcttgtttagctccagtgttctgggaaagatcgtcctggctgtctattttctgctccctgtgaaaatgagttcattcattcaacaaacacataccaagtgccaatcatgtgtcaggtacgctaacaggccctcagaatacagcagcaacaaacagcaagcagaccctccggagtttaccttttcatggatgtgatgtctgcagggatgaacagtttgtcatggatagatttgctgctctctttctaggtctctgtgcatcaatttgcactggaaaagccacttgcaatgctgtaaaagaaggagtatttggagcgaaagtctagggaccttcattaaaatctaggtttctgggcctcagcaccaacaagtgtggctttggggtcaagagcttgcggtctggaatcacatcatgcagcattcattcttttttgttgttttttattttttattttttttttttttagctacacctgctgaaatgggaggggttcattcttggctctactgttttctgagaacttgaacaaataaactgctcgatatcaatttgtttttattttcaatagcaaaataaagataggaacattacgtgcctgcgaggagatcctttacctaaagcgcttagcacagtgcctggttcatgctgttcacacagtgctgtgtgttcatgttattgacagcctcagtgacagcctcagtgagcttaggtcactatctttgggccttggctgtccccttctatcaaatgaagtgattgtttcacccctttataggtccgtgtttctgactcactttaataggactgaaactcgtgattgtctctcctccacgtgtagactagccgactaaaagaaggctatatgatatatatatacacgtagttgtcccttcatatccgtaggggcctggttccaggaaccccgtggataccaaaatgtagcaatgctcaagttccttatattaaatggggttgtatttacatacaatctatgcacatctcctgcatactttaaatcatctctaaattacttataatacctagcaccatgtaaatagttattatactgtatgaatttttaaattttgtgttactttcgtttatttttattttcattgttttttcttagaatatttttgatccacatttggatgaagtcgcaaatgtagaacctggagatacagagggctggcagtatacacctgtgatacatatgtgtgtgcatatgtctatgaatatatatatacaca

SEQ ID NO: 103427 - DNA, 1087 bp, Homo sapiens
gaaattgcattgtaggctatttaaggaactttccacataagtttgtcaagccagcctagctaatagaacaggatatgtttgagcaagttatttaccccattgggcctatgtggaatcccactggctcctttaataaaagaacatccagtcctcagggttggtgataagatgagtgtgaagtgcggatgcccatgggcatggggaatttatttaccagttcttttattaaaagagctggcaggattctgttaccaggacttgcctttttttttttcttttaatcagaaaattttgacaaagaatctatgaagtgcagatgtagggccaaccatacttttcacacttttttgattgtatcctacagtcagaaatacatttttcatcacaatccaaaagacatatgtgtgtatgtatgtttatacaggcatatatacacacatatatgcagatgagcaattaaaacaatattttcgtaaaacaatacttgaccttactatgttcagtgaatttttatatttcttttctaatctatttaatgtattttaatttttaaaatgcttgctcagatccactgaattattttcacaaccttcaaatgtgttacaaaccctagtttcaaaaacactggactggaagatatcctaaaatgccttttaactctgtattaagcattctgaaattcagcaaacttgccagcaatcagagaggagatcagaagctcattttctagaacccatttgctggaaggggcagtgagtaatctcttgtagacggcttccttgtcctccagtggccttccccttcattgagttactttgtgtggccgtgccaagcatggtggctgccacgtggtggggggagccttacatctcattttccttacttcccaggcaggtgccctgttttatttatctctgtattccaagcatctagtaaggctcaacactgggctcagtaaattgatggggaaacaaaataaaaaatgtggctccattttcgtttttcattaaccttcagggaagattgcacaatgtaccttcgtaatgctattcattttttaactagcttcaattcagctcagaaatat

SEQ ID NO: 103428 - DNA, 1029 bp, Homo sapiens
atccgcctacctccgcctctcaaagtgctgggattactggtgtgagccgctgtgcccgtctgccatactttataggaaaactgggcaccttctcttctctgagtgcagttgttgtcaacactgcctttaagttataatcatctggggagcacgtgaagaataatgatgcccaggtctaccccatatcagccaagtcagaacctctggtatgggcagtggcctgccgtatttttgaaagctccctacataatgctgaagtgtggccagggttgagattcactgccctaaggttgctatcccaggatctgctggctactgcaacaaaagagacactgtgtcttggttgttttgccatgggggcagtggggcagggtactgtttgggaggagtgtttggagacgggattaaaatcctggcacttgtccctcccagggaaaagggtcatcctgtttattttgtgtcaagagctcaaacagtgatcaaaatccaatccaacatcataaataccagaaaaggtcagggctgggctggtcataggatcaagcacacacagccgagctgaggttggcacttagtcaactccaaactcttcactagcaaacagcacagggggggacttggcaaggcccggcctcttggcgccccagtcacagaatggaggttcacatggctctgttgtttttgtcgaaggaggagaaatgccattttctcagcagtccttctccttgactcattagtgtagttggcaatgtggttactttttaacttctctgcaaatattcatagaaagagaaggggagtagaaggcaggagctgttaatgtacaccaagctcctattttttgcaggcctccacagggtaaaagggactggcccccgtgcaccaggccactgccagtggtgcagatgaaggacctgagcccccacaggcatctgaggtcacatggtcagtagagctgggaattttatcccgggtcagaagaacttcaaagcccatattttgtcttattactacacatcttaagagatt

SEQ ID NO: 103429 - DNA, 1031 bp, Homo sapiens
ctggaagggatcttagaggtcatgagttagctcagtgccttttgttgcaaaggtcaagaaggttctaaggtctttgacttggatgatgcaatttcaagagaacttcgcttggacagaagtctgtgtttcatctttactagctgtaggcgagtccctctacctttctgatcctaagctatctgttcagtaagtgcttcactgagtgactatagaaagcatgaatgattagtaaaataaatggatttgagtaggtgggcccagtgtctctttcaggtctatggatctgatgcaaattcacactgtcaggggcaaagccagaaccatataaaagcgggcatctttggtacctctcttgtcctcataccctacatttatcttccagtaagtcctgctggctgtgccttcaaggttctatatacctatccaagcctactagatactaaaatattagttattgaataaacaaaattaggtctctggcctctgggctctttggattctacgatatatttttctcccttctgttcctttaaaggagcaaataagagggaccctgaagtcaccaaggggacttgagtcactgagtttatatccggcatgaaacactgtccaaggcaggaatggagacacagagtgaggaagaatgacgaaatctgccccaaacagggttcccatgagagttcaactaatgaacagtgacctgctggctcagcccagggagaatctcaaaacataacatttggcttccaaatcatgctagattgtagtctatatctctggagacagatctggtagcagttacaatggaagtgggcttttattctttttttttttttttttttttgagacagagttttgctcttgttgctcaggctggagtgcagtggtgcgatctcggctcaatgcaacctctacctccttggttcaagggtttctcctgcctcagcctcctgagtagctgggattccaggcagccgccaccacacccagctaatttttgtattttagtagagatggggtttcaccatgtt

SEQ ID NO: 103430 - DNA, 1029 bp, Homo sapiens
tgtaggcatgtgctaccacgtctggctattttttttttttaatttttatttttgcagacacagggtctcactttgttccccaggctggtctcaaattcctgggctcaagcgatcctcccgcctcagcttcccaaagtgctgggattacaggcgtgagccactgtgccccgctgagtcattttattgtaatcacaataagatggctgtctacatacctctaaacagttcaggatgggagaggttcttaatatcagaggagacaatgcaaggccttggagtaaacacatttccaaaaataatctctgtcaagatggggaaagaagcctgagaaatggttatgtaaaagcataggagttgggggtttgctcctaattggaaagagctggccgtgtatctcagtggggaaagtacaggctgtagagtgggatgattccaagacctgggtttgaggccccacgcttccaggcacttcgcaattcagcttctcattctcaatgggaatattatgttaggagcaaaatatgtaattcacctagtattttgcaggtgttttgtcatattatctcagttctatgatacaggactttgcacattttcccatttccgaaactgagatgtgacttacaaaagcaacttgacagatggtctttttctcctggcaaatgttttgatatatcgtacaatcagcagcctcttagaatccagaaaatatgttgtgattatttttattagcaatatctctctagcttttctttttatctttgagttgtacaggggagaaggagggcgagtaggactgtagactaaaggagaaagagctgagtcagtcaaagagaggatttgggggtcttagcagactcttccttgatcaacttttattgtttgaccacagggtcctggagcatctgcaccattgctatttttttttcttttgtaaataaatatcgtgcttgtgtctcccgtgttgagataggtgccatctcttggtaagccctcccatgtggagactgactgtctgtttcctggaag

SEQ ID NO: 103431 - DNA, 1048 bp, Homo sapiens
cttgaaagttaaataaactgatggctcacgcctgtaatcccagcactttgggaggccgagcccggcagatcacgaggtcaggagatcgaaaccatcctggctaacacggtgaaaccccatttctactaaaaatacaaaaaattagctgggcgtggtggcggacgcctgtagtcccagctactcgggaggctgaggcaggagaatggcgtgaacctgggaggcagagcttgcagtaagccgagatggcgccactgcactccagcctgggtgacagagcaagactctgtctcaaaaaaaaaaaaaaagttaaataaactgggctcaagagagattaaattacttttcatgctcagagagctattacatagtgaaactgaaccccaatccatacggctttggagtctgtgctctgtccactgacccaggaggctgtactgcacttagaacgggtgtgactgctgagtacgtgtcaccttggacccctgcatgccttagtttttactgcacaaaacactggaaataatatgtgattgttgtcatttggggaggctgttgtgaaggcataaataataaatacacacccataatctgaagcttttggaagaaggccgtgctgaatattcaagatagtgatttgatccataagcacagatgcctcccctctaagaggatcttagtgccacagagtaaaattctcaccctacagcaggtatggtcaaactatccagcgtacatgggcactgccttcctcaccctcacggcaccgcagatgtgccatgccactgggtatcattcagggcctaatagactctgtgttgttccttacaactaacatgtttaagcacttagtctgtgccagccactctgttaaggactttatggataaactcatttaatcctcacaaccctcccatgaagtgattactgttgatgttcctattttagagatttgggagctgatgcttagggaggcatagtttacctggagtctcacatttcttaagtcatgaaaccgagatttgaacccaaacagtctaactttgaatcc

SEQ ID NO: 103432 - DNA, 1032 bp, Homo sapiens
agaaaaatgaactcaggcctggctgactccgtagtcatgcacattcatcaaacagtttttgaataattactgtgttgttaccacagtcaaaaagacatcgtccctgcctcaaggagtttcagtcaagtgcaggagaggggcatggaaaattgaacccagcaggataacatgctgtgctggaggaagggaaacagcttgcttcttgctttgggagcccctaatccagcctggggctgtgggggtgggggtggctggaaggcagtgatttctaagttgagacttgaaagagggggagaatgtggatggaggtgggggaagagtgctagatatcatgccgtctctaagagggtgagctatttgtaataaatgtacctgcttcttaccacttgttctttccccaccaccaaatttcttaattttccaccttttcctggggctttctttctgaatacaaactcatcccattgcctcctttacaactaattgaacacttggacttaattgattatgtattaagttggggacttggagtgacattcaggactgggctcatgttgagattaatttattcctgtagtcttcctgttttgcagtgtaactgagtgcctcacatgtgtgttaaaaataaaacggagagtcagggcaatctaattagacagcttaacccatcactctcgtgttcagtcttcacccagctctcctgctttgatggtaaccaaaatagatgaataagttaatcaaaggtctgattaaatagcacagctctgcagcatggactaatgattgccaagcctcagttcaggcagattgctagaggagagaggaagctgagctgagctccaaaggccagggctttcatgaggaagatgtttataaagcacatgggagggaattcctcactgagtcctcggatcttaacggtgatggctcactctaaaggaaggataatgtagtttggggaaagaacacaaaccttctcctggcaaattctgactcttagagctttgcatcttgctggctgtgggattgtag

SEQ ID NO: 103433 - DNA, 1019 bp, Homo sapiens
cttccactttcttctataatattctatacaaatggtcattaatcttctgcttttgaatacttccagagataagagatcattacctcccaaaggaccctgttccatatttagaaactctattagaaatattcgccttatgccttactgaaatcttcatctttttcattctcctcattggtccacctgagcattaatgaagatcaggtgcaagcctgtgtaccatttgtctgttccctcatctgccttctctactagacagagggaacctagagggcaaggtctgtaacatttatgttcatgcccagcctttggcatgggcatggccagatttggacaaaatctggccaatcctggcctccagcaaatacctggcttctatgttttgagctacacagtgtgcatcaaccagttgtttgaagacctgacacatttactgagtcctctcttcttctcagtaatcactactacatttcttcaactgtacctgaaatgacagtgtatggagcctaggtgacagttgacccttaaaacatgtcttctgacctgcttgtggaataaatgccttccaggttgctgacttgcttaaatgtgctccccattgtgtctccatcccatagacagagacattctctgtggttctgcaaatcacagcacttggtctagatctgcatatgtgacatgccccaccttgagctacagttggtctgagctcagagtcttaaactcatttaaaagcagtgaagtgtcccaactcaccttttttctcatcctgagcattgtttccttctcattcttatttattgtggtcttctcattcatacttcatttaactgataaggaaatgctttatctgtatcaaaacatctcttgtaccccataaatatatacacctactatgtacccacaaaaaataaaaattaaaaaaaagagagagaagtgctttcatatacctactttcattctgtcctcccaagaactccatgccacagagaggacatgtgttttattatgttttattt

SEQ ID NO: 103434 - DNA, 1137 bp, Homo sapiens
tctgtgagttttgaccaccaaggctttctggagacgctggagagcattggcctggtgtataatctgaaagtggtctatggtagctgtcatctagagagttccattacccagtgaagtaaaggctgaactcagacccccatgggctggggtttaaatttgcctgttgtcacttactgatcaaaagacacaaagtaaaccacgcatctctgctggacctgttttctcatcagtagaaaaggtggatgaaataccaaactcatggggataattaagaggctcaaatgagagaatatatttgaatgtgctttaaaaagacactgctgaataaatattaaaggttatgtcaggctggaggggtttcaaccaaatgaaacctttttggtcatctcttccccttacaatttttttgtggtgccattttgcttgcatcgtgttgagacccacagcccgattaagaagtcctgtatattctggctcttgattctacttccagtcttgtcactggcattcccgtaaaccttcgctattcctttaactctaagtagcagagcacacctctggttccctttgccccctcttctgtgtttgagtctttgcttattctgttccttccatctgatatttccttcccacctatcttgccacaactcctgttcgtacttcaggactcagctgcagtgccaactcctcttaagaaacagcctgacttccacaggaaagaggaagacattttttgttcacttgtctgtctactgaacctttcttaatggggtaggaggagaggagccgcatcttattcttttctatatttctggtgcatagtaggtacccactaatgcttgtggatttaacaaattgctgtgattagaggaacatgtaactttgcagaaatgcactgatgctctgtctctgatcaccttgggaaggactcaacacctaagcatgaggctgactctggcaaattgcttgttccaaacctcataaagccattatcttttcattttagagccatagcatttttaatagatcactgacatgccagccagagtttctgattttcacatatttcaggctctgaggttgatggagatgttcagaatttagcatttggggattgtcttggtaatttgcgtgcca

SEQ ID NO: 103435 - DNA, 1037 bp, Homo sapiens
tggtcacaggcagaactgagggagaaatggctggagtgcagggtttaaggaaggggtgtgaagatatgagctttgagggacagatagggtgagatcgttgaaggtcttttttgctccatgcgagaggctggggcttatatattgtacagtgagcaaggggctgtgtgattacattagagcaagtgtatggcttaggggctagaggatatatcagagtgagttagagagtcagaaaaacagtgaatatattcatgagaaaaaagagtgaatattttcatgagatgtccccaaggttggataggataatgaggctaacatttactaagtcctcacttcctgccagtccttgttgtaagtgctgcatatgttttagctcaatcgatctgacaataactgtaaggtaggagctattgtgatcaagcccattttgaagatttggaaactgagactcagaggtgaagaagctttcccaaggttcaacatttgttcatgacagaaccacgttaagaaaaaaaaaacaggcagttttgctttcaagacccagctcctaaccattaagctaagctgcctttcaggacttgaggttgattgagtgtgtggcatacagctgggtggggggcccagggcatacccccatttctagcttatgaggctgggtgaatgaggcacctttaacgcaggcaggaaattcaaggggaaacctgtgtaaggggccaggagagggaaaactgatttctgttttggaaattgaggaagccactcatccatgcagtcctgcagaataaacaaaagcccctccttactgtgtcaggtggtgctctgggagctaggatgcagcagtgaatgcaagacccagtctctgtccccaaggagcttaaattctaaagaagagacaggtcccagacaaacactccacaaatcattagaaacttggtgtgtagtagccgggcgtgatggcacatgtctgtaatcccagctactcaggaggctgaggcaggagaatctcctgaacccaggaggcggaggttgtggtgagc

SEQ ID NO: 103436 - DNA, 1009 bp, Homo sapiens
gagttttgctcttgtcgccaaggctggagtgcagtggcatgatcttggctcactgaaacctctgcctcctggattccagcgattctcctgccacagctgcccaagtagcttggattacaggcgcctgccaccacacccagctaatttttgtatttttagtagagactgggttcctccatgttggccagctggtcccaaactcctgacctcaggtgatccacccaccttggcctcccaaagtgctgggattacaggtgtgagccaccgcccccagccattttaactctttagactttaggttttttttttttttttttttaaatcagttaacttttgctgtgtgtcagttcaccctaaaacttaatggtctgaaacatttacttattagttcagttgtttctactgggctgacctgtacggttcttctgctgggccacttacgtgcctgcagcaagctggcaagttagcaagcgtcaaattcactgcccatcctgaatggagaagtggataggagaagtaagcaatcaacaaatagataacagttcaccgtagaggctgtcagttcttcctcatagcgctgtccagttggaattatgatttcagttgtatatttgaagaggaaatggaaacaccaaagaaagaatggccaaatggggcttgacctactgtcttctgacctgaggtgagatgccctttccacattgttattgtttctctgcagttttgaaggctcctttcagtactacggccttcatcctgtggcttaaaaccaggcattttgtacactaagcattgaatgagatgagtggtcttcagacttttatgtatttactacttgttgccatgacgtatcaggtctctccctggtttaaaaaaaaaaaaaaaaagcccactttctagaaaagggcctttgcatgatgtacaggtattcaattacgctatttctcaattatggcaaagttaaaggtcataaaaacctctggtgttgtgtataaattttattcctgtt

SEQ ID NO: 103437 - DNA, 1047 bp, Homo sapiens
ccttcaattctgccagtcttccgttctttgaactgtatcccagatggggtgcggaggtgttcctgtgtcccctttggcccttttattaggttgaccctaacccaacacatcttgtgggaacatttcactaactctctgagccataacttcttagtctgagatccctgattgttggttcatactttcaagatgtatttctttcctctctgtttaaccaattgtcattgtcgctcagcttgaggacaggagactcactgtttgcctatttgagccaatcaccatctctcttgtccccaaaatgtaattggaaggagccttaatggtttccaaatgataatagctccataagccgattaaaaaggccttaataaaactgtcttgagttattttccacagctgcagacagtgtcctttgttttctaatgatgccaacaagaaatcagggcaatttttctttctagtgtgatctgaagcaccaggaaggcctccttccgtctgtctgactgctcaccccgtcttcttttcttcccagacaatccacgttgctattgtctgcgccggatacaatgccagccgggatgtcgtcaccctggtcaaatccgtcctgttccataggtaagaacaacttctgtgctgtgtgggctgaggtctgtcactgcctgcctgtgtatttccttggggaagggttaaataggagcaaaatttctcatcaatcattctagctgccataaaaatgtaatttttgtctgaaaccctgaggagatgattgtgttaacaatgtttaatgacagcgattaggtgctgtcttgccatgtttagaattgtaactctcagacctaatgcaatcttaaaggacacctcaaatctgatgcttcagtctctctatcagcttcccctgcctagcatttaccagatctcagttgttatacatccttgtcggtaggttgtgttatggattgagttatgtccaccacaattcttatggtgaggccctcattcctggtacctgagaatatgactgtatttggagatagggtctttaattag

SEQ ID NO: 103438 - DNA, 1025 bp, Homo sapiens
gacctcaggtgatccgccgcctcggcctcccaaagggctgggattgcaagcatgagtcaccgcgcacagcaaaattagcctgcagtgatggtgtgtgccaccatgttggccaggcgggtctcgaactcttgaccttagatgatccgcccaccttggcctcccaaagtgagccacaggcatgagccaagaccccaccctttgataggaggaatgttgaatagttgtgaccatttttaatctaccacaccaagaaacttaaaaactgaacttaatagcttcaagccctaaagtcacatgacaaaaccatttttgtgaccccattctttcaaggatcgtttatctttctccctactctccccattcccactccaacccctgccccactcatggttcacttctgtaaccccagattttggaacacccaaaactcctctaagaacatagtcgatgccactgtgattttctgctttcccagggagcagggccctgctgctatgcctccagatgatgcatttattcatggtggcaggtgtattcgatgaaactaaagagattggaaaattatgtaaaatgttcaagaatgtgcatgcttgtgcttacatttaatgggcccattttaaaaagtctctgaaccctgaagccaagacaaagtttgatatctctgaggctgtatgtttaaatatttgcgattctgaagagcctgattcagcgtgtttttccccattctcatccccttcccagttatgtcttccatgtgcaggcgttttcctattcatttccctcatgattgaaatggtgacagttacatctgcattataatctttcatcctgagtcttttacagatattatccagagataagcaatggtgtctttcttttacaggtggagaaattaaaatatgcataaattagcctgaaaaaaaggtaccagaaaacccagagggatctgacattgcttcattttgcttcattttgctccctcatccctcatacagggttttctaacagcactgctcttgaccttt

SEQ ID NO: 103439 - DNA, 1350 bp, Homo sapiens
gggtaccatgtctaggatgacaggaaattagtggaagccttagcattgccttagaaagagcttttatggttcattactcaagagctttgtaaagcttttaaaaagtataaataaaatgtataaattctcaagtttgttacattggtgccgtttcctttagggatcagcaagtatctatgaatgcctgaaagtcttctgtgctttctttccagccaacaggacaagtgagatgctgaggaaaggtcctcagtgttggtcaggtcctggcaagttactgcttgcatgcttaggggctgaaatgattccaggaggggccaagaggtatgggcagggctgaggggaggcaacacagaggcaggaaggtgttaagaaacccagcaaggactggaacttgtgtgattgggcccctgacaggagccggggaaatctgacctctgagacccccactggtgcctcccaatgaccaaactcaacccaaaatcagaggcaaaaggagcccacttaacgtggtctacaaaggtcagactcaaccaggcacggtggctcatgcctgtaatcccagcactttgggaggccgaggtgggcggatcacatgaggccaggagttcaagaccagcttgggcaacgtggccaaaccccatctctactaaaaatacaaatattagctgggcatgatggccgcatgcctgtagtcccagctacttgagaagctgaggcaagagaatcgcttgaacctgggacacggaggttggagagagctgagatcataccactgcattccagcctgggcgatagatcgagactcggtctcaaaacaaacaaacaaacggccagactctccagacacaggactgttaggagaagggtagagagtgagttggaggggcaaacgagaacatcattccatcctccatctggactttgtgacagagaaacatgagtgttatgtctatacagtcatgtgttacataatgacatatctgtcaacagtggactgcatttaccacactgctcccatcagatcataatggagctaaaaattcctattgcctagtgacatcatagccatcctaacatcatgtgcaacacatcgctcatgtgtttggtgatgttggtgtgaacaaaccgactgcgctgccatttgtataaaactatagcgcaattatgtacagtacataataatactagagagaaaatggctgtgttaccagtgtatgtatttatcatactatcattattttagtgtattccttctacttattttttttaaagttaactgtaaaacagcctcaggcaggtccttcaggaggtatttcagaaggccttgctgtcgcaggagatgacagctcc

SEQ ID NO: 103440 - DNA, 1026 bp, Homo sapiens
aaagcttgggttgaagcttgtaattggccagtcggtgacaatgcaaccctaatcaacctgtgatttcacgtcccctaccaattctgcatcggcctttgatttgtggtcccaggcagtgcaattcattgagtcatatttgttgcattgataggagaagaccaggcacttaggcgtttaaccctgaggtgattaagaggaaaaaaaatgagtcatatttgttaaggcccaaagatacatcaaaaagccctgggcagaggccgacacaagcacaagtgagacctgcagggtgtaattcatcacattctttgatcctcaagtttgtgagtcacagagactctctgggacagttttgaagctcaggggtctgggcaggaaggaaaaacttgaagtatggaaaaagaggaatgtttttttgacaggcagctgagagaggacgattttctagagatatgctttttttgcttggtaacccctgaggtggctgtaaatgtagctggagcccaggatttctgcagagtggaaacagaaataagtgatagctttgggtatgccttgtgccactggggctcctgaacagtaagcatgccttgagcgcctactttatacaaggtgatataagtatccttgggagatggggtttttatactaataagtgtttgtttttttttaatgttagctctctgaatagcctataatgaaagtttattgaagtggagagtgtacaggcccagatatcagagagacctgggtgcgaattctgacatcaccattgtggtggcatcacattgagagacctgcttatcgtctctgtgcctcagttttttgtgttgtttttgtttttgttttttgttttgagacagagtcttgctctgtcgccaggctggaatgcagtggtgcaatctcggcttactgcaacccctgcctccagggttcaagcaattcccctgcctcaacctcacgagtagctgggactgtatacaggtgcgtgccaccatgcctggctaactttttgtattttagtagaga

SEQ ID NO: 103441 - DNA, 1206 bp, Homo sapiens
tctgtcaagctgaactcctgatgaaatcttctattcccctctctccctgatcggtttcgataaaacctcattcctcattctgattttctcctaagggatggtttggatttgtcaggaaagggtgaaaaaagaggtgattttttttttcattttcctcctcttatttctttttctaatatagatacttgttggaattggaatataactttaatgtaagtcaaactgataaagggtggttggacactactgtgaagaaggaaaagaagataggaaaaaggaggacagtcacttacaggcaaaggaatgtccagccaggcttttgcttgttttctcttgtttttaatttacaatggagctgaggaagataacactgatttaggtgaagtggcattttacagcagggggatgccattgaaggaatcaatgacattcacaaaagtacttgcttccatttttttttttggaatgggttagaatattctggatggcagctactcatgccgttggatggctatgttgccactgctaactttaacaagtacagagtcccccttatctttgataactagctctttctattcctctttttaccagccccatcatttctgtctctcatctggttccactatcgaagagtgaacactgcaggccagagttggacacttctggtgaagtgtggcttgcatagcaggtggtctccatagaaggctaggcaaggggtggggagtttggatgaagggcggtgatttgtctcaaagccagttgactgtagaggagatggggtatgtcagagggccccgagaatatggtgcaagtcaagtccatcctcactgatgctggggctcctgaaaagatggggcagggcctttcctcccatgttgatcttgcttacatgcagtataagggaagagaacttttgctcaggtttggcaggtgcaccatttcaagggcagtggtcagataggcaaactgaccattctacctgacgcatagcctaaagaacactctctggaccaggcttatccaacctgtggacagctttgaatgtggcccaacacaaatttggccactttgaaaacactatgagattcttttcctttttttttttttttttttttttggctcctaagctgtccttagtgttagtgttttttatgtgtggcccaagacaattcttcttccagtgtggcccagggaagccaaaag

SEQ ID NO: 103442 - DNA, 1049 bp, Homo sapiens
ggcaacagcaagtgtagaagccctgagtgggagagtgcttgctatgtatcccaggagcatatgccaggccggcatggctggtgcccagggagcagaggagcattttgaggtcggaaagataactgtggttgatgggaaggcaggttcaaagccctgggttcgaacaggatagacatgtggtctgataaccagtttttttgttgttgttgctgttgttgttgtttttttaagatggagtctcgctctgtcaccgggctggagtgcagtggcgcagtcttggctcaccctccgcctcttgggttcaagcgtttcttctgccgcagcctcccgagtagctgagactataggcatgtgccaccatacctagctaatttctgtattttagtagagacggggtttcaccatgttggccaggatggtcttgatctcttgaccttgtgatccgcccacactggcctcccaaagtgctgggatcacaggcatgagccactgtgcccggccctgatagccatttttaaaggccatctggctgtgagtgacaagtagaatgagtgaggcagagtggcctgttaggtggctattgagtgagtccaggtaaaaggtcccagaactggggtcatagtggtgggggttgtggggaagtgtttgtatccagggtatattttaagatcaaaccaacattgcaatacattgctaatgacatacatgtgggacatgagggaagaaattcaggagtgagtcctagatttttggcctgtgcagtggggagcaaaagtgatgacatttgctgagaaaagaagcagaaggttttggaggtggaaatccaaggctgtggtttggatgtggggacatgaaaggactcctaagtcatcatctccttccacagtgttgtggctgtgtaggaatggccacggtgtatacacgttgtgccaggcactgggaagcacaggtgattcagcctggctcctgccctgaacaggtgttcagttgacgtgttgagacaatggaggtggcataaagagctgttacacatggggtgagagccacta

SEQ ID NO: 103443 - DNA, 1049 bp, Homo sapiens
cttaactcatctccactgaagaacacatccaataagcaaggattcctccattccctctggtaaaggagtgttcactgcccactgaatgtggagtctccagctaccagcttactttctagtactgtttagcattgctgattgcaccagttaaactgtgtgctcagtttcatcaagcttattatagcatatctttacctataattaacaaatacagtttaattaattattccataaagcagtgaaatatgagtgcaggaaggaatgtttctataaaaaataataagttgtgtattttggaacagtagcctaaaagcaaattgccttaagaagagctgtcaaataagatgttggcaagacaactgaaaaatggcggaaaagataaaaataggaaaggaattctgtactctgattagtttacacatatcttttaagtttaccccacactatgaaagaaaaagaaaagataaaagtgtgtggcgatgtctgtgatttatgccaggaaggcaaggtaggattttcagacagcgggcatgtccttatagaaaaggcctttgccccataaccaaaaattgtccaataaatgcatgtttgtatgtgataaactaaagtgttcctagtttatacatgccttaatggtgctggtaagagcatgcctgtttttacccccatttaacagatgacagtgaggaccaggggatcacgatcttaaccaatgatgaagagacccagagttaataatttatattatgtttttaatcctgttgtctgcttctgtctttcgaatgttttaagtatacttttaggcaccttttcttggccccagtggctttctcattacaatcaggctgtagtgcctacagctgacactggtatttagaaggctctgatgttttcaagccaggctaaggccagtgttcctggcttttctcctgggagtaatggcttttctgttaaggcatcctttcctgtaggaggaggagctcagtgactttcctcacagactgagataaacgtcatgatagagataagccatcagatacttagaattt

SEQ ID NO: 103444 - DNA, 1071 bp, Homo sapiens
aaccaccgtacctggcctttctcctaacttctgatagttctttggcttgtggcagcatgactccaagtcttcacaaggcattcttcgtgtgtgtgtgtgtgtgtgtgtgcgtgtgtgtgtctgtccccaaatttcccctttatataagaacattggttataatggattcgtggacatttctactccagtatgacctcatcttaaccagttatgtcttcaacagccttatttccaaataaggtcacattctgaggtgctggggcttagtacttcaacatataaattttaggggtgggacacaattaaatccataacgctctgtaaggagcaaagtgtctggcacataggtgattgatttatacattcattgttcattgattgaatatctgagtgcttgagtcaggcactgttctagatactgagaataaggggatgaccaaaataaacagacttcctgatcttcagaagcttttattttaatggcagagatagatattaaacaaaaaatattatctggagagttctgcaggtggccgattctggggtccccaccgctacctgctgaattgaagggatccgggcttgctatctattttttatacaaagctctaaggttaattctgctacacactcagggttaagcatcgctgtcctaatgcactggcactatttctgtagtgatcaactatttcgttagatgcgcatcagggaaagtggatgggcaatgtacttcggttcccagcacagtgtcttgaccatcgcatggcaaaacggtcgcagatgcgcctcttcctcatggtagtcatgcagggttctgtcccatggtgcgctctgctctcattcgtggagggtgtgtcatcttacccacactctcctcggatctctgaatgtcattaagaaatgctgagagatctgggtcagcttggagaagcaggaaagagagaattagctgctagtgccagtgctgaaaatagaacttgagctgaggtttatcttctcgtctcctaagaaccactagaatggagaaattaaagacaataatgaggcttcctattctagcatcttcctagt

SEQ ID NO: 103445 - DNA, 1030 bp, Homo sapiens
ttgatggtagatagtactgggtgtttttcctagagcatcgattctcaaactccagcatgcatcagaatgacctagaaggcttgttggaaccccttcttctccccaagtgtctgagttagcaggtcttgggaggcctcagaatgtgcatttctaactactgtgtaggtgatgctgctgttcccaggacaaccctttgagaaccactgtccttaaggaatacgtagatttgttgcctttcctggaggcaacaaatctcatgctcctggagagaaggaaacaaatctatgtactcgttaaggacagtggttacattagaacctgcaatgtaagtcagtggttgcatcggaacctgcaatgtaaatcaatcttgaaaatagacaaaatagacatgggaattaaatacagagaaattagatcaatggatgaaccaatagagaagtgactgggatcaagagtgctttggagtcttgtttttcaatttttttccaaacaaattcacctaaccttagatgctgctgagtgtaagacatggcattgttttacataaagccaagaaatcttttaattaaatcatggcacaatttttttttatccctttgaatctttcttttatgcttattgaaagaactattttagacttgggtttttgtcatattttattgctatgcctacacataaagaaaagtataggcaaatatattggttcagatattgcaaaagcttctttgcttggaatctcactcttcagaatctgtttttcaactcagtgtcatctcctgcatctgtctacatcgtgccgtcctctgcatcatcatgagcatggagcatttcttatgaaaatcctgtgaagacgacacttaacccactttgcagctctgtggagctggcctcctcctggctctgcttctaggaatgttgctaaacacatctggttctccatttcttcctgcctcttcccacaaccatttggttcatagcggttaaaagaatgactcccttcattgtctccgggattttcactgaagcctgt

SEQ ID NO: 103446 - DNA, 1213 bp, Homo sapiens
ctgtaataaatgaaagctgtggaaatagtgtgggataactcaaagacctgaataattcagcagatacaatggagttggaagattctagggacttaaattcttctcccagctctgtctcaaaataactgcattgccttggacaagtcgctttgctttccataacttcactttcctcatcagtgaaatggggctgagcattgtgtggtattggaaaagaataactgaagtgcttagttccatgctggaatgaagtagagacgtgagcagtgctgtcttatctgacttactggtgggatcaacatcgctcttcctggagagagccaggtcatcacaagaaccataaattgtgcgtatcctttaactccatgatagacccttcaactcaatgcttttattttcagggaaatactgtctccaaatatagactctaaaagaaaagatggaagggggtggaacagactctgcaagaatctgttcatgacaacgctgttgaaaacagctcaaaattgaggcttcagcagtgcccagtgttgccaggtgtgtgttgtgttgtgctgtattgtgtgtgtttccaccacagagccctttgtggctgtgggacctgtcagacgcatgagacgtgtagctttctaatttatggggtgcaccatggtggcaagtgttggtgatggccacaccctactgttttgatggaaggacagtgacttggccaaggttttacagccgtgaaatgtctcagtgaggatttgagctcaggtttcttgtgcctgggtcctccttagtgtgggtcctctgctctggcaacaggcagagcactgctttagagcctctgcgtgtctggctgtggcctcaggggtctagcagcagtgctagagcagacccagcttgtcagatccggggctgcttagaggccacctaagtgattcctttggcagcaagcaacattcggccaaggacatagctggcgggggccctgacaaggggtgtgtgagtgcataaaggttggtgtatcaggagtaagtgagaaggaggaggccggctggaattttacccttcagtgcttttctgtgtgtagacagagattgggcggaggtaggtagggaccatgtgtaggtggattatcatcttttccaggcctcactgatgagtgtcgtgccttgcaacagtagtgctcagggaatcaggctcagttgcgagaggctcccggcagatg

SEQ ID NO: 103447 - DNA, 2164 bp, Homo sapiens
gttgtttcagccccatagtctggtattctgttagggccgccctagcaacatagtatgaggacaatcacctgaaggtatgaaatgcctcaggcaggcatgtaatgtctgtgttatggcgaggggcactcaggagggcttctggctgggctgggtatgagggtctctgtctacgcattggccaccacaacccccttccagagcgtcttttccccatagacagcctcagtgcccagtgcactgtcatatcccttagatttttcttttctctttccctccctccctccctccaatagcagctccatatcagcaactcctaacttctattcagtccgtggaggctggactcacgacagtgccaagcttggttgaaaacactcttttctcctctgggataggtgctttcttagtcctgagcctgacattctacacagtggccaagggaattttccctaagggtccttctgggtgatatttgggactggatccttctcagcagcttggacatcgtcagcctggtcaagtgtcatcctctctaaggccctggctcgttccatcctgtgtgtgtgcacagatgtccatatcctgggtctctgcttggcaattctgcagacacttccagagctaagcacactctggttccctagtttctctctggctttctcagatgtgcttgatattgttgatttttatgggggttctcgcccccagggccctcacagtgctactaaaatcataacagtgacatcagccacttgggtgtgtgggtcgactgtgggaggcagctccatctggaaactaaaaagagacacaaaatcctcttcttttgcttcccccggacttatctgtatctttgcaggtagacagggccaaatggagaatttacaaattgacacttttctaaagcagcttgatattttagaaagttcccttgattccaaagaactgagaccagggagtaagattggctgcaaagccagagcagttggagaaaggagggagcatgatgcgtgtgtgcttggacagtcttggttgttttgcatcagaaatatagccacaaaccccatctataggattttaggaacctaataaccacttccagctgttaacaccttgagactttctaagttacagtcaaagaggatccctggcaagctaacattgattttataaattttgttatagggaggttgaatgtttttcccattcacctggatactccctgtattttactaatggactcacagtaaaatgatgggcctgcttgtgccagggggcaggtgtggccccgggagctctccctttctcacctgacagatgcatctagtgtcagggcagtgagagagggaagccagcatgttttccccattccctcccacatctttagtagccatgatattattcagctagaattggtctcgcgtgccagttctggatctactgaagatgacagaattcttactggatgatggggtgatggttgctttttcaggctgctttctggtgacattctggaagacacaccttaacacatatatgttagttttctgttgctactatatcaaatcaccatacacttagtggcttaaaataatacagatttacttttttatagttctggaggtcagaagtccaaaatcagtctcactggactaaagtcagggtgtccatagggctgtttcattctgcagtggtttcaggatctgagatgtcatggattaggaagaatttgagattgtacctgcctgagggcagaaaagggccaattcacagggatttatgtgtctctgtcttttgacgaaaagaacttctaagaaggtaggttagctatgcaaatgatctgaggcccaggtatcttctgtctggatttgctgaatcatttcctttctttaaagcgatttagttgatttttactagaacctcttccatccccttccagaaggagaatctgaaattacatcaagttacttgtttaataattttattagttgtcctgtgaccaagactgacttaccccaggtaacacattgagttatgggccgagttgggacttgaacctgtggcttctttcctagccttgaagctcaccccttataccaggatactcttgctgctttctaggagctcccccttcctgtttcctcctctgcagtgcagatggtgccat

SEQ ID NO: 103448 - DNA, 1058 bp, Homo sapiens
caataaaaataaaaattagccaagcatagtggtgctcacttgtagtctcagctacctgagaggctgaggaaggaggactgctggagtccagaagtttgaggctgcagtgagctatgatcacaccattgcactccagcctgggtgataaagtgagaccccaactctaaaacaaacacaaacaaactcatattcttaccttttcccttctctgtgctctttccttttagtctggtctcagaggtgtttctgctcatatcatttggccataggtagcaggcagttttcctgtacagcatcctatgtatcggtcagctgtgggcagctcacctaacttctctccagtaaggaggtcggcctcattcctggtttccagggtatccttcagacccatggtctattcaatattttaggacacatttgaacgaaagtgtgaagaattctaaattgaggcgtagtatagcagaggattttaacacaggggttagaacccttgaaagagaccaatccattctaaccttcggatctcagttcttccctgtctcctatcctgctgcagaccccctggacgcttcgctccagcaggttacaaaacatgggagcctggtggccaccccttgctcttgcatagctcccttagcagggctcttctctctcctgccttgcttcaccttgttcacctggggaaactgctgtacctctgtgggattaagctggagctcggtgtttgtcaccctacaactgctcctataacacttggccctctcttgcttgcttgggatctatatccagcacagtgcctcgtacacagtaggggcacaataaatgatgagcgaatgatttcttacgtaaagatttgggacagtttactaccaaaggtcttctgcagctgtgtcatttgttgctttggaaatttctaagttttaactggtcttttgagaaaaaacatcatacagcatttatcgtgtactctaatgcccctttttcaaagtaatgacttcccattgaaatgtgcccctggttttaaagaattttgccatttccttctctaatgtgtagga

SEQ ID NO: 103449 - DNA, 1016 bp, Homo sapiens
ttcctcaggaagcagagataaagatctttgcaactgtaggaaccaaggcttagggaaggggctagggccatgtccatcctgtgttcctgttgttgatcttcattgtccttgatagcgcctgttgtttgggaatgggctttgcaggcccttaaataagggcacccagctctttgagggattggtggcattttcagtggaagtaaatgaaaagcctcctaatgtggctactttgaagcagaccagagtcattggatggaggaagtctggtgtgttataccctaactgatcatattattagcatatttatctctcatgatattgagcacagcaagtaaatttgattcctcatcttctggaatgcattagtgatagtttatatcccttgaaaggctgaagcttaacccatttcccatgacattgttcaatgtcccttctgtcaaaggagagagacctaattcaactcatgtctttttctcttccttctgaggctgctgccttaaaattggatggttgattgcagtcagtatctttggctgtgacttcatgtaattatttccttcccaattcctttccccattgcatattgccttttgcttaatctgcactttggtgttctatatacatgtgttttaattgtaagttaactcattttgggggagggcaggaattaaggtttatattataaatgaaacaagaattcttatcactatatcatcgtcagttcatcatctctatgcattattttatgatgacactacataaattggtttcttttctgaaataaaagctcattccaagaatgcctttttttgtggggaggggggtgacagttaatacctttgagcttctggatctttttacaaacattatcagacaagtaaagaaagctggatattatttctttggcaaagtagagaaagctgaggccaaccgcaggccaaggactcactcacctaatactatatttactcccttcctctatccgtaaccgtgtgtttgtagacttgataattatt

SEQ ID NO: 103450 - DNA, 1032 bp, Homo sapiens
ttctggttctgttctactgccctttcagatctactcattcttcttcagggcatccacaggcttcctggcccctcagctcccttttgtgaggtcttctgcagaagatcagccagaaggaaaggagggaggccagggattccccagccccgcccgctccccgaggctgcttctctgtgggcagaaggaacgaagcaatgaagaccacagctcctgcacacgacctttctgtgctgttcttgtgtctcatttctgatgtcctttctgggaccacttcaggcctagaggtgacatggtgcctactatcactaacctggggctaccgaagctcttgttgtttccgtaagccctgcttttcttttttgtttcatgaatttactgcataatagataaggtgatttcagaagacatagtatagctgaataaaagcaaggcatttgaatgcttaatcattattttcctgtagcgaaatatggtctgaatacaaggacttttaagtagattaattactgattcagtgactatatctaaagctgccttgtttgtttttaaaacgactttatagaggatgaaagacatacaaaaagctgtacatatttaatgtgtacaacttgatgagtttgcagataaatgtacactggtgaacccattaccacagtctataatccatcacctctgtttcctgctgccctctttatttattattagtgatagggcttaacataaatctaccctcccagcaaacttcgaagtctacgatacagtattgttaactataggctctgtgttttgcagtagctctgtaggacttactcatcttgtgtaactgtaatattgtaccctttgaataatacctccacatttcttcctccccccagccccaggaagcaccattctactctgttattacacgctcttcaaattacccagtttgagtatggcatctttttcctgctacagctctgacgaatacaactagccattccctttcctgaatttaacagctctgacgaatacaactagctattccctttc

SEQ ID NO: 103451 - DNA, 1033 bp, Homo sapiens
cagggaaggactcactattgccatttagcatacttgctataatagaagtatgtatgccggtgttcaggaatccagaaaaaggggcacctaagtatctggggacatccaagaaagctttcatggaagaagatgcctcctgggctgaatcttgaagcatgactaggaataggccaaggagaggagtcagaagaccacgcttgagtcctgccattgttgggctctccaggaagcgatggtcaaggtctgtgtgctgagatcgtatgccagatgtggtgttagggatcggcatgtttaacccaatcagtcagatgatcccagtaggaaaagcaacacagcaagtctgaaacactgtatcataccacacagtgcctcagctctcaaatttctctattggcttttgagccctgcagaaaatcagctgtgtctttctacattcagggggtccttctccgcttctgtactcataccttgaggtgctctcatctcatcccccgcctccttccatgccctcatctttggctctcagtgattctgtattaatagcagcgattaaactgcctcatctcatcagggaggagatattaatcttcatcaggcccaaggaagagcttaattttttcctgctcttctcctctccccaggctgccccactgagctcaggcactgtcagctgcaccactgtctgtgggacatttagtgatctgcttctgcagatgcgtttcagtgagttcacttctctgactccctcccttagcctccctgcacccagagcttcacaggctgttattgaagaccactgtcaggagagggagagaaggggaaaaatactccctcaaatagaaattcccaacttcattgtcttgcgtggctgcagggtaaattagaccaggacagtaccgcagctgaaagctgtaggttttttggtttatgaaatcctattcagcccttggagaagtatgccttttttcatgctatgattctgcagttagctgtgaactgaggatgtcagatgcccaggggcaggaacaggaga

SEQ ID NO: 103452 - DNA, 1001 bp, Homo sapiens
gttattattatttgtttggatttcacacactccagatagtgaggactcacctttccgtagtcatctccgaatccttagtctttggcaaaatacctgaaatagagtagatgctcaatgaatcttgaagtgccagaaataaaaataatattagttactatttatggagcatttattgtacatcaggcaccaagtccttgacttgtagtaactagtttcttcctcagaactgtcctatgaagtaggtgctaatattcttattttgttttgagacggagtcttgctctgtcgcccaggctgcagtgcagtggtgtgatctctgctcactgcaagctctgcctcccgggttcacgccattctcctacctcagcctcccgagtagctgggactacaggcgcatgccaccatacccgactaattttcgtgctgatattcttattgtgcagatgggggaacagaggcacagagaagtttgaaaataggtaaagctgagattgaacccaggcaggcatgccttgtgtgatctctctaaggtttctttcatttcttaaatgggtatgattctagatctcttttttttctatgtaaggtcgctccctcctggttagttctccacagggatcaggtagagttggtcctctccctatgtgtgaataatgcctcacagatcctaggaaatgtactaggtcggaacttccacccaggctcagtgggctcggttgtgtcttttatcacttttcaagccatgcattttctttgcctcctgggatcctgtgccagttgccttggcttctgtggctgatggatgattggatccagcctttcagggcagattagggtcagcctgctccaagcagtagcgagaaccgggccctcgcctttcctttcctagaagctgtatctgtgagttaacgcttctcaaaatgctgcacttagctcacttgagcgcagtttgggggcagattggttcttggactcttcaaatccccagtgcagacatgaac

SEQ ID NO: 103453 - DNA, 1035 bp, Homo sapiens
gcttgaacccaggaggcggaggttgcggtgagccgagattgtgccattgcactccagcctgggcaacaagagcgaaactccatctcaaaaaaaagaggagagcacaacctgtagcttacaccgctgttataaagactaaatgacctgttacatccgacagtggtcatttaacaaatctttgtttttcctttcattctcatatttttctagaatcctggaaagtctcctgggagggatgcaaaaacgtcacccacctggtccagagagacccttgttttacaactgaggaactgaaacctagagaactgtgatataacgaagctcacagcctcagcagccttcttcaggcattagaaaggggcagggagagacttcctaacatactgcagctgtggtcataaatgcactggcacttccttgtgaatgcattggccatgtttggagaaaattaaattatttcatcaaaatgacctgtagtgagaactttaaagaacaaagaggaaagggccatcctctgatgcagagtttaatcactttcctaacagatatgttggatggggctgtctaagtcccagtcctccttttaaatgctgtgtgtccacattgagtcacttaacctctcttaccgcaaattgactctgcgtaaattgggggtgctgttgagggtttttgcaagatgaaaacgagtccatggtgcctagcatgaattaggtttgcagagtcattttgtctcagcagctgctttggatatgttgactgtacttctggaagcaacaggtcgctcaaggagtcaacagagttgaatatttaaagctacgggatgggaggtggaagtggagatgggtgcatcacgaggtctggagattgagaccatcctggccaacatggtgaaaccccgtctctactaaaatacaaaaaattaggcaggcgtgatggcgggcacctgtaatcccagctactcgggaggctgaggcaggggaatcgcttgaacccgggaggtggagattgcagtgagccgagatcatgccactgcac

SEQ ID NO: 103454 - DNA, 1028 bp, Homo sapiens
gagtctcaatctgtctcccaggctggagcgcagtggcacaatctttgctcactgaaacctctgctccatccccaggttcaagcgattctcctgcctcagcctcccaagtagctgggattacaggcgtgtgccaccacacccagctaatttttgtatttttagtagagatggggtttcgccatgttggccaggctggtctcgaactcctgacctcaggtgatctgccctcctcggcctcccaaagtgccaggattacaggtgtgagccaccacgcccagccttaattttaattttaacctgtgtgatgactatatagctgggctcactttatgataattcactaagtatttcacttaggacttgttcatttttctgaatatgttattttagttttcaaaaaactatgcaaatcttgatggtagcagaatttgaagtgattttgtaggttttgcattgtttttagatgagaggaattttcttaacctttgggatatgtgaatctatgtcattgttgggctttgaagttcaaatgctttttaagaatgaaacttttctttagagatcattgtttaacacttctatgtaatgacattggcttttttcctttctgatataccatttggacagatattcaccctatgagagtggatcacagcactgatttcaagatctgaaatttactcataaaaaccctaatctgtatgagtgttttcatcagttggaaacaagaccagtattcttaccagctcttgcaatgacacggctctaattaatactaaaacaatattactgcttgatattgaccccaagccacattagataatattctcctttgtgttattcaacaaacatgcattttcataaaatccttattcctggaaatggaaaaaaaaaaaaccttttattattgtattgtggaagatatagaaacacaagaaggaaatgtactatttaaactataacaataatggaaactgtagcaatcgtttctatttatcgcatgttaaaccaagattggctgcatctgg

SEQ ID NO: 103455 - DNA, 1032 bp, Homo sapiens
ctttgggaatggagaaagcgggtctctttagctcgcccttccacctctagcacctactgtagtgccgggagaagatttggtccccaaatgtttgttcaatgaatgagtgaacgaacacatgtgccctcctccgactttgagtactgacaggtctcatcattgcctcctggatccactgtggactccttaccatgactctggggtcttccacaattgttttttccccaacctatactgtctgtcttcagggtataataccctgttgaactacctgaggaaactatttctctgattcttaattttcactcttgcggtcttactgcccactattcagttcttttttctgtaaccctccctcccagccaacaccttcaatgcccatattcaatgtcattttcccctaatgccagatcccatgtggaaacatctatgaccagcagtcatcaagagatattttgcttgtttgatgtctttctaaccacttacctatgagtttcttgagagaaggaagtgttttattcgtcgttacactcccagtgtctaactgagcactcgctcctaatgtgtccttagtgaatgttccctgggtaggactgtggtattgagggacacaggaaccgctggtagggaagggctcttggtgctgtgagcatctgtgatttttgagacctgaggacgtggctcctttcatttggtcgtgatgttaattccgggactggagtgaatctgctcaactatagccccatttgaatttagagcatacctgttattttctatcagaatcaccttttctcagagcccagtgggttttattgtgggatgtggttcttcttttctgtccatcaaggagatgtgttcggctattagagacttatcagcatgtggaaaaagggtgcttttcagccgttcagaaaactcttcacacatgctgccctctgataattcataaccagctcggtgcaaaggtttcccattgtcagggaggcagtccgggacaatgtgggtgttatttaaaagcaaatgtcttcagag

SEQ ID NO: 103456 - DNA, 1028 bp, Homo sapiens
agtttcaggcttgcatcctgtcctcaccaaccccagtagaaagaggattttttccttttgctaattcactaatattgcctctgattgaattgcctgtggtaactcctcctgaaaccagtcactgcggttatgggaggggagtgagggaggctggtacttttttgttaactttaagccctgtgcctatttctggtcacaggatgatggagagttgcttaaaacacgctgggtgagattgggtgactgggatggccaccaaaggcaaatggcatggtttcccaaaaggaagagattagaagttgatctggattatggagaattcataactgtctgtgtttatggttagatgtgttgatggtcaatttgaaggcagcttagaaccatcgtggccggtggagtgaatgtgatcactaactttgagcaatttcaccagactggcagatagattatgggaaactggaaagatcatgaaaatactttgaggcaacatgacagactgggtgtaggtgctgtatctatcaacatgatcctttagaatgaaccccacacttgggaccaaatcacgagctgcatttagtaggggctgggtgatgtgggcatgttaacacagtattttagctaggatgacagaggcaacagatttctgttactgagtgtcagttagtgtgcattcgggctgccgcatttgtatttgtggactctatgctgtaaggacaatctagatgaggcagcatgcttaggaaaatccaggtgagtgacagtgcccgttcaaatctggttatgtaagaaatggtgggaagaattgaggatgtttaccttggagaagcagaggctcagggtgtacatgctcagcttcagcaaacagacaaagggctgtcccctgaaagaaagattgggattgctctggtggccccaaacctatggagggacgtggcaaggagccagatgtcaagctcctcataatgaggatcatgctgaccagagctggaatgagctgcccaggaggtggtgaaatacctggcatgaaa

SEQ ID NO: 103457 - DNA, 1689 bp, Homo sapiens
actttgtcgataatgggagaaaaggttgggccctggagaaattactgagctattcatggagccatatgtttcaagagttggtccatcttttcattcatttattcacccattcaacatcgtggtggtggtggtggtggtggtggtgttttttgtttgtttgtctggtttttttgttttgttttggtttggtttttttgagacggagtctcgctctgttaccaggctggagtgcagtggcgcgattgtggctcactgcaacccctgcctcccgagttcaagtgattctcctgcctcaacctcccaagtagctaggactacaggtgcccgccaccacactcagctaattcttctatttttcgtagagatggggtttcaccatgttggccaggatggtctccatctcttgaccttgtgatctgcccaccttggcctccaaaagtgctgggattacaagtgtgagccactgcgcctggctgtgttgttgttattattggatgcctgcactaaacttggtgctgagaatatggagataacagatctggagattcacaggatagcggaggagacagataggctaagaaatgatcgcggcacgttgcgatgcgcgttgtgatggaggaaggcagggtgctgtgggagaggtttgttggagctgtcagacctgggctggggatgaaagatgatcagttacatgaggggccgagcgcagggaggcaacaaaggatttgctctccccaaacaaataaaaacaaatgatgatccctgctactttccagaaatcagtgggaacagcaagactcaccatttttctagccagccgtttcaaatacagtgcaatgttttgcctgtgaagatggttttctaggcttcagagagagagggaacggcagtggtgaagagctgactttatttttatttacccccacacttgaatttcagaaggaagatctcaaatgaaaatctgtctcaaggaagtcacaactgtgtttttaaacgtttcctttatgcataattttattggcagctcaaggctaccttttaattaggatctccacttcactttctgagatttgccttgagttagctagactgaatataaacaaggtgaaactgtgtgcctgtctagcagggagggctcaggatgctcagcccagtgccgaggccaagtgacacacccctgtccctgttcccaccctttaggtgcatccctggaacagtcagaaccttcatctaagcaggtagatagagccaattatgccatggcagtggatgggaagtttttggaaaagggactagagagaggaaggggaggtgatgttggtcttgatgtaaggaaacattctcccagagatcatggaaaagccctttttataaaagaagttagaggtaccacccgtgctagtataggtttaataagtagaacattgacttttaactaagctggtaataataataatggtataacaaggacagtgatgacagacactgtgattctgtcatcacagtgatgacgacagtacaaacaactagtattttgagtatttctacaggccaggtattgttataaggacttctacatatgtttactctttcttcacaatgattctttgtgccaggtgcgtttaatacacctgttttacagatgggggggatgaggcagataagcttcagtgatctgcccatggtccc

SEQ ID NO: 103458 - DNA, 2036 bp, Homo sapiens
ttggcctctcaagtagctgggactgcaggcatgtggcaccacacctggctaatttaaaaaatgctttttttgtagagatgaggtctcatgttgtagcccaggctggtcttgaactcctaggctcaagggatcatccaatctcagcctcccgaagtgctgggattacagatgtgagccacgacgcctggccattgattgtcttaagcacagatcccatcattcctgctcggaaatctcgagtggctccctagggactgtggaaggaagttcagattctccttcactgagcattcaagtcctgtcccagtcccattatctgagtgttctctgtaccttttcttctggaaggagcggttggttgccacactgtgtggttccagcctttcattttttctaatggttctttctgccaggaatgacttctctctccttctcactcttttgaaattgtgccatcttctggctcagctcattttttcctgagaatcatgtgtccctggctcccaacttatgttcatgtttgtggtgtttgtgtctgcctgactatcctgtacactctcttgaggcccctcaagagcaggggcccatgtgctgaccatctctgcatccccattctccagccctggacctggcctagcatgtaccccagtcagtaggtgccttgtggactgtagtgaatggcaaagcgtagagaaaaggtaaagcaatagctgtcttccctgtatcatttggcaccagagatatttgtatgaaatctccctaggccttggaacttggaagaacaatacactgcacgttagacaagtcaggacccttcaacactaagggatgccagagtgcatttcccagtattggtccttgtgaaatgcttatgtgtatttgcttaagcagaatgaaaatgtgaggcctgcctgcttacgtcgtccgtttccagaatgaaaatcggaagaacaaagatcgaaatactccaaggcagggcttcataggtagtcccatggatgtgattaagggctgatttaacattcagaagaaaaacataaaaaccagccttcttgaagctgtagtctgaccttgggaagaatgtatatcctcaggaaagataaatttgcgttaaagacctctttggcaatgcattgttgaaagaggttaatattgtaagtggaaaattttgattacttctcgattctttcctcccatttgcttctgtacctgtgtcaccccagagagatctctatgctagaagtaatgtccacaccacctgcctgcctgtggctcaattaaacttgagttcctgcccttttaaagtacaatccagattgtgtgcaacaatacaaagggtggaaattaagaaaactcattgggatgcagatcagtgcacttcacttccccaagccaagggagatgactctggaggaaaagataaagatgaccacagtgaatttgcaggtcatcttttgtgcatgtgcttggttgaaacatccttggaacctttcagtgagggaaaggtcctctctgaagaagtgcttgccttaaaccaggttttctcagtctcagccttattgtcatttggggcataatccttctttgttgtgggactgtcctgtgccttgtaagatgtttattagcattcctgaccttgacccacccgatgctggtagcatcccaccctcctgagtctttttttttttttttttaagacagtgacttgttctgtcacccaggctggagtgcagtggcgcgatctcggctccctgcaacctccacctcctgggttcaagtgattctcctgcctgagcctccccagtaactgggattacaggcatgcaccaccataccagctaatttttgtattttttagtagagatggggtttcaccatgttggccaggctggtctcgaactcctgacctcaggtgatccacccacttcagcctcccaaagtgctgggattacaggcatgagccactgagccccgccaaccccccagtcttaataatcaaaattgtcttcacattgccaaatgtcccctggggtaaa

SEQ ID NO: 103459 - DNA, 1046 bp, Homo sapiens
atcagaagtctcaaagatcttttctagttcctgcttgaaattgggtagaagataataccagctgttacgtggaagtatagcatgccattcacttaacgtggaatgaagcaaaacattctgagagggaagacctattacagtgcatgtgtaccattatcttactttttctttctttttttttttttttttgaaatggagtctcactctgtcacccaggctggagtgcagtggcacaatttcgcctcacttcaacctctgcttcccgggttccagtgattctcctgcctcagcctcctgagtagctgggtctacaggcaggcgccaccacgcctggctaatttttgtattttttagtagagacggagtttcactatattggccaggctggtctcgaactcctgacctggtgatccgcccaccttggcctcccaaagtgctgggattacaggcgtgagccactgcgcccagcctatcttactgttaagctgtaatggtgttataggcaggacaggtatttggtactgaggaaggctcttcaaggatgtgagaattaagctgagtgagacctgagggaaatgccaggggaccccctcaggaggggaggctctgaagggaggagaattctcggagaccctctggagggagtagggagagagagaggtccccaacctccttctgaggcacctctttataaggttggaatattttgtactgtttcctatctcttggagagaagagtccaccctttcccaggtaacctgtctcagctttggagaggctgagatggaattccagggaccaaatctaattaattcctcaaaagagaagtgccttttgggagtagcaatattgaatctcactttgatagctcctggtggagcaatttggagagaatatattggggatgcttttttccaattaatatgcttgaataagaactttggtgctcctttgcagtataaaatgaatgtatagtaaaaataagagcctttttcttctaagaagggccttattagaacttggaaagccaccttccctgtcttccc

SEQ ID NO: 103460 - DNA, 2782 bp, Homo sapiens
gtctgggcgatctcagggttcccttctttcttccctccctcctgagaagaatcagactcagacaccatcttttgtggtctagtgtttgggaaaagacggctgcacagtctccaccagcatttgcaaattattcacaaattatatgcacagacacatggggcccaactacatacgtcgcagacttgaatgtgggtcctgggaagcttctggatatgtgagtttgggggttgggcatcccatctagcataaacttaccatcttcatgcttgcagccttgcaatatacaggccctgttttcccctcaacattaataaactttattttccctgcagttgtaggagacagaggctctatagaaaacttacaaatgaaaacatattcttttggaaaaaaaaattatggttatcaattccttctttattagttttcttttatttttagatccatttgcatgaaagcaagagattctcacaccaccccctctttgtatgattatgacagagaggcaataagaggacagattcttatgaaaaaaaaaaagttggggggtgcttgccttatttgagaaaacagagatctgcagtgatgaagctacacataccacatagcttaagagaggagctggaaaaagttctatttagggagaaggatttttcctgtgttcttgcgggaggtaggagggactctggaagtgacagtagctatccgtattctggaataaaagctgttctcctgagaaaagaagcaatattcctcacttctcacagcctgtgccgggtttcaggtttgggagtgggaattggacatttgaacctttcatttcctaaatggatttgcaataaataaaactagagttaaggcctcatttcagtaaacatgggggagctgttggaagctgctgctccctgtttcagacgattatctcccactcagtcctggtgggcattatgtatgccaggtgggagcggagactgattttgtccttcctcattgaagcctggaaaagtctagtatcttttatcagatgtggggtggttggctgtttccttttctcctccagccatgatatttttaaaattgacagccccgttgtgatccagggtgatgagagagagactgacattttaaagtttcagaacatgtttttcagctcttctttggattgctaatgtgaataataatgccacattgaacacttatcctgtgcgatgctgtaggagtgtggtaaacatctcataaatcttcatggcactgctcgctgcagcatggccagtcgtggaactccctgcctccgtctcctcctctgggcacgctcagcagctttcgctgtttgggtggaaagctgtttgtggatattaaaggagatggtacttggtctagaagaggtgctcaatgtcagtgtcttctttagcccctcccctggccccaccttctcctttctttttcccgtggctggggttttggggaagtccctgaacacagtgagaaaggggtctgttttctcctgagtaatttgaaaatcttggctaagaatgggggagagaaaggagggtgtggatgctactaggtgagggcttgggaactcctacatttcctatggaggaagagtttcaaaacttgtgtttttttgcttctgtgctttgtttttttttgttttgaatatgtgacttgattattctggtttgtaacgttgtctttaggaaatgaaagatgcctcattattttctgattccccaatatcctgccctcttaggggtttcctagtaacagattttcctggttagaccttgccctcctgtgttagttcattctcatgctgctaataaagacataccccagactgtgcagtttataaaggaaagaggtttaattgattcacagttcagcatcactggggaggcctcaggaaacttacagtcatggtggaaggggaagcaagcacatccttcttcacatggcgggagcaaggagaagtaccagcagggaaaatgccagacacttataaaaccatcagaactcctgagacacactcattatcacgagaatagcatgggggtaaccaccccttgtgatttgattacgtcctaacaggtccctcccatgacatgtggggattatgggaactacagttcaagatgagatttgggtggggacacagccaaagcatatcacctcctaacaagtataatcctaggttgtctgtggccatagtgcgttctgttttaccgaattgacgtctctgagtctgaacactggttctgctgctaagtgctcctggactctgaggctctgcatttaggctctctgggcatctatttctcacatagaaaagggaacagataataaaaaagcctaccctgtggggctgttgtgagtagtaaacgaggtaatgttatcaagtgcctgtcttagcatgcagtatgcacttcacaaataagacacataaaaatttctttttcccttggacacaagacttagagtatttttcctaggatgatggtggtagttgtgagtagtaatatgagtagcaatggcactagtgctggcagtaatagtggtagcactagtgctggtggtcatagaagtagtaagcctttggcttggcttccataatgaaagtctataatgatttctatataataatctctgctctttagcagcatttttccaacagaaatttatccataaagtgcccaataacctaatgataaggcattgttagcagtgagatattccatacaaatgaattttcagatgaagtggcacttttccctttaggcag

SEQ ID NO: 103461 - DNA, 2761 bp, Homo sapiens
ttttgctgtaggatgtatgtgctcgtgctccattttagagcagcacggaaagccctcctggaggattcctccggatgaaagatttagggtggggtcatggtgtctgcatttgcagcctgtgtcatggacccaatgaagctagtgaggtgccagtttttctttgtgcatattcttccagtgtgtcaaggagcttggggtgcagggacctgaatgattacaccatcctcttcagatcatatctttgaaaaacgtgtcaaggtcctatgtccggggtttggagcagcagtgccagcgtggaacactcctgttgcgaaaaagccatgtgtgttggtaaagatggagaaaagcaggatgtggtcatccagtgagcactccagtggttgctccttctgtcagctctccctttcaagccgtcgggatcccagaagctttcactgtgttcctttttaacttgtacatttcatcatgtaatatacatgtttatttgtagagggaaatgcagagtatgtgcatgtgtgtaatacctatactcactatttcagacattgctaggtactttaatatctaggtacttcatttgattgattgattgattgattgattgagagacagagtttcgctcttgtctcccaggctggagtgtaacggccagatctcggctcactgcaccctctgcctcccaggttcaagcaattctcctgcctcagcctctgagtagctgggcttacaggtgcctgccatcacgcccggctaaattttgtatttttagtagagacggctatttcagtagagacgggttttcgccatgttggccaggctggtctcaaactcttgacctcaggtgatccacccaccgtggcctccctaagtgctaggattacaggtgtaagccactgcacccggccaatgtctaggtactttaatgtgtaggtacgatagcatttattgctttacgtaattcatgcaacacctctgtgcattaggattatgatcctcattttataggtgagccacatgggagtgaggcgaggagggatggttaggttacggttgtaaatggcaaagctgagataagactcaaaatcagtttatcttcagaaccattttgcaagtaagggaggatcccagatctcaaagtgcctgtatcagttaggatgcctttgtgcctttggttgtgagaagcagactctacaaactggcttatgcaggtgagggaatatactggaagtttgccataactgagaactccagaggcagaaccagcttaggggagattggtcagggctgtcacttgtctcctgcggtttcctaggctctgtcctcttccatgtgcttctcctctgcctccaaccaccgttggctcctccatcattggagtaactctggctcatgcccattggaatcagtcactatggcaagggagctttgattgtactggttgtgtaggttaacacgatggttttacacaaccatctgtaaaatttgggatggtgggatacctccccagacccagacttctggacaccctagatcgttttgggaagaagaaagaggagaaaatacctgtcaacaatgcccaaaggcagagaaaggtggagctaagggcttggtgaaggggagctgagaagggaggaggtgcaggctagggaaggcgaatgaactggctggaggggtgcccccttcttgtctttttcctctgcttgcttctgtgccaacttacatacctagccattcacgggtccatcaccctcttctgtccctgatgttctttgccaagctcccactctctttaattaacaactttggagatgcttttagaagagcccaagtctggccaggcatggtggctcacgcctgtgatcctagcactttgggaggctgaggcaggcggatcacttgaggtcaggagttcaagaccagcctggcaaacttggtgaaccttgtctctactaacaatgcaaaaattagccaagtgtggtggtgtgcccctgtaatcccagctactcgggaggctagggtaggagaattgcttgaaccagggaggcggaggctgcagtgagctgagatctccagcctaggagacggagcgacatcccatctcaggggaaaaaaaaaaaaaaaaaaaaaagcccaagtcttactgtgtcacctttaaggtaaaaatctcccctcctcctccacctggctctgtttctttgcattttccaaggtcttccacaagagggactttgctgttttctttctgcagtttctttaatggtgtgttggtatggtgcttttggtgggataattttacttggaaaataatgtttctgacccatgtccttctttgattgattttttaaagatttatattttgcttttcttacgagtcttctggattattttgggtgtttctctcttttttgttttccctgggaatttgagtctagcgggggctcaaaagaggttcatttcgctagtggctttgcctggtgtcctcccagtcagaagtcggcgacgctggtcagtggtgcagccttctctccaaactctgtctgccttcctcttttctgatattctgaatccctagctgcgtattctccacttctcgttgaaaccaactcttagaaaaagggctgatgacatgttaaattagctactttgagtatgtatgtgtatggatgtatacccgagtaatactcaaactcttaatttgttttaattattatgccttgattaggttatttaaacttcagaactcctgtgaggtacatacaaa

SEQ ID NO: 103462 - DNA, 1020 bp, Homo sapiens
ttacttgtcaccttacctactgtatatctaagcatattgtccatacaaagagatcagtgcaggagatgtcctgtgtccctgtcttcataaccagaacggggaagaaaacctcctcctgtgagttccccgaaggttaatttaaaatattcttttcatttggctttaagattactcagagccatctttaatacacaattagggacataaccattcctaaaggtaggtggcagctgccttcattcacctgccagtgataatcaaaggaagactcccagcctgtctagtctggaacattcagcagggcctaagagctcttctctaagtgatgatgggactgaagccatctctgtagtgcttcccttgctgttctgagccatttgcagtgggaataagtgcttatggagtcagcagctgtgagttgggggaggcaaattattacttttatttttggctctgcctggggtcagaatttcttttgtttctgatttaccttttatttgagaaacttggcatgatacctgtgttcagaggattcattagtcatctccctctcaaccaaatcattcctttgcacatgtgattgttaacccctcttttttttttttctccagagttagttatcaggcattttttcagaggactttcataaggtagtctgaacaaatgaagatattattttcattagtaaaaatagtaacagcaaacactaggggtgtcagacagtgttttaagtgcgtatatagctttactcttttgatacaacttatgaagtagatgccataattatcttccctgtgttacatatgaggaaactagtcactggggaagcggggggtatcaggtaatttgtccaggtacctcttctgatcttggattttaaaaggagttggaacaccaaaagcacaattcgtaaaacaaaatggatgaactggaattaatcacagtttaaaatgtggctttgtaggagaatctgttaagagggtgaaaagagacgccactgactgggagaaatgtgtgtaa

SEQ ID NO: 103463 - DNA, 1017 bp, Homo sapiens
ctgggagagaactcttgaagcttgagcctggttccctccagactttgcctcatagaccttcttcctttgctggttctactctatgtccttttgctgtgatgagtcatagccatgagatgctgtaagtcatagccacatctacatgctgagtctggcgagtcctcctagtgaattgttgaacctcacctcctctgcatttttggttgttggtgttgttaaacagccagtcatatcatcttacggagctatgaattccattagcatttactggattccagctatgtacaacatacttgtaaaactccagtttgccttagaaactgagtcaaaccaccaaatgtgtccaggagtaactcgttcccaagacatttccagatatcaggcaatatggaagctacagagatgaagtctctgaagctcaattgagataggaaatgtaagttgtatagaagttgtatagaagcagaacccctagaacattgagggaaatgagtgctctaccaattccataatgtaatagtagcttttattaagaggagggtcatgaatgctgtcttgggggagttagagaagtgactttaaggcattggtggactttgctggtgttgagaaagaatattttgatcttccttggtatccgtcgtcatcttttagctttcatttgtgtgttgatctatccacccatcttcctgtccatccaattgtctgtctacccactcacccacccatctatctgtccagccttgccaggcagcttgttacattcatgagctttgattatgtgttaggctgtgttcaaggcactgaagtactggggtgaattgagtagggtccctgccctcttgtgcaaaggaaggatttggttgggtgggagatgactaatgaatccgtaccctggtggtattgtttagggagagggagatagacctgggaataaatatttattcctagatagaagtgcacaattctttctagggatacacaggtacacatgcccaattcaccttggtgggttga

SEQ ID NO: 103464 - DNA, 1059 bp, Homo sapiens
ggtggcttagaccaagtgtagtggccaaagtgttgggatatagtccaaatccaggtgtgtctttaaggtatattcagcaggattttctgagatattggatatgagactaacagaggaagaagagtcaagggtgtgtctagttttttatttgagcacctaaaggaacgaagttggtggagttcgggagctgtccatatattctaactgggaagattgcaagagaaacaagcttgggagagaacattaggagttcagtttcagtcttattgaatgagtggtgctttttcgatatatccaagtgaatatattgggccagacagtgggatatgagccaggagttctggaacaaggttagggtgggagatacagattggaggttgctggcctttgcaggccattgaaagccgtgaacctgactgggatcagctagaaaatgcatgatggtagagaagaggaggctgaacttgactgcactctctgcatgctctggaaaaataaaacctgggttgcactggggacattgggggctagttcagtcattttttagagctggggttttgttgttgtttttgtttaagccaggcactttagtcttaactttcagggaaaatcaaagtaggttgttcaaggtacccaaaacacacagatatgcagctggctttctgcaaagtgttcatgtgaagaggtgccaggtgtgtgcctggtaagtgtgtgttttactgagcagcagggagctgaactgtggatctcttgcagcctcccttttgatatgtgcgtctcaagcagtcaacctgcaaattgctttgtattcagaaggtgccaaatacatgttcatggaatgaatggataaatggtccttgccctttgtgcctgaagaccatggtagaaaggtgcagtttattattttattgttgacttctggtttgaaccaaagaggtttttgcatatacgttggctattagagatcaagtctgcgttcaatgttggagatttattatattttggatagatagagggctctaaaggcaattcccagagaaatccaaaactattgtcaac

SEQ ID NO: 103465 - DNA, 1080 bp, Homo sapiens
gttgaatgagcaaataaactgtgaagaaacttcttgatctttgttggcctggacagctgttgaggcttgactgtgcttatggaatgaaatatccacacaaagggaaacttggtaatagcccagaaccccaaggggatcattgcagagggactgatagatggacaggatggcctggtgaggcctgcgccatctgtgccttcaacccggcggatcaaagatgaatgtgtgattgagtgaggcctcactgatgacaatgcaccctggctggaaaatgcacagcaggaggctctggtttgaatctcagttttcctaggagacctgaatgaagagaaaaggcaccgcagtatgcaaagagagagtcatcacttgtgcatgtgtctgggggaagtaacgaatagaagacattacatgtcaaaaagagcctcgtccaaaatgaagccaagtgactgtcacaagttctgggcaggtgagatgctgtgtcagaaccgtgagaaggcaggggaggccaggcacaattcccaatatgttttagagcatacctggagcttagcatagccctaacttcatggtccagccctttggggcatgtgctcctggaaccttagctattaagtgcccttgagtgggaaaataaatgagtttttaatgtctgtgtgtacatgttgttaatcgttttctgcatttgccacctgggttgaacctgtcaaattagtttccagtagtcccttttaatgcattgttatatacccaaggtggaaatctcagtcatccttagagactttctgtagccaatttcccctttccttgttcctctcttacttaggtcatgcaattgagcgctaagcccgggtcagcccatttcctgtgttctggtctttttctttccatttgtcacagttctgggctgggctcccattatccctggcctgaagtatttcactagctgatgctccggcctcctccttcctgtgtctcctaatccatcattcttatactgccagaatgacttttctaaggctcagagcagctcatgacattccctgctagagcctctttgattacttcttcttgcctctagaa

SEQ ID NO: 103466 - DNA, 1029 bp, Homo sapiens
tgagactgcacactcacagggctctgctgagccgtctgcatggatgtgaatacatacatgccttccggtgtggttcacagaaagacagagttcagatccttgctacaattctctgctgagaactcatggccaggcagtctcttccctgaagtggcaagcccaggtgtgtgagtccctgggctgggttgatagacagatgtttgcactttgcacactatcagattactaagaatggttcttggctgaagagtcctttctggttgtagaagccaccatcaaaagccagtccctcaaccacttattttaaaacagatgaaggcaacccagtgctttttctctgatggcacattctccccgcatgaggaaaggaacataattggaaaatgggcaatattcacagaacaattactgtgcctcttaatgaggtttgcatgaaggcttccagtgaattaatgaagagcaatgattttgccattcacgttgaacagctggacaacaatgataagggtgcagactgtgaggtctctggcttagacgaggtgatgaggaccggaggaagttctagcttctgcccttcttcagttctcctttggtctcactactgtcctgggagaaactgaacgtgctaggctgccagactgtgccgccccaacaaaaagtgagaagaaccagtttggctgggctgtgggcttgcatcttccttggactgtttttctagatatattcagtggcagatcattaaatctcctcctttactgggctattcttattaggaattatggtgacttttggagggcagtgtgtcttgcggaaagcagcataccatgttgagttgaagatatgagtctaaattatggccttgtcgtttaatgtctgtgtgttccttgcacatgttgtttcgctgcaggcagggagctgcagtttcttcacttgaacaaaaggcgatcatacttacataggtgacctgttgtgagtatcaaatagcctgtatgaaattacattatgcatatgttagtatcagtcagggtt

SEQ ID NO: 103467 - DNA, 1098 bp, Homo sapiens
taacaaccaacaaaaatcacaggcaaatctgctttgttttcattgttcggtaggtatttgctgtgtatcatttcttctggtccatgaagcacagcagggcaggatacagagaggctgccctcaagaagcagaaggaacaattttaatttattcaggagggaaaagttaggcttttacaggctatcaacaaatactgattgggaacctccctttttctagggctcttctcagggccacagtcccccttctttctctcaggtcagttacaagctggtgcagctgctgaatgaacttcctcccctcctcttttctccctcttattcttccttccttcccctgtcctatatttattcagaaaatattcattgaacacctacaatttatcaggctctggaaagacatccctgagtgagttgatagggttcctgtccttgtagagtgtatgttctccttgcagcgacagactacaaacaaactataagcaaatacgatgatttcggattttaacccatgccctgaatcaactgaagacagcagggtttggtaagtgacttgagggggcacagctggatgggaaggtgtgagtctcaagaagccctatgagaaggagctaccatgtggctggaggaccagtgcctaatccaagggtggagacatgaaccatccccatttttacaggagagaaactaaagcatagaacctgtccaaggttaaattagttgtggatctggggtctgaacctaggtcatctgcctgtaaaggcccttcctccacagtgtgaagctgcctgcaccaccatgctaccctgttcttccttcctctcctccccctttcctccctctcctccccctttcctccctccttcagcttctccatctatcatgagtggataatgattttgtcctaccttaccgctgacccccttgataatattgacctagcggggaagttgtaaggcataactaataaaaatgacaatgaagcatttgccaacagaaggtgtactactgaatgctaatatcggtgagagcctgtctgtgatgctagggcagatttattagacagctgtttagccagcatgagtttccctgcccccaa

SEQ ID NO: 103468 - DNA, 1046 bp, Homo sapiens
tggacttcccccttgctgttctcgtgataatgaatgagttctcacaagatctgattgtttaaaagtgtatagcatttccccttttgctctctctttctccttccaccatgtgaaggcatgcttgcttcccctttgccttctgccatgattgtaagtttcctgaggcttcccagccatgcttcctgtacagcttgcagaactgagagtcagttaaacctcttctgcttataaattacccagtctcaggtagttcttaatagcagtgtgagactggactaatatagtaaatcatggacttggggaaatacatataatgaagaaatgttggtcaataaaatgttagcaaaactcaatcgggcatgtggcatcaaccttttgggtctatcattttctcatctgtaaaatgaggataatgatatcagccttaaaggattgttctaaggatgtgatgggataataatataagtacttaccatgatggcttgaagttactgagcactcagctaatggcaataattactattaactggtagacacttaacagggcaaatgaggaatgaaccatcactgggctgtggggtggtgctctcgggtaactgtgaagccctgtatcgagacgtgccctttaaacaggacagcatggaggaatgaactgcagatgactcagttcgaacaaagatatcctgaccccaaagggcagcagaaagagctctctccataaatgggcctagctggaaaattcctcactatctatggggaaggcacaatgggcaggagaagtcattggctgtgtgcagatgcatctgtctacagtcacactgtgtatagggatgagtcattgctgtgtcctcagatgcggagggcaaggacagggacaaatcatgtcgtcggacctatctgaggggtgcgtgaggctgtgttctggaagtgtggctggacctcatttccttttccagttacaagttccatgtaaacttagataagctattgtaattattttttacttcctgatagatagcaagatggttaactgagatgaatattta

SEQ ID NO: 103469 - DNA, 1049 bp, Homo sapiens
tttccctccttttggtcagcgtttctccttgctgccaccatgtgaagaaggacatgtttgcttccccttccatcatgatcgtaagtttcctgaggcctccccagccaccctgaactatgagtcaattaaacctctttcctttataattacccagtctcgggtatgtctttattagcaattacccagtctcgggtatgtcttttattataatttataaattacccagtctcgggtatgtctttattagcagtgtgagaacagactaataccccatcccatatttggggactggataaatatccgtattctgaaatgaacaaactgttctctggaacattcctttacaaaggatttccttcataatgcaaagtcatttggggctcctccatagtgctttgtagtagaagccagcattctctgcagagcaaactgggggaattgtctgagaagctcagtctttaagttgctcatcgactgatcaactgctggaatgacaaatcatagcattttaagactggtccctggagatgaccaaattcacttccctcatcttgcaaataagaaaacaaagacccaaagtgttcctgggatgagctgtagtagaacatagcattatacttggcccttgctgaccacctgtgtctgtcccttcttccccaaaactgtgcaaaaatatgttgctggacaatagctgttattatattcagtgttataaactgacatttattgaagccatatcgtgtaccagtacttctcttgacacttttcttgtattaagtcatttcattttcattatagtcctatgagttacatgctactattattagaaaatgtttggactttataattggtcatatttttaaattctggagtcaccattttgtggttaaatataaacctcgtgtgtagagtgggggtcatgtggttccagcacaggtcctcaatgaatgtctacaggtgaaaggaataacatgaatgagtgtgtaagtgatatggtttggctctgtgtccccacccaaatctcttgtcaaattgtaatccccatgtgt

SEQ ID NO: 103470 - DNA, 3355 bp, Homo sapiens
cagctacttgggaggctgaggcaggagaatcgtttgaacccaggaggcagaggttgcagtgagctgagatcacgccattgcactccagcctgggcaacaagagtgaagctccatctgcaaaaacaaaaataaaaataaataaataaaaatgacaataattgtgcacaaagactgacctcacctagtgtgttagtttgctagccctatcgtaacaaggtaccacagactgggtggcttaaatgataaaaatatattctatcacagttctgcaggctagaagtccaagatgaagttgttagcaaggttggcttcttccagggcctctctccttggcttgtggaaggctgtcttcctgtgccttcatatggtttcccctctgtgttgtatccttatctcctcttcttataaggacactggtcattctggattagggcccactcatacattcccatcttaccctaataacttctttaaagatcctgtcttcaaatacaatcatattcttaggtactgatggttagaactttaacatatgcattttaggggaggcacagttaagcctgtaaccgagggtcactggtttgattagactttataattggtaatccgccattcagatgtttcagtattacattagtttcaaatctaattgaggagataatgtaataaaaggtaaacataaataaaagtcagctacctctacaggctgagacatcatctgcttggtgagcacagtgctcttggggttctggagttgactgccacccctgcactggggcatcctgcagttctcccgaaggatgaaggcacaggtgcctctgagacttactgaatcactgtggcctgtgtttacccacctgagggcagtcaccacacctcagaccagatgggcccgtagtgcctgccaggccatgtctggcccagtccaacaacagtcgtctaataacatttagcacttattgagtgcttactgtatactggacatagatcctgggcctcagtccagagttccagttaactgcatgtgccagaccacacagcatgtgccagagtcagtgtcaggctctgtgctctcttgcctgctgagctggaccggttcccagggaagatatctttttgctggcagctgggagccccagccagtagcaagtctggggctgcagcttaaacagcctatgcacagtgggtacagtcagctgattccgagccctctggggttgccgcatcttaatcgacccttcctgacttccatgctgttgaggcctgtattggagggtccaagccacagcttgcgtgaagcctgggggctctgggtccaggctcccttggtcactgacagcactgacagcactgtcccttaacactgacagtgtgttaaggctcgagtttgtcccatgggccctccagttgtgttttggacctctgtacctccattccctctcagttctgttcctgatctgtcttgttctttagacagagctcacagggtacctcgggcttgggctttgctgtctgggacttttcaccgatgagaatgggactccatacatgagagaggaagatggctgtgtgctgtcttctggttctggagctcgagctaagtgagctctgcatgtttgagcttcctaggaatctggtcattatgactgataggtgccaggactcatgctgaaggtactccagtaagaaaagcacggtattatgggagcccaggaaaggggccactgactagaggcttccagggagatgtttgattcctgaatcttgaaagctgagttggtgttagctgggtgaaaggaagaagggagggctttgcagccagtgggaactgcaggaacagaaaggtgagaaacgtttgaggtgtgaaagagagcattattctagggctgttactacccatgtccagaagcttacgacttggaaaggtggagtggttgcctcgggattacgcctgggccaggctgggaggggctttgtgtgctaggccaagcagcttgaacgttatcctctttggaggctcaagtctgtgtatgtgtatgtgtgtgtgtgtgtgtgtgtgtgtgtgtgtgtgtacatgcatgtgtgtgtgttgtgttaggacctgaccctgtagcttccactgtttgctagtggtatgtctatgtctgagtttgcaaactgcaagttcttgtccagttatctttttttaaaaacttaggaatacttttccaatccaatcgctggttttgggaagccactgtgagtggcttgagagtgctcctctggccccaggggccacttagggacctgggcaggcatcggtcctagggcaagaggagaagaggcagcttccgatgagcctcccactccgtcctcacggcagggctccccgccctctcacctgacatcttccagctctccaggccctggcttcctgtcttcagagtgttctggaggaacaggaaggcaaagcagagggggggtgcatgtatgcacgcacatgcaagatcagaagggactttttacgaattctttccttgacactcctttttttgtgtcgcaactttgcctgtgaacccttagaatctctgctaatgagccggtcgcagtggctcatgcctgtaatcccagcactttgggaggcagaggcgggtggatcacctgaggccaggaaccgagatcgtgccactgcactccaggctaggcgacagagcgagactccgtctcaaaaaaaaaaaaaaagaaaaaagaaaaaaataatatctgctaatatgtgagcagtatcatcgtcatcaccaccattgtcgtctacattgctgtggaccaaatgtttgtgcccctgcaaaatccataggaaacctaactttcaaggtgatggtttaggcctttaggtgacacttaggtcatgaaggcagagccctcatgaatgagattaatgcttttatataaagagacctcagagagctccctcacctcttcttctacgtgagggcacagcaagaagactgctgtctgtgaagcagcaagggtgccctcaccagacactgaatctgctgcttcctgatcttaagcttctcagcctccagaattgtgagaaattgtttataagccacccagtctatggtattcagttaaagtagcctgagtgggccaagagaacaaccaccaccgccattgtcatcatttccagtctctataagcttgcttgtatcagctttgcttgaggtgtgtttaattctcacagtaaccgtaggagttagatacttgttgcatcctcatttcacccttgaggaaactgaggcagggaaatgttcaataaattgtccaaggtcacacagctgataagtagcagagctggagttcaaaggcaggccat

SEQ ID NO: 103471 - DNA, 1832 bp, Homo sapiens
atgtgtaaatggggatcttctctgccaggggttgaggaaaacatgcttttttctcgctgatatggtttggatgtttgtctcctccaaatctcatgttgcagtgaaatccacagtgttggagatggggctggtggaaggtaattagatcatggggactgattcctcatgaatgggttagcactgaccccttggtgatgaaacagttcttactcatgagaaatctggttgtttaaaagaatctgagacctcctccctctttcttgctcccacttttgtcatgtgacgtgtctgctcctcttttacctcccaccatgattgtaagtttcctgaggccctctccagaagtgcagaagatgtgggtgctatgcttcttgtacaagcctgcagaaccatgagccagttaaacctcttttctttataagttactcagcctcaggaatttctttctagcgatgcaaaaatgaactaatatcctaaattatttcttgactttttggtgggtctatggactgggctatttctgaagccactgtttaggtaaaagcattggtttctatcagaaattctacattcacttcctctcctggcaaaggtttttctattatgggagtagttcattcctttcatttttttcctccctgatataaacaaaaaacgtggagagccgtcacgggtaagatggattggattaattctgcagacacaatcagggagacccaggagcctttgggggagtgagggagatgaacatcatctcaggaagaacttttaacctctggaactccccaccagtaggacggactgttccagaacgcagtggtgatctactgccaaagatgttttattaggatagaaatcgctaaaggacaattatttatttatttatttattttgctggggacagggtggagtgcagtggcacaatcatagctcacactgcagcctcaaactcttgggctcaagtgatcctcctgcctcagcctcccaagtagctgggactgcaggcatgctcaacaacatccagctaatctttaaactttttgtagagatggggtcttgccctgttgctcaggctggtctcaaactcttggcctaaaggaatcttcccatcttggcctcccaaagtgctgggaatacaggcatgagccactacacctgtccaattttttaaaacacattttttgagatcctagtggctgtatgagtcactgaagattgaatagacgagatttcagcagccatagtccccacatagaatgtcagaagcttgaagttccatgttactagagattgtgtaggggtaatgattgagagcaagagtctgcattctgtgggccagtctgtcttcctttagcccatgagctaagaatggcttttacatgtttaaagtgtccaaaaaaatcaaaacaagagtactgttctgtagcacgtgaaaattaaatttcactgtccataaattaagttttcttggcacacaaccatgcctgtttcctcttatctgtggttgctttcctactacagtgattgcgagttgccagagagaaagtatggcatgcagagcttacgtgatttactatctcaccttacacataaaaattttgctggcccgtgttctaaagtagaatatcctcaactttcccaccctgaaactttgtggaaaatgataatgtttgttcagtgtactgggataagtggaagatatcttgctggcctggggctgaaggcaccaccttagcacacctgaggctcatttggggcagagcctcttgaagttctcattgagagccggctctggccataggcttcagccctacctgcagctgtttgatacg

SEQ ID NO: 103472 - DNA, 1054 bp, Homo sapiens
gaagcaatgtacaattgctcaagatatgaatattagtaactttgttttattttttagcactgctcagatgaatatataaaaatccgaagaaatatgttatttcccctctaagccagcagagctactagttttattaagcagacaatggcaaatctatttttaatttaattttttattaaaaaatgccctactgcttgagattctaatctctagctgaatagtaagtgtcattttcgagttgcgaatcgccagagcaacagcgtgcgtcgaaggcacttaataaataggattcggtgctttacgtccgtgtagagacaaaaatagatcaaaaagcttttcgattttacttttgagtacagtgttctgactttctagatggtaaggaaccatttagaactataaagggatttcgatttcgataacagtaactgtgtttaatgttacaaactttctattttgtaagtggctttctttgaagtcctgttggcagtttgttaaatattttagactgttatttgtgaccaagaggttcagtttggaggactttttgtgattcacccgtgtgctttaaaataatttgccactatttttggagtactcggtcccaggagatttgtgcatgagtcctgattttgtctcttagtagcagtgtgactcagggcaagtcacatagcctgtgctgaggatctcttggctttctgactttgtatttattcaccctgcttagttttcccagggagacccacactcacacccaccctttagcccatggactttggtggagatgatattgtgcagggcttcagggggagacataggactcagattattcctaatactggcttatagtaattggcttagaggtggtttcatgacctagttggagcccacaagatgtgatgaggcttttgttggggctgttgagaggtatgtgtgttctttcccactggccttgaactcagaggttggagctgcggatattgtagctacatccaacctagtagctgtcttgctactgcatggcatctgagtatgaagtccgtgtggatgagag

SEQ ID NO: 103473 - DNA, 1065 bp, Homo sapiens
actctcttgttttaatgtttttaacatttttcataatacaaatgttaagtgaaataatgatttagtctatttcttagccatttcctaaagatatgcattataaggtccattataggccaggcgtggtggctcacacttgtaattccagcactttgggaggctgaggcgggtagatgatctgaggtcaggagttcgagaccagcctgaccaacatggagaaaccccgtctctactaaaaatacaaaattagccgggcatggtgacgcatgcctgtaatctcagctactcaggaggcttaggcaggagaatcgcctgaacccaggaggtagaggttgcggtgagctgagatcgtgccattacactccagcctgggcaacaagagtgaaactctgtctcaaaaactaaaaataaataagtaaataaataagatccattatacatcccatcctggaatttttcaacttgatgtgatgctacaaagatgatctagttccctaatatcattccatgaacttctaggattctgggtttcccaggggctgggggaggtaagggagagagactcaggtaagtgggactttagaatcctgtaaatacacttcaatcacagatgcgtcacctgtgtgttttagatctttgcatttcccggaagattttattggggacaaaaagggggcttgttatttatagaaagaaaagtttgaggccaggcgcggtagctcacgtctgtaatcccagcactttgggaggccgaggcgggtggctcacgaggtcaggagttcaagaccagcctaaccaacatggagaaaccccatctctattaaaaatacaacattagccaggcatggtggtgcgtgcctgtaatctcagccactcaggaggctgaggcaggagaatctcttgagcccgggaggcggaggttgcagtgagccgagattgtgccattgcattccagcctgggcaacaagagccaaactccgtctcaaaaaaaaaaaaaaagtttggaaaccacactcttattttataaacaaggaaaccaaagcacacagaggggaggtgatatac

SEQ ID NO: 103474 - DNA, 1549 bp, Homo sapiens
ggtggagagagaaatagagggctggccaaagactctcagtgcctgccctttcttacccctagggcccatgagcctggtttaaaaaccgcttatccaccacctcgttttcattctcacacactgagtcctttagacgtaagcctgttggtgaggaagactgttgcagtggctgagatgtgctgggcgaaagattttcaactagtcttttcctaataagcacctacttgtttatattctgagctttcacagcagcattctagaaaaaagaaatacggaggactcaaaaaaaatacgctgcctgatttagttttgattgctcacgtctctggcttctttcatggaactattaattgactatagggagtagctgcttttcgcacaataagctcctagtcatgaagcaaaatggtgacattgatcattttggggtccctcagactctggcaacgttgaaacaggctgtcagttttttttgtaaccaccagttagcatgagtgggggtggcagaaattaccagtttgatttttgatcaggggctatggcttatacttaagctatttggagggaggagaaagcgtgaatgagcgagttaaggcagtagaaagatggagccatgctgggtttttaggcagttgtttcaaaaacaacacaaagtgagaaatggtgaaaaccaggaactgtttggctttttctagtttacaatgagagaagaaagatgtttggggaattttagaagacttgagtctatcgtgtagtacatctggtggagtccttgtacaggtcagttcacagcgtaccactgcttagaagtggactggatttaatggggctggctatttattcagcaacaacttattattcaccttctatgtataaagcactactctgaataaatgtcttctaaattgttagaatctaaactatactcaatattgttaccatgtgaagcatatcttatggaattatgattttttaaaaaactgttactcccatgtcattaaatgaaaagtttcagaacaatggtagttgaatgcagtttgggtaaaactgtgaatatctaatattctatatttgtgtatgcatgaaacattttggaagatggataagacactgtaaaataatcagtctaataaagtcagtgttttaatccatggttgccagcatcacaaaagagaaacaaccagatgtcatgtgcctcttgatggaactttatcggggaacctgccccgatagtcacgtaggttcttttctattttcctaagcgtcggctggcttgagaaataaaggacagagtacaaaagagagaaattttaaagctgggcatccgggggagacatcacatgtcggtaggttccgtgattccccacaagctgcaaaaaccaggaagtttttattagggagtttcaaaaggggagggagtgtacgaatagggtgtgggtcacagacatgaagtacttcacaaggtaatagaatatcacaaggcaagtggaggcagaacgagatcacaagaccacaggacaggggtgaaattaaaattgctaatgaagtt

SEQ ID NO: 103475 - DNA, 1061 bp, Homo sapiens
ctgttaataatgtatcgcatccctcgtttgaaggatgtagtcctaatttgagtttttttcagtagactggagctcctgccctcaccctatagcattcgtatcctctgagatacatggatactgttgaagttatggtgaagatgatggggtgctgggaggtggagtggaatgggattgattgatgaaaaaacgacattagcttgctaaggacacccaggtggttgagatgttctgcgaagtgggcctgtgtgtctgctggacctggagttgaggggacagctttcttctgaggcagcgtcttatcctggggtgactccgggaggcaaaagcattaactattgatgagactgatgacacactatcattcctagaccagaaatggtgcaagaacagagaggatttatcctgctcttctttctctacacagtccctgtgtcagagaaggtgtctgctgagtggacaggccaagaactgttctctgggacggagtgcagatgaagtagggggtgtaaacccatgaagaacaatgaagcagagcgagtgaagcaggacaggctggggtggaggagaaagaatttgcctttattgtgcaattagccttttcgattctttaaaagctttaggagatagtgaatatgtccctccaatctacagacccgaagaggcatctcgggaaagtgatttgcccagggggacagatcaaggacctgaccccaggtccctctctctgcctcagaggccctctgggatccattaaagggtcttgtcttgagtaattaactgaatactggtttattcagaatgaggggtctttaattgggggataggcatacctttggtaaaaccactggagtttttgggcccagtgtctggcagtgtgcaaggagcgtggggcatctttggcacaacgcggcttcaggaagagccctccttcccttcctgagtaaggcagagtttgagtcaggctggggtgggctcctggtgtggggacaggttattgtgggtgctggagggaatgactttcactctgagtcattcagtggcctgcaggggtgcagggc

SEQ ID NO: 103476 - DNA, 1054 bp, Homo sapiens
gaaggcaagggttgcagtgaactgagatcacgccactgcattccagcctgggcaacagagcgagactctgtctcaaaaaaagaaaaaaaaaagttattttagctttttctgcttgctcttggaaaaacaaaaattagggagcggcggggagacaggagaggataatgacagacaggttcatctgacaactaaccttaaaggggccttgtctatttttcagaacctacattaagaaacgcattcagatgcatcagccgtttgtaaagcacctgtcgtgagccaggtaagatgtgtagcgttttcaaagctgttttattaaatcctcacagaaacctttccaagttgccgtttttcagcagggcgatctgtgctgaagtaagctacctcgcttggctcacacagctaaaagtagacgcaccagcctagggcttggcgttgtccgcctctaagtttagggctgtaatccggttctttcaccaaagaagacacagtggctgcctcacagggacctggaaacagtgtctaattcccagttctggtgggatttcccctgtgtcttactctcttggctgatgatcagtagatctatttatcacttctaggagctgcgccttaagtcttcatttcagcctcttcgtatggacctcactgaggctctgagggggaagtgactgcttagacccaccacccacccacccagcttgttctgtcgggaatggttctgaccctcttccatggagaggcatgtgtttgtctgggtggagaacatttccagaggagcatggccccctgagaactggtccgggtatggccacagttcagcactctggttggattctgcacatgaaacattttgaaatcttttcagtggaagtttggttcttggacagctctcttctgctgtcccctaaaccccctattcctactgagatcagaggccatttgttgtacatagtcatcgcccaggtgccagcgtagggctgggtgcccgggaagcctccagtaagcagcacagaggtgcggggtgcgtctcaggatgccaagacttgatccc

SEQ ID NO: 103477 - DNA, 1397 bp, Homo sapiens
cggtaggatcacttgagtccgggagttcaagagcagtctgggcaacatagtgagaccctgtctgtacaaaaaaatttttttttaatttaaaaaaaaatttaaaattttttaattgtaaaatacacataagattgaccatcttaactatttttgggtggacagttcagtagtgttaagtatcttcacattgtcgtgcagccaatctccagaactgtttggatcttgcagaactgaaattgtgcatcctttgaacaagaactccctattttcccctcctcccagcccctggcaagcagcattctctatgggtttgagtcctccaggtactttatatgagtggaatgatatagtatttgttgttttgtgactggcgtatttcacttagcatgaggtcctcaaagtttacatcacatggtgtagcgtgtcgatgatatttccttctactttatatgtatgccacatagcaccttggtttgcccatttatctgttgctgaacatgtccttgatgaaccatacatgtcataatgggttgcttccagctcttgaccacattttgttgatttcgttaatcattcaagaccaagaaaacatacctggatttaagccccggtctctgtttgatacctgacttctgactgctttttacttccaaggatcctccagctttaggagttgagaagaattttatacaatgtggcctttgttaagcctgaaactgctttgggcctgttgaaaactcccttttattttctgagtccctactcagacaacacttcttccagaagcctggtggggaccaagtttataccgccagaggccacaatgtaaggtgaaggctttttgtttgtatctgttgggtgcccgttgttttcctagtgtcatttctaccttttcccaaagctcgtgcgtttgtttccatattttaaaaatgactatgatgagatgtcgttctgaaattaggaagtacagtaatacaacattattatcatgatacaggtttgcatttataaggtgagctcccttggggctagtcatttttattttttttaattatactttaagttctgggatacatgtgcagaacgtgcagttatgttacataggtatacatgtgccatggtggtttgctgcacccatcaacccgtcatctacattaggtatttgtcctaatgttatccctcccctagcccccgaccccctacaggccccagtgtgtgatgttcccctccctgtgtccatgtgttctcattgttcaactcccacctatgagtgagaagatgcggtgtttggttttctgatcttgtgttagtttgctgagaatgatggtttccagcttaacccatgtccctgcaaaagacatgaactcatccttttttatggctgcatagtattccgt

SEQ ID NO: 103478 - DNA, 1060 bp, Homo sapiens
gacagagtgagaccttgtctcaaaaaaaaaaaaaaaaaaaaagaatgtctgggtcccaaaatccacttttcttctactgaggacataggaatggtcaccttccctgcccttttctagggccatgtggctcattctggccgaagggtggtgagcagaagtgagttgcataatcccagtgaaagcatttatttgcgggtgcaagatctcctggggctggcgcgaagtgctggggggcaggactgaggagtggcaccaaatgctgcgtaggagagttctccagatttgacagtcaaggatcctcatggcagcatggagaggccaggcgtgtctgcgtggccattctgtgggtgaggagcctgaggcttagtgaggttaattgcttgtccaagggatcttgtgcaaattccatggcttgttctatggcaatatgctacattcgctgttatgatttcttgttgttgctgtaaattgtaggctaagggtgtgtgtgtgtgtgtgtgtttgtgtgtgtgtgtaggtgggtgaggagtgggagtgaggaacagctagccgagttgcagtgcttggtccttttgcagaatgggtgttagcaaaggctggcatgcttagcccaggtggtggctgtactcggccaccaagttaacgaagagaaaaacgagttagctgttacctcctctcagatgtcagttttcctttaatgtggagctttggagagaataccaagatagggctgtgcttactgaccttttccttgccgcacagatgggaataaggggggtggaagaaaaggaggaagaagagaggtgttcgaggcagaggctgcctgggcgatgccgcttcgttacccactctcagcctaaggaagcgttgcccaccctgagattcagggttgaaatctctctagcgacagtgcccaggagtgcaggcttcacactccaaggaccttgctgagggtgcatggatgtacgggcaagggtcgtggttgtggtggcagtgcagtaggtcatcagaaaggcctcaggctggctgcgcccacggtgttccccgtgctgactccagc

SEQ ID NO: 103479 - DNA, 1175 bp, Homo sapiens
tggcacgcccgagataaaggagtgactgagtggcaaagctgagacttgaaccctaaactgtcggctcccgtgttcctgtgtgccacggtgctgtgtgagaagtgggaacggtgagttccctgctgggctcagtatggaggcaaaccgctttctgcaacacattcctatgctctcggacagcttaattgacttctgtgccttaattttctcatccgtgaaagagtataataataacaacaataataataatagactagaaattggccaggcccttggtgaggactcggtgcgtgctacctctgatagatactaatatgtaggtatagtaggaacatcaatcatcaatattgttttgactcttttgacctctgataaaaaattttgaccatggactgccctttttgtgttaatagatttgttaggtcaatgaaaacacagctctcacaagaagaacttatgttttataacaccaagcccacaaacgaacgtcatggtggcccccgaggacacgtgacagagctgggatttgaacccaggcctatctagcctctgtgtccccacactgtttctcttgggacccaggtgtccggctggccctcagcttcctgcgttcctggtgattcggccctggcggtcacagtgtcaggtacacccactcagagtgggtttatgatacagttaggaaggagcccaggccacagcactggaaaagacgaaattgtagtgttgatcaaggccaggagcctctttgctcagcgactgccgtcaatcctcttccctgagaagatcgcctgtattgttcaagatgttcggatataacctcccccaggaaggcttccctgatgtcacacacacctctgtcgaaggctcccaggtgggccgaacagagtcttcctttgctcccatggcagcttacaggatctttggcagccttttccatgatgttttcttcccaggggtttgtgtagcttgtcttcaccacttgccgtgagctctcgaggacagaggatttgtctgtgttagaaacatctggttcctgccgggcacggtggctcatgcctgtaatcccagcactttgggaaggtgaggcaggtggatcatttgaggtcaggagttcaagaccagcctggccaacatggtgagaccctctgtctactaaatatacaaaaaaatga

SEQ ID NO: 103480 - DNA, 1149 bp, Homo sapiens
gaaaacatttatttgcacaaagtggagttgtgtcagtgtcactttgaaaagaaaaagacgccaatattccctaccaggatgttctgtcatgaaaacaaacagatgaaacaaaatctacttcgaggtcagagtgagaagaagagaaggtccggctgaaattatctgcagtcttgctggagggaacaaatggttgcagctcatgggtatagtggcattttacggctcccagctgtgccttcccttcttgaagatgggtgaaggggagtaggttctgggctagacttggggctatggagcaaaagcagagggagcttgtcctgcacagacgtggaagcagaggtcactgaattctgttccacagtagaagtcagcagtactttatgataacagtgcatccaaacgtgttctgtctgctgggctgggcctgacacccacggctgtgactctttcagaaactgcgaaccaacctgtgggtgggccagggatccaggtcaggagcagaagtaggttaaaggtgatcgagagagacatgtgagagagtgagcgagagatagaggcctgcaggataaggccacatcaggagtacagtccaaatataggcagtgattgtgaaacccagggactgtgggctaaaagtgctgtagattctgaaagtaggaagaggaaaaatgtggccacgggcctctggggaaagccctgttctgtgggctttggccacttaaatctatatgtcttctgctgctgtctcaaggcagtgatgcagccctgactatccttctgcccatctatccattcatccatccatcagtccagcatttgagtctctattctatgcatggtactggggatagtgtggtaaacagggcaccatccctaccctcaaggagcttacagtcttgcctggtaaaatgtacagaagcatgcatttttgaaacaagtaaaggaagaagacttaggcgctctccactccaaggccacctgcaccttgcctatgtagctttccccagcaacacgaagccagcattggtttcttaagttcccttcttgtctttatcatgtatgtacttagtatctgtattgtgctttgggctatttatttatatcagcatagcactttattgcatctttattgtaaataaccttcctgaa

SEQ ID NO: 103481 - DNA, 1050 bp, Homo sapiens
gtaggctgcttggatccggtttggccctctcctcttgaatgaggagggaattgggcaagccgcaggtagaccaggtggccccgatagatagtgaccgaactggtacttgagctgcatctcctcttcttgtctagccatcttggtgttctaggtaggacatgagctaggtcctaccaaagacttgggcactttatttaagttctctcatgtaatcctactaacaacgttgtgaagcatgcactatttttacttactaaacaaaaaaggagcgatcgggactagaggacttgaaataactttctgaggcccagcctgctggtgcgaagtagatccagtgattcaacgtggctccatcccatgacatttagctgtcagggagctgcaaacctatgaaacagagctttcagattttggaaatagaaacgcaggcagcatagtgccacttgctgcctcctgggaaagccccttgtcgtgaataatagaaccagcgctagaaggcacgttgctcaggccggcaggtgagtccgagggctggggaggggttttctgggcagtgggacacctccctcttagggggtttcatttgtccagggccagtgaaaggctgtttggtccctctgctgagtgaacagtcccagcccacaggatgagtcagagcagagtccagaacagaaggcagagggcatgtgtgcaaaggccatgtttatcccaggcatttggatcttaagattcctgttcatgatgattaaggttttatacataacactgtttacagactgctttatgatcatttatgagtgtcacctggcaacagctgagttagccacatccatccaccgtggggtaattaactctgggcccacccagagcccagttcattgcttgtgcattattgagcctcctccccacaccctcattcattcatctatccatccatccattcattcattagagccctttttgtcagatgccacctttgtgggtagctttgtggttggcatttctttttcattgctgagaatacgtaatatgctggacatgttggtgttc

SEQ ID NO: 103482 - DNA, 1076 bp, Homo sapiens
tatatatatataaattcaaatgttacattctttatttcatactgtctggactgtggtatgtattttattattattattattatttttttgagacagagtctcgctctgttgctcaggctggagtggagtggcatgatctcggctcactgcagcctctgcctcccaggttcaagcgattcttgtgcctcagcctcccgagtagctgagactagaggtgtgcaccatcacgcccggctaatttttgtatttttgtagagacacggtttcaccatgttggccaggctggtctcgaactcgtgacctcaagtgatccccccacctcagcctcccaaattgctgggattacaggtgtgagccaccgtgcccagcctgtattttaatttatagcacagctcacttcagagcagccacatttcaagtgttctgtagtattttcctgtatcatcgtattacatccttccagaattctaagaagtaatcatttctcccattttgaaaatgggaaaactgaggcatagagagattaagaaacttgcccaaagtcattcaatgaaggtttgaacccagataatctgtcctcagagccctgctgtgctagtttcttacaaaatcttgggaaaaaaaatttttttggaggatacttggggctttcatttggcgtagactgggtagtttatacctcaaatggagggataatcttgactagactgaacctcgcaacagggttaacaataaaattacatggcagatgcacccccagggcaccattattatacatagcagggcctcagtaaatggtattctttcccttctcttcagacccataaaatcagctttttttaaaaagggactttcttagttttgtttacctctggatccattcctggtacatagaagacgctcagtaaatacttgcggaaggcagagaggatgctttggggtcactggatgtgatgatcactcacagttgttggggcatctgcaaatacagtggtaccattagatggtgggttttataaatacagccctgggtgaagggggcttatgtggagagatgaccagagtgttcagatctg

SEQ ID NO: 103483 - DNA, 1051 bp, Homo sapiens
gggatggtggcatctggcctttcagggcctccccaatctggtcttgcccggtctcccacagattccctgcatagttgtgacactccagccaaactgacagtcacttggatgtggcacatgccttcccatagtcaggccctttgcgtgggctggcacaatatgggggcctcagaagagaagtggggtttgataagtgggctgcttctcccacactgactcaccctgaatgatagcagtgtgtgaagagcacactcgttaatgccatcagaggaaagagggtcaacgtacagtgacccaggataatgttccctgcaagcgcatgatcgctttaaagtgctgtgttcccagcagtgtggacggacagctgcagtaatgattcgtacacagaggaagctggcattgaccgaggccaaccgcatggccttggtttctgccctgaatgagctgacattcttgttgaaggtgagacaggtggtgtggttggtgggcagagaccacctgacttagataggttcaagtctttatttttctcattgattcatcacacaactatttactgtgcactactgtatatgaggcactgttctaagtactgtgggactgttagtaaaccaagggacacgagtccctgccttcatagagtttgtgttctggcagagggagatagactaacacacaaaacaaggaaaacatactgtgtctcctgtggtggtaaatactcggagagaagaaaatacagaagggagagagagggagggtggagtgtgtgtgttggcaggagtgggttagggtttgcggttttaaggaggttggtccgggagggtttgcagaggtaattggaggagatgcctgaaggtggtgaaggaatgagtcatggggctttctggggaaagagccgaggcccatgccagtgcaaaggccttcaggccatttcttaattgctaatagagagaccacagaggggtcgtgtgcctggaagggcgcaagcccctaggaaagtattgggagaggatgacagagaggaacccaattgttctgggtctcctgggca

SEQ ID NO: 103484 - DNA, 2428 bp, Homo sapiens
agccagtaaggaaatgaatttctggactaattcatataaaacaaaggggcaagtttagtggtggagatattggaaatttttataggcatttggtagagcacagaggagagcctcttgattcagccttgaaagataacatttctggagctggtgaactctgaaatgactctcaaatgaggggtctgaatgaggcaagggggaagcaaggggcctgcctgttgaggagacgagagttcacagaaccgtatgcagcttcccatatgcacagaaccgtatgcagcttcccatatgcacagaaccatatggagcccagggtagcttcggggacaggtagctgctcagttgtaaatgtttgtttttctgagctgttgcatgccttggcgctagggcagtaaatctctgagcagctatgcccagtaaagtcatgaaaacttgagtctctgtagtctcataaccccttatttccacctgcctaatgcttgttgctttagggaaactgaggcagcacccccccgcccccaccccaaaattatgacctcctctgtcctgaacaacctgaggaattgttgcctatgagggctggcttatcacgaagctcatggtccttttgaatagatctgagaattttgcagatataaaataaatttgaaatagcttgttgtagtttaaaccttgacagcattatgtgcagtgattcttggtttttgaaacaatttcttgatgattctcaacttgactcagactccagcatgtacctgtgagattttggtgaagttctgttgcagagttttgagcctcagttttttcatttcttgcagctttttgagcctcagttttttcatttgtgaaacagagataaaatatgcctcctagaattgctgtgcgggttaatttgaaaaaaatatgaagaaaagctcattttttttttaagcaccaactactgtgccaagcactctttttagcctctatatgaatgaattcatttgacattttaaatcctcacataaaaccctaagatggaataaacaggagtgtgagccccgccttgcatctgaggcattgtggagtttggtaacttgcttagggctacagggctgggtaggggagaaactaggatttgaacaccagaattatgcgcttaaccctgaagctgtagtagctctgttcctagaatgtggcaggtgcacatgggtcgctagttcccctctatcttcagaccactgtcgttgttctctcccaggcctgaggagccagtgggccagctgggctgggagggcttggcagggccctggcctggctccccacttatggggggcagaaacctggggcctccctttcagcactgacatggctggtggtttgcatttgcctgtgtgttcctcatctgtctatcccatgaggtttcacactacacaagggcgggggccatttccgttttcctggttcacactgtgtttctggcaccgagcttcacatccttccctcattgaacactcagaaagttatgaatgaatgaatacatttttatttagttctcccctcctctatcttctggtcactccagaccactctccctttaagacccagttcaaatgaccccatccccttgtaggtgcctccgtgagtattgcttgcatctcctttgtttcctgtccatgagcccctccgggaccccctgcaaacaccagacccagagcctgcctccccatgttggatgttcccaatcaatggtcttggcgtgagttgattgaacagagtccctatttgagaagagcctgacttatgtctctgctagactttagaggggaccaagaataaagggtctatttaaggaaaccattacacaaaatttccagatacgtattattccagctccagaatctcaaacttctgaatggatgggctccaaaaaatacactttcttttctctcattgaaaaagatgtcataaatggcgctaagaaatgctgccggtgtgcagaagtctgcctagcccaggagggagcttcctggacctttgccacgaaaattgtcagacatacacttgcaaacctgacaattaaaacggaagacaatacaatagaataagaatcttttccatttctgttgaatgagggggcttgagaaaaagctcacgaaattaaaaggagaatgaagacgcttctgaagggagctcggtaagaattttaggggcaggtggcatctgttatttattgtgccagttttgatttcagattacagtatatgctttcttttggggaagtgaggtgatatcctggttgaaagctcaggctttagggtcaggcagatgctgatttacatcaggaacttaaatgtgtaactgactttaagtaagctactcaaaaaccaccagtctcttcatctctaaagggagtgaagtatgttacaaaactcgtgagtgttgtatg

SEQ ID NO: 103485 - DNA, 2085 bp, Homo sapiens
cactgtatttaaaattgtggctctccgataactccacacttgccttctttaccctgctctgttttttcctatagcatcaccgtttgttaatatgctgtgcgtttatctgaatgtgagctgatgacggcagggtttctgtctttttgtgtcttaggcatagagaactctcaataaatatttgttgagtgaatggagtaaatggtggcctctactagtgttagtggatccagaaaggacatggaatagtttaagatttattccttggttgagttccaggaggaactgcaggatttactggggtggtgggaagaggaagggggacagtgctgtggatacattttgttttacctacccttttggagctggtgttttctttctcaattaaaatgtattttctttagcggttactttgtaatggaaaatgacacttctgccagttttagtcttttatgtgttctaaaccgagtcctttcctcctgctgtggcttcaataatgcatcgtttcataagttcacagaatttaatgtgcttctgctgaacccctagtctcagccagatagttaaatgaaaattaaccactgtaggttggattcaaagtcacctattcaccttctccctttttaatccccttccctcactccacgtttgcaaagcagtgttgcatttttcttttttgagaaatagggcatgatgtgtgcctgcacacgggctcttgtgtgtgaatgggaatattgatttatttcacaatcagagatccatgaaaaaataacactgtgaacatacacatttttgaaatgctgcctcttccgctgaagtacagtggagtgtagggacctgtagcaaactaatatttaacgagggtgccactgttgtaccacctttagaattcacagtggctgctagtgaaactggcatgtgtcttgacaaggctgtgaaatgtagtcagtcttctttcattcattcatttgttcatttattcagagccagatgatcattttgtatgcatgaagcacctgagtggtggatgtgataggctgattgcatttgtggcctcaaatcttcacacgtttctgatttcctacccaactcctttgacttttgactttaagtttcaccatgtgactagctttggcctgaagtatgaggtggaggggatggtatgccagttttaagcctatgccttaaaagatcttgagcatttctgcttttttgtgtccctgcctttgccacaaagagtgtgccctgccagctgctggtcagaagaagagtaggagaggggagcagagccacgcagccaattcatgggccctcagtgagaaaccaagcccagtctagatcagccaagtcccagctgacctgcaggtgcatgactagaaataagtgatcgttgcctcaagacactggttttgggatggctcattaggtagcattattatgcaacaaatgactgatgtggtgggttgctaacatgattcagacgtgaatcctgtttgaaagaagctttgtagttttgtgagggtggtgagaaggccaggacaagattgtgaactctcgtacgtggtagagaaggtacgaaacgtcttaagaaaggactcatggtgagagtggcttttgagaaggcatttttaggtgatgttgtcaaagtcgagaatagaagaactattagactaggatcctatcagactaggattttgagttaaaaatatgtgatatttcaaagttgatttcatcacagccaatgcatcgatgccaattttccgttaaatttctaatgactttgcttttgatgaaccaaaaccagctcttacaacttaaagctacgctgctgtcagagaacatctccgtttgataatagccaacatttacagtgcttatcacaaagaattttacccagcatgtatttggtctatgtactgtgtgccagggatgtgtttgctaagcattttataggtatgatctcatgtaatcctcctcatgatctgaagagttgtaggtactaatgttgggtcaattttccaggtaaattaaccaagccagagaagggtaagttacttgctaaagtcatgcagtaacatcgtattctca

SEQ ID NO: 103486 - DNA, 1547 bp, Homo sapiens
gttagagccaatttgtcctccttgtgccttcctgctctctctggtttccggtttgtgtgtcccatccagagaccgagggtgccaactctgcccacctctgtagaggtgtactctcctccccatcccccacagcacccccacttgcctctccaatataaggctcatgacacaaaatacaggtgatcggtgatcagattttctagggtggctctaattgcaaatattctgccccatttgttatcccattaaaccattaaactgtcccaggcattccactttggtatataagctcttccgggactggctcccatgtgacaaattgagaagtgccactgccattttttgagcacctcctgaatgtcaaatgcttgattcatgattctcattgtgttttcccaacagcctgatgaggtggctgtcatggtgcctgacttacagaggagcacactgagaccaaatgaggttcatttccttgtatgaggtcacacacatgtgtgtgaccttggaccagatatgggtccagacaaggatgagaactccaaagccctgtcctaacttgcctggggccactgccttggaagagcacagtagtttttctgccagctcccatgtcccagttttgtttgaaaaataagagttgctgcacacagaggctacttcgaggtttctgataattcattctgatggacagcagtgggacagtgtcgggtaggggacacagctaaagcctcaaattgaaataagaagaggagacaagggggtcaggaataaggttgcaactggggtagccaccctagtgagtagagtaggggtccacagtgtttctcacctaggatgtgtactagaatcctctggaaagctttaactgatgctgatgtctgggatccacccctagaaatagtgattttaatggtttgtgatgcatcttggggaccaggatcaaaaactccacaggtgatctgcataggcagccaagatttagaacactgggaaggaggcctccatatggtacaggttgaacaggaagtagagaagacacagccttaggataagggcagggcctggaccaacagcacaacctctctccccatctagagggtgaccctgagtgctcatagggtcagcctctagatggggaggggagttgacccttagacttagagcatccaggtctgcagggccgggagcccagtttggggacccagtgaggcctgctcatgcttttcctgtggaatcgatagatttcctgcatcttcagtgccttcaatgcacttctactcaacatgtagtgaaaggggcggaggtgccctgtgagacttgtgacgttcagcgggccttaataataggcctgcatggactgccttttgtctttgcttagagttcatggttaaacgtggggtttgtggtgttcccatgatacctgaataccgcttgatgagagggattagattgcaaacaccttgtgagtggggaacccaatatttgtgtctgctagaatgagtgatatgatggcttacctgtaccacttaagttaatgattgatttca

SEQ ID NO: 103487 - DNA, 1084 bp, Homo sapiens
caaaaacaaccctccaaacccacacactgacatttaaaggatttgtgccttttacttgcatttacttacagcattgtacagattgctgtctgaatatatacatctggatgtattctttgagatgcccaaagcactgcagaagtctcacttctttgttaaatagattttcatgttattcccatcaattggatcagaatttctgagggctgctggtcatcgatgttgctttgctcagattcattccttcatttgctgattcactgaacacacagttgttgaccctctgttatatgccaagcactgtactgggcacagtgagggggcgggtgaggaggagaacaagacaaagtcccagtccctgcttgcttggaactctcattctgtgtggcttggttcattgtgagcagattaggttggcccttggctgtcatgcttccaggcaaagctatcccttttgtcacttgccacctgcagttctgggctaaaaactaccatatgtataactcctcttggtatttattggtttgttacatccaattttgcaaagcctgatgcattgtttggttagaaggaatcctctattctactcccaagaggccgctcaacaggctttgatgatccgttaaacccagttccatttttgacatgggagagcctgtaacttttttgcctgttttgattttgagtcctttatagggtattttgagagttgggcaccatcaggcgggtttgatgtcagtgcctcacaggtgggcgatgaagttctgggatcaattttgttatatggccgccttgtacagtgccacactggaagcttacattgcaagacatgttcttttcatggcgagattgagatgtggtaattgaaatgggaatggctgaaaggaatactgatgtctccatactgcagggaggggtccaaagccatcttgctgaagagcagcaggggtttgtggtcctgttcacttctgatagggagcagcataaatagcacatcctgtcacttcccgatggatacagttgcgtgaggacttgtttataatgaatggtcctggaaaacaacatctcagggaatgaggaggca

SEQ ID NO: 103488 - DNA, 1663 bp, Homo sapiens
ctgtctcagcctcctgagtagctgggactacaggcgcctgccaccacgtctggctaatttttgtatttttagtagagatggggtttcaccttgttggtcacgctggtctcgaactcctgacctcaggtgatacaccctcctcagcctcccaaactgctgggattacaggtatgagccactgcaccaggccctgtcctccctcattttataaaggcacatctcttagccagaactagtcttattctggcatgttgctctgggtatgaaaatctcaagggtcacctaacaaagggactatttgaaattggtatgttgaggtccttctaatcacagcaatgccacatggttgcctctttcccttttgtcttttacgtgttgaaacttggtgccagaaacagggcatttaagcccctttctcatgtgagagaataatataacattttcagttcttaaaaaataacttgctgttggatttttaaaatgaatgatggctatcagattgctagattccatttaaaactgtgatgtgaaagttttattttaaaatgttaatgtttacaatatgctgaaaattgtatccttagaaattgtgtagttgaggatgaaaactttatgtcagcctaaaaataggcacggcagtacaagtttttcaaatttcagaattcaagggcccaggcatggtggctcatgcctattatctcagcacactgagaggccaaggtgggaggatcgcttgagcctaagagttcgagaccagccctggcaacgtagtgaaaccccatctgtataaaaaacagttaaaaaaaatcagctgggcatcctggtgcatgcctgtggtcccatctactcaggagactgggaggtggattccttgtgcccaggaagttgagggtacagtgagccctggtcacgccattgcactccagtctgggtgacagagcaagatgctgtctcaaaaaaaaaaaaaaaaaaaaaggaattaaaaaaaaaaaacttaaatacctctgtactattctgtctcagatactgaagtttggagtgggtaatttttaagttgatttctgccatagacccttatacacctgaatatttttttccataaaatttaaaggacatcagtatttcctaaagctcatacattgccctcctgattaagcacacttgaaattctgttgggtttcaggataatgtaaacatcctttaaatgttgatgaaacttttacacatgtagctagtcatgtgatcgtgtatgccagagtgcctcaatggctcactgaggactgtttcaggtacaaattatagaaacctaactcatagtgatgttaaataaccattccactttatcttcttaagtgactgaagacccgagggcagcgtcaggcagggctggatctaagtcctcgaacagcgtcaccgactctactgccccacgcctggctctgccttcttctgtattggcttggttctcaggcagcctgtccccatgggatgccaggagccctgggtgcacatctgacttgccccaccatcgtagctgagggaaagcatctttttcccagtacatctggcaaaagtcctggttgtggccaggcgcggtggctcatacctgtaatcctagcactttgggaggccgaggcggggggaccacgaggtcaggagattg

SEQ ID NO: 103489 - DNA, 1805 bp, Homo sapiens
tatctcttatgaggctttccaaaaaagattttgttctaggaatggaataaactgtagggcgtttaaggcttcagaggtaattttgggcaacctggagttgcaggtaatcacaggctggggctggaattgaaaatgcagtctcacccataatttgagcctcttttgtcgcattatggggctgtgccttggacaggcagcagacgcagatggagatggaaccctgactactgagagagctttgcttttaacatagtccttttctgaattaccaaggccaattgggaagaaaggacttgccgatctttccagctctccatggtagccatagaatttaggaagatttacagcagaacgtgggcatctagggatttctttcttccttttcttttttttaaattttaaattcagaagggaatcttgggctcttgagtgttattctgtggttagggattgctgcggcttccttggatacattaaatgcatatttgttattattgagtaaggttaaccttgctgcggctaactcgaagccatcccctccccttttgtttttagaacagttgcgtagatccttcatgtgccaacactgtttgtttaagagccttcttgactgatgtcagctctcatctggaaatggcattttgtggttgtttcagaagccaagggaggcatagaggcaagcccataggccggtggggctttacctttcttcaggagtggtgctggtgcttagtaggtctgcagttagtaagtagttgtgtccacactgaatgatttgttttgtgaatgaatggtcatgttttcattactggggtggaggtgatgcgggagggagaggtgggtgagtaacagtagacttaaatggtgatgagatagacttgagctcctcaaggcgtctcctagcagcttttgttttaaaaatgtgaaggatatttcagatcagcagaatgaattctctgaaggatcattgttgtggttcaaacattgatggctttgtaaaaaggcaaggagagtacaataccgaaatgcgtgctttctttcctccgagtttgtagggattttaacttatctggaatgagaagaatggacatgctgtaaagcttgttcacatttacatgacaagttgccttgaaaatgcctggaaagacattttcaatatgagaaactttaggatggttgttgtccagcatggatgacgatgattatgaaatgacttaggtgtagaccggcgctcccatgtcaggaggatgaagtggacgtgggagaatggagggagggactcagtacttggtccccagcaggaagaactctcctcgaccatattggtgtctttacccatttcccaatatgactccctctctgctgggtttctcagttacaagagcactctctgatgccttccgtctgtaaggcagagctactgtattgagagactaccaaggctggaagagaccttggagccccactagaccaacaccttcattttacatccgtagaaactaaggccagacctaagggaggtcaagatgattattcagaggggaggtggaaccagaacctaggctccctggtcctcagctctcccttctctgcagcatgctctgcttccatccaatctgcacccaaagcacgttcttccagtgtttcttttgtgccaggcactctctcattcggtcatttttgttatttcattctcacagcaaccctgggagggggatgtgctcactctcccacttcacagatgtggaaactgacgcttgtgcaaggcccacagccatgaagaaggagccaggactcaactcgca

SEQ ID NO: 103490 - DNA, 2434 bp, Homo sapiens
gctctggagtgagcagtagctgctgacaagtgtgggccctcctgcttcacttaatgaagtgtgctggggtgtggattaactttttgatgtgagccaatgcagattcctttggcttttaaaccatacctggaagggccttagaaatgaaatgaaaggtttttttcatctcatcataggtctcggaagtgcttccatctcttgggaaggttgtgacgaaggtttcctttgtttctgggttcctgagctgcgctttaaagttgatgcacagtgcagggagggtgcgtcctgtagtgtcgccatccttcagccacctacagtagcaggacactaggggggactagttatcttttccaccatcgaagaagaaaacaccagggcccatgttactgtggtttatcttgagggttcatgagcctgtggtttatgttgagggttcgtgagactgtggtttatcttgagggttcctgagatgaactttttgggatctagtacatgcttgcactagtgagtggattctgagtgcctaagggatgggcctgctcacatctaaattgtcatttggacaactcagaaccagttaactgcaaaatgttatgtgacattctgaaaagactcagttataatctctaagtatttaaggactacaaaaaggctctatcctttgaatattagaccatcctaactttaagttccctaacagtttgtaatcaacacttttggtgtttggtttttgactgcatattccctgcagtcatcataaaatcacatggcttcaaaatgtctctgcagtggactccatcaaacttaaaattccccttaaaaatacattccgtatacttagagatgttaacataacatttgacggtgtagttgcacttccacctcagacgctgtctgcacttttaatagtatgaaatcattaatgtccacagcccttccagcagaattggaagataattctacttccctgaagaacactgactgccccattgcctaggtttacccaagtagctaagtcttatcaaagctgatcccagaggtgggagtagcggggagacaggaaagatgcaaggtagaggccaagaagagcctgcttagtttagaatactgtcacaaaaacaggcagatatcaccaagatgttggtcacactggattctaaaaggcccagttcagcatgtagagttagactctgtttgaaacctgtgaacccacctgagttattacttttcccttgaactctggggtctggtagacggcatttgtgaccctttacccatacgtgtagtgcacatttaggtagttgaaggggagctattgttgtggtctaggaaaaatggtcagcagacagctttatttctaacattaagactttatagattgattctcttgggcacagtacagccaaggggtaagagattggaacaggaaaataccatcgcatttgccattgagcaccaacgattgaagaccgatcctgtggagaatatatgctgtcatcctgagacatgaatgaagtcttatgaatttgatggaagccaggtggcagaagtagaggcaggaggctggccttccttacggtccgtgaacaagatgaaggtgtctttttggctagagattctcagaaaggaggagcatactgcattgggggtgggggatataagacccaaaaggctgagagctctagacaccctgccactgacacacctcggggatacagccaccttggaaaatctgcttagtgttggtgaggtcgctctacatggagtatttgccattgagaggtgttcagcatttctctgtcacattggcgtatggagagtagcaggcagcaacgagtgaaaggcttcgttaaatgtattttataagacttttcatcttttcgtttaacaaataataatagaccatctaccctgtggcaggtgccatgctctgtgtggaggttacagagtcaggttacatttagcttctagtcttttatgggaggcagacattcagctatttgtttgtttgtttgttttttcttttttttttgagatggagtcttgctctgtcagccaggctagagtgcagtggcatgatcttagctcactgcaacctccgcctcccgggttcaagcaattctcctgcctcagcctcccgagtagctgggattacaggcgcccgcccccacgcccggctaatttttgtatttttagtagaggcggggtttcaccatcttcgccaggctggtctagaactcctgaccttgtgatccacctgtctcggcctcccaaagtgctgggattacaggtgtgagccaccgtgcccgggccagacattcaactattattaccaggtaagtactatcctgcagacttgttcaagggatgagtttgaacttcccaggagagtagggaggaaggggatcacaggcagaaagaacagcatggaaac

SEQ ID NO: 103491 - DNA, 1917 bp, Homo sapiens
aggccggggcgaggccttttccggcgcttctttcccgcggagccgcgggcgggcggcgcaggccctgggggagagcgcgccgcggccggttgcagccccccccgcgccgccgcgttcggcgcccggcccggccagtctgctcctgccccgccgccgcgccggagcccgggcgcccgaagctgggggcgcggccgcgctcgtctcgccgggctgttcgcgggcaggccctgccctgaagggacgaatcggcttggagcgcgggaggtggagtcggccccggcggtcgctccctggacccaacccgaggctgacccaggcccctgcccatgcggggcgcccctggctcggaagagtcccccgggccgggagcagctccaggcagcggccccggaggaagaggaagaagggacagtgctcagcttgggggacccggaccctcgccgcggcatttggagccgggggcagtcccgaactctgtgcttggcaccgccgctccgagtagggcagcgcctgccgggaccctgacccggaccccctgcgcctcgtaggcggcggcgccgccgcgccaccctgttcttccgtgtctccctctgcctggcggcagtcacggccaaggtaagagccccggagcgcgagagtcgccgcgggggcgccgtggtgtgtagcgccggacaagttctccgaacctgtggctggtaccccctgtactcgggatgccggcggggaggccgggcacaccctctgctgccccggccgggagccctggagaggctggaggtggaagcccccagtctccgaagtccccaggaccccctcagggcctgctcggcttctgggcacacaggctgctggcagggagcgagccaggaggagtttctggttaacaccacgagggcatgtgaccgatacccgcacccccggccctcttgttagcggtgagcacctgtggttcgcggagcctgccgtgtttggagagggccctgttgggcggtacgcaactacctttcgtggtgtgatgctgtgaataacttttcttgttccttcttgcagacagtcctgcgcaatttgggggcgagcagccacagcttgcgagtccctctttaggacagagtggttggttggcattgctatctgtaggggggaagcccagccagcatgtccttcctgttagtcaaagctgcttgtgaggagtgatcagtgtatagctatccagacattcttgtaaatgtcactgcttttgaagttttggagtgaggactccaaagtttgtgtatcctcaagttattttgttcattgccttatcctcttttaaatgttcctcttaaggaacctcagttgtacaagcctgtccttgcctgtttgaaatttattaaacctgtgagcttcccccagaacaatctgattttaaatgggtcacttcggagggaacagattgtctcttgcacactgaatccatcccttgggtgaccctgtttaatggggttggactctttttttttttttttttcgtctctgtgctgatgtgcctcggttgagcaggtttctgctgaattcagaatccgtgaattttgtcactcagtccattaaaatgatctcctgagggagcaaaatagcagcttacatttttcgtgaatgtcactggaagttttacagggtcttatgtaagtgcccagagagagagagagaggagggagtggggggagatcaggctcctgcttccttcaaggggagaaacggagggggtggcaggtgggggcgtccgcctccctgacatgcagatgcctttcttctctgacacaggtgtggagacctgaagtgcttatcattccgtggaggcagtcacctcgggttaatttttcttctcacttctcctgtcttcccacctcaggagtcagctttgatagacttaagataagg

SEQ ID NO: 103492 - DNA, 1118 bp, Homo sapiens
tcaagttacctcaaaaaaagtctgaaacctgttttttaactgtaatttgaagtttcaaaatgacaaagtgctatatctgaggactttttcctcctgattactttggtcatcccaaaggcctatgcctgaacataacttgtatgcttatctaccagggaaagagcaactctgccccctcctttttcatatcctgaagaaaagtccccgaagagctatttaacaatttgtgcatttcataagtatacatttttatggtaccagttttttacttgtatcaacagtatgaaatagtgaacttttacttatgttgtcatatcttagcacactgagacaaacaaaattattcttgcctcttggagttgacaacattgaattttataaactcccaaattattgaattgagactgggttttaacacctgtttcacatttgccaacatttaatgtaattatgacctcccttttctaatgtgaaaatcaaacctaatattcattttcattaatcctcacaatctactctctacccctgaactctgaattttcacagattgtattcaagacctggaaggaatatcaggggttcatctgatcttatataaatgttgcctgaactctgcctttctttcacactgttgcttgagatttatctggtatctttccaaaactaaaccctgagctgcaataatatcctgattttaaagaacgtagaaattcagggcccatcggtctgcccaagctgtggctgatacagtccgttgtgtttaattttagtttttcaagctcttggctgccccagttcttcagtgaattggacgtgtcttcaggcctcattccttcttttttcttcaggttatttaatccagtaatttataaaatgctcttcagtgtttttaagaaaatttaaacagtggtagacctaatatatgtaatgccaacaccacattttcttggttggcctgtgcctctgagaagcagttcctaattttctattccctctcacaactttttaatccactagttttttaaagcagccagtaacgagaccacgatacagtcatctttctttctttctgtcttcagaggtacttatttctattctgttaggttgcccaactctgt

SEQ ID NO: 103493 - DNA, 1331 bp, Homo sapiens
catcatattgacagtacttctcttgattatttctagatatttcgtctttggaatcgtcacagaagaaaaagaaaaagtccagcccacagtctactgatacagctatggacctgttgaaagctatcacttccccactggcagcaggctccaagccctccaaaaagactggggagaaatcctctggctcttcaagccattcggagagtaaaaaggagcaccacaggaagaaagtcagtggaagcagtggggaactacccctagaggatggtggctcccacaaatcgaaaaaaatgaaacctctctatgtgaacacagagacactgacccttcgggagcctgatggtttaaaaatgaaacttattctgtcaccaaaggagaagggaagcagctctgttgatgaggagtcttttcaatatccctcccaacaagcgactgtgaaaaaatcctcaaagaaatcagctcgggatgagcagggtgctttactcctaggacatgagttacagagctttctgaaaacagcccggaaaaagcacaagtcatcctcagacgcacattcatctcctggccctgaaggctgtgggtctgacgcctcccagttcgcagagtcccacagtgctaaccttgatctttcagggcttgaacctattctggtagaatcagactcatcctctggtggggaactagaggctggggagttagtgatagatgattcttaccgagaaatcaagaagaaaaagaagtcaaagaagagcaaaaagaagaaagacaaggagaagcataaagagaagcgacactccaagtccaagagaagtttaggactttctgccgtgccagtgggagaggtcacagtgacatctggccctcctcccagcatcccatacgctggagcagcagcacctcccctgccacttcctggcctccacacagatgggcatagtgaaaaaaaaaagaaaaaagaagagaaggacaaagagagagagagaggagaaaaggtaaagcatcttttaagtgtggtgggggtaagagattaagcaggttcttcctgggtagtcagtggacttttaagttaagcagttgaggtaaaccactgggaattaagcatgtttgggggatatgttggaatgatataaagtataaaatattaccagtagcccagtctgtctgatatagaagcaatctttttttttttttttgagatggagtctcgctctgtcgcccaggctggagtgcagtggtgcagtctgggctcactgcaacctcctcctcccaggttcaagcctcaccctcccaagtagctgaaattacaggcacccgccaccacacccgactaa

SEQ ID NO: 103494 - DNA, 2908 bp, Homo sapiens
tccctggatttttagagtcagatccattgggcgtcagagatgccctgccttaatgagcactgtcagacacacataaggctttgtgacacacagtgcttccttcatctgttggcccatggaacatgatgctatattatcaaatgcatgctgtactttcactgaaactagaaaacaagccatttaccaaaacagtacttaagaaagcagcattctagcccttgaggtactacaattcctgtgtttcctgtttgctattctgcacccaaagacagtacaggaattgtttccctcttttttacgaggattaatgggagaagtcagcagaaaagttcctagcataacaaacagcaggatgccgtcttcattctcacctgtttttctaactccatttgatttttcttatctctctccttgaacaaagaaacatctctcaggaaaccaaggtacagtactcttcagttgaacatttttctttgttttgcagtcaaacacattagacaacattgcttacatcatgccgggactgtgacagcaaagaatcctgggacagaaaccttatcctacaccattgctggtttgtgtatatatgactgttgcagattccttcagtggcctctggctgtaggttttaaatttttatatctatacatacatatatacatatatatataatgtacaatatatacatagactgtaactactttgcttttaataattttatgaaatggcaaaggtttagccaagaggaaattttggcatgaatacaggcttgggattcttttttctcctgtggtggataaatctgccttaaaaatcaatgtaacttgggggctgggggcttgttctgggtgccaagcgcatctctttatggacagctaaaatgtgattattttccaagctcagttggacctccagacccatcactgaccatttgccttacctgtcttagtctgaaatgtaataggaaagataacgggaagatgccagttgactgaaaattcaaagcctttcaatttgaagtgacctaggtgggaggtgataaaatttgttccctttatagttatggaagtggcttaggtgaattgagtagagggttcattccaattcctactgtataggtgtctgtgtctcaaaatttattgtaatcattggtaccattggtggcctcaacagaggccaaggagttctgtgagccctggcagcaaaaaacaccttggggggtgaagctgtcaatgccaccagttggacctccatacattctgagctaacccagaatctttagtcggcagaattaagtgctggtgtctttcactggcagcatgaagttagccaccaagtcctcacaagccgtgctgcttagttgctcggtggttatggataaactttgcccagcatgatttttgggttcatcttatcagttcccctggtgggcagatacacagtgttctgcattccacatgtaagtgaattgcaaaaacaaaacaaaactcactctcttgtaggtttatttatgtgtgtgtgaatgtgtattttaattatgtgtatttaactctttaaaatctcttagattttaatttatcctgtaaatttctgtatatataatttaataacagaagcctccaccagcaacagcatgtggaagatacagatttgtcatttctcccttccgccctcccttctttccttccttccttccctgtttccttccctctttccttccttcctcctggtctgttccaaaaactctgaatcatctacattttaaggtattttacctcaaaaatgaatcattgtgttaggattctaattctttataaagaacttcatgggcttcaataatgtctagaaagtaaaataaagaggaatgttaccatccccagctgcccttatttccagagaaccagacgtttgtttcccagttggaaagaagacagttgagcacttcaggatggtttttaaatttggtatgagattctctgccaacaccaagctctgagttaactgtgctttcttctcctggccctgacagagcactacagcatcaaagtaaatctttggggacagtgtagcccatctgcatcctatttaatttcttcccttctccccaccagtgttgtcacagggctatgttgcttaaaggtagtctggctgctgaatccctttctcagctcagagcagttttaagatttaattgggaatacagagaaacaggattgtttgagaaccaaaatcaagaggaacagaaatcttaacttgatttcatgtgttagaacattgtaccatgcctcttctgtatctgtggaagtttcctgtttgacacagggtatctaggaggggcggggaagacatggatagtataggaagacattaatcctagcattgtcatttatatacattaatgaaatcctgatgaggacctgctttttgtttgttttcctttgaaacccagccctattgtatttgtatttaaaatttgtacacatttgtataataatctgtaccttgtggtatttggtactattagaggaaaaactttggattcagaccttcttgcagtttttatatcattgttttattttgttttttaaataaattctagtggtttgatccaaatcccattacagttgtataaagaaataaaattttgtacttatattattaaaaatcacatttttaatatttgtagtccagtctcagctgtcttttccctaatcatgatcatcatagttgctatgaaattataaaacctgtttttcactctattctaccataattttcttaagaaaaaaatcaacccacaatggagattaaatttctaatcttagccattttcttaatatactccttactctgcttctattaacttttacattgtagaggttctcattttctcttttgcaaattgcaa

SEQ ID NO: 103495 - DNA, 1158 bp, Homo sapiens
cgagaccagcctgggcaacatggcgagaccccgtctctacaaaaaaaaaaaaaaaaaaaaatacagaaattagccgggcgtggtggtgcgtgcctgtgcacccagccactcggtaggcagagctgggaggatttattggatctgggaggtcagggctgcagtgagccctgatggcgccactgtactccagcctggacgacgcagggagagcccatctcttgaaacacatacacatacacacacacacacgcacacatatatataaaaatatacacatacaaacatacatatacatacacatacatatatattatatgtatttacacacacacgttgttcctgagatcaccaagtgaaggttaggaatccctggaaatcgcttggcagtagatctcataggtgctcattcttgggcaccaacaccatgagaaccgacatgccttcacccaaacagccacacttctccggaggatggtttgggtgttccgcattcttgcatgaagaaaccatcgcattaccgtgaaattactcttcatcttttttgatgacgacttttcgtcttaagtccagactgggaaaactttaagatgagacatattttccattcttagtgtcttgcgaaacctcacgaaagcttgtcgacccggctctgtgttgtaatcgccaccgtggctgtcggtggctcttccgaggttttgtaatcaatgctctccaagggggaggtggcagtccaggatttacacaccaggaagctcctgaaccagggagaggaactgccctctcaaaggacccctgccctccccggacacacacccaccccacagtgagtcatggttttttggagctgaaaagagaaggcagctctcctctcatctatatttctctgactacagaaaccactgcttttatcacatgccaagtttaagacttactacttaaaaataaacaagtaaataaaagacctggcttcaaagtcagccacatactcttaaggctttctggaaaagctcacctgggttctggatttcagctaatcaaagcaaacttctcttcttaccttgaagcgttgcctttcttgggcaagaaatacttctgtgcaaagagaatgctactaaatcataataccttaaagcacaaatggaattttgcaggtaaaag

SEQ ID NO: 103496 - DNA, 1044 bp, Homo sapiens
ggccaggcacggtggctcacgcctgtaatcccagcacgttgggaggccgaggcgggtggatcacgaggtcaagaaattgagaccatcctggccaacatggtgaaaccctgtctctactaaaaatacaaaaattagctggacgtggtggcacacgcctgtagtcccagcaacttgggaggctgaggcaggaaaattacttgaacctgggaggcgaaggttgcagtgagccaagatcacgccgctgcactctagcctggtgacagagtgagactcaatctcaaaaaaaaaaaaaaaactgatgggtgctggggaggactgatagaactgaatgtgcagggctccaagggcatggtgtgtggttacaggaataagcagttcggtttcagtataaatagctatccccagagccttgcaaagatggaactggctgccttgttcagtagtgagctccccaccactggagctgtgaaggcagaagccggggtggggagggcgactataaagaggattcctgtgttggttagcagactagaccagggtcagtgagctttttctataaagggccagatagtaaatacttgtggcttcgtgaaccagatggtctctgctgcaactacccagttctgccattatagcacaaaagcagctacataggccataggtaaatgaatgagaatgactgtgcataaataaaaatatttatgggcaatgaaatttgaatttcacgtaattttcacatatcatgaaatattattcttcttcagcttttttttttcccaactatttaaaaatataaagaccatctgtagctcgagtaccatacaaaacagactgaatttggcatatgggttcatagtttgctgacttctgaatcggagcagctggccagaggcagaatgatggagcacactgttcctcaaagtggggtaccagagcacccacactggggatgcttgagggtgcttatccccacagtgtgcccatgtgagccctaatatcttgaagcttctgtttcctgatccgtaagtacaggacccacattag

SEQ ID NO: 103497 - DNA, 1060 bp, Homo sapiens
ctcctctgtcctccggcagactgggtttagcaggcactgtggcttcttttgggcaccttaaagcagggaccatgcccaccgagtccaccatggtatcccagtgcctggaaccggcttggcttacaaatagccgtgtagcaagcgaagagtcacccaccctccccgagccggggcacagccgtgaggagagagcctcccttgcaggacagcgtgacatcacgtggaataacaagttctacatgcctactctggcacacactcctgacagataatagacagccggcagcactgtgctcaagtgcctggcccatcagccagcaggtgtgccaaggccggcagggtggctgcagcaggcggatgagtactttgcatgtgacacttgcaggggagggaaccttgggtagtgccctgtgtcagaacagggtctcacccttaaaaggcggagcaaagcctgtcttatcacacagtcctccatgtagtcacaatacataccagccagagtgatgtgtgtaatggaacgttacctgcaagaaacagggcacaaaatttcctgtgtgcacgtggttgacgcgtgaagatagcatctaggaaggcgcagagaacagaaaacaggccatgcggcacctccctttcctaaagaccgtttacaaaggtgctggcattgcgagttcctgcgttcatcattcatgtaataccaattagtgcctcccacactacagttcacaaaaggctgccaagcccggtgcttgctaccatgcagacctgcagccagtggtcccggccatggccctgacaggcttccagaactctgcagccgactcccggcctggaaatcttaccctaggaactgccacaaagtgaaaatttcgtggaactgaatagaggtggtggtggttgtattcagtattacaggtgtaccaaatgccactgaattatacatggtaaaatggttagttttattttatgtgactttcgcctcaactttttttaaaaagaaccaccaccacttgctgagtgtttattttgggcccgtaccgtgctgataccttgccgtgctgat

SEQ ID NO: 103498 - DNA, 1726 bp, Homo sapiens
cctctgagctcctcatttgagagctggaaaggtctgtaggcaacgcactgtcctgtctacactgcaggcggatgcagaatggcaagaggccatttggaaaggttctccccaatcccccagcatgggaacagacgcttacatcactccagaaccactggcagggagagcctgggccaaaggacctgtgggtgacattgaagctcagtaaacccaggcctccgcgggggcagggaggccggctgactgagttgggtgctgctcggcactttggtgctctggcaaatgaatgtaaaataaataccagtggctgagaacagtcttgcccacaccactgaaccagcccagatctcagggcggccagacacacgtgggcctcctagccgtcagcatgggtttggctggggaagatataaatgctgtcccaccctcctccacaagcagcatttatatccaggtgaattggcttaagcaaaaagcaaaggcaattcctgcagtgggaagtggagagtggggagggaagttcagtgccttttccctgggccacaggctcaccagtcgattgacatctcagatgctccttgatttcctcttggagagccccttctctctagaccatgtttagctcagagacagcattgggattctgcgtgcactgacgccagtcagggaaggaagtccagcccacacaccatacctctgcccaccctaggccgtgccctccagtaaacaagtcccccagtcctggcattgtcccagtcctccacattcaagggtctcactccaggaagtcccatctcctctcccgggcctcctctctgggacacaggaggagccacgagggtgggggttctgagcacctcctctcctctgaccaaggtgctcgacggcacctctcggccctccaggtcttagaaacctgtgtcaagaactgcgggcaccgcttccacgtgctggtggccagccaggacttcgtggagagtgtgctggtgaggaccatcctgcccaagaacaacccacccaccatcgtgcatgacaaagtgctcaacctcatccaggtgagtgccaggacagggcagggcacggccaggaagagctgtcagtgcaggagcttcctgcccagtggagagtcgaggccatcgtgtttgtcccaggctccgcttctcatttcggggcgtctcggttgtcggctggtgggatgttctgtggggagggaggcttgccaactgcgtgctttgctgtggagtgggcagggcagatgtagttaaaaaaaaaaaaaaagcagggaaagaatgtctgttctctgtctgagtgccaggtgggcaggctcacaggtgagctgtggttaccggctgtgtccccttgtcccctctcagtcctgggctgacgcgttccgcagctcgcccgatctgacaggtgtggtcaccatctatgaggacctgcggaggaaaggcctggagttccccatgactgacctggacatgctgtcacccatccacacaccccagagggtgagagaactgccgtaccgggaaccaagggaagggaggcaggactcatccccagagacatcaccaggctggcccctgacttcctgggctcttgatgttcccaggagccctcactgatcctgttttcctcccactagaccgtgttcaactcagagacacaatcaggacaggattctgtgggcactgactccagccagcaagaggactctggccagcat

SEQ ID NO: 103499 - DNA, 1022 bp, Homo sapiens
cccagcacttcgggaggctgaggcgggtggatcacctgaggtcaggagttcaagaccagcctggccaacatggtgaaaccccgtatctactaaaaatacaaaaattagctgggcgtggtggcacatgcctgtaatcccagctactcgggaggctaaagcaggagaatcgcttgaacccagatggtggaagttgcagggagcagagattgtgctactgcactccagcctaggtgacagagcaagactccatctcaaaaaaaaaagaaagaaactggagaccagtggcccgggcttcacattccagctctaccagttaccagctatgtgtccttaagcaaatgactggcctttctgaccctcagtctctttatctgtacattggggcttatcctagcacctatacttgtttataatagaagtgtgagaggatatatttagggagctttacatggagttagagcccgttcaatagtattcctctctgcctctctagagacttttaatctgcaggagtgtgggcagagaggaataaaagagcggaccctggccaggcgcagtggctcacgcctgtaatcccagcactttgggaggccgaggcgggcggatcacgaggtcaggagatcgagaccatcccggctaaaacggtgaaaccccgtctctactaaaaatacaaaaaattagccgggcgtggtggcgggcgcctgtagtcccagctacttgggaggctgaggcaggagaatggcgtgaacccaggaggcggagcttgcagtgagccgagatcccgccactgcactccaacctgggcgacagagcgagactccgtctcaaaaaaaaaaaaaagagcggaccctaaagcagcggggagaaatgcgagggtgctctttgaattccgtttagttccttgactgtgtgttgagtgacagccacttgtccagcaccgagcacattttgtgggtgacccccacacgctttggcaagacctccaagcaccattctctcatgcatgtcaacgtgtatctgga

SEQ ID NO: 103500 - DNA, 1051 bp, Homo sapiens
tttgtatttttagtagagacggggtttcaccatgtttgccaggctggtctcgaactcctgacctcaggtgatccacctgccttggcctcccaaagcgctgggattacaggcgtgagccaccgtgcccagccacaaggctgcatcttaaagcgattgagaacgtggcctgaatgaggatgggagtctcttgaaggcctgcccacaggtgggaggctcagcagttgggaaggaccccacccccagccagctttgtgttcacctttcccatttcctcctcagcatgccccaggatttgtcagaggccctgaaggaggccaccaaggaggtgcacacccaggcagagaatgctgagttcatgaggaactttcagaagggccaggtgacccgagacggcttcaaggtatgtggcttggtgggactagccctggtggagggtgtggcaggtgtgggtggacccaaggctcagaccagtggtttaagtggggatgctgagggaccagatgggcatgtccaatagaatcatcttaaaaatgatgacactgaggctcagagagggaaggtgagttacccaaggtcacacagcaagttcagcctgctctgtaatgttgtggaggggctggggcagcagtgccgttgactgagcaccggttccatgttgggcattttgtacacgtggtttctaatctgtgcttcaaccctgacgagaaagatgaggactggaaggctcagagaggttcagtgactaacagaaggtcacacagccagtaagtggaaaaggctgaaatcaaccaagaccgatttcagccttgtactccttgtatttcagagcttgtactcctgatctaactcgaatttgcctctgaagataaggaataatataggttggagtcttaacagaacccttttctaacagtgagactgagggtgcctcatctaatctccctaagccacgttttccccatctgtaaaagagtatttcaacagcagggttttcttaagcacccactatatgccaggtactgattttgctgtttcccagcactgttgtgaa

SEQ ID NO: 103501 - DNA, 1059 bp, Homo sapiens
gagaggaagatttacagctcagacctaattgctggcaaagtttaaggagaggacagggagcaggcagaagtctgaaaaccacgcctgggcccaagaatgttttcacaatgtggcctggctgcacagggaagaacagacagcttgaagaagtagtgagctgcccgtctttgaaggtattcaagcagtggctagagggacacctgtctgtggtcttgcagaatcctggcgttgggcagtgactgtaccacagaccctgaggccgctctgctttgctttcctatgacatcagacaccctgatgcacgcccacctgttaatgaccttgccccattttctctttcagattctgcccccgtggagactcccagagggaagcccccactcaacacccgctcccaggctccgcttctccgatgggtccttacactcagctttctggtggcgacagttgctgtagggctttatgccatgtgaatgcaggcatgctggctcccagggccatgaactttgtccggtggaaggccttctttctagagagggaattctcttggctggcttccttaccgtgggcactgaaggctttcagggcctccagccctctcactgtgtccctctctctggaaaggaggaaggagcctatggcatcttccccaacgaaaagcacatccaggcaatggcctaaacttcagagggggcgaagggatcagccctgcccttcagcatcctcagttcctgcagcagagcctggaagacaccctaatgtggcagctgtctcaaacctccaaaagccctgagtttcaagtatccttgttgacacggccatgaccactttccccgtgggccatggcaatttttacacaaacctgaaaagatgttgtgtcttgtgtttttgtcttatttttgttggagccactctgttcctggctcagcctcaaatgcagtatttttgttgtgttctgttgtttttatagcagggttggggtggtttttgagccatgcgtgggtggggagggaggtgtttaacggcactgtggccttggtctaacttttgtgtgaaata

SEQ ID NO: 103502 - DNA, 1047 bp, Homo sapiens
ggtgtgggcagattcaggggtgcaggcacacctcagccagtgttggtttcctcttctttgcacccttcctgccccaccctgctatgtgcccactccagggatgaactcaagcggcattacaacctgggggagtactggattgaggtggagatggaggatctggccagctttgatgaggacctggccgactacttgtacaagcagccagccgagcacctgcagctggtgagtgggaccccatccctgagcttcccagggctgctctgccccagttactaatagcctgtgcccttccctttctccagctggaggaagctgccaaggaggtagctgatgaggtgacccggccccggccttctggggaggaggtgctccaggacatccaggtcatgctcaagtcggacgccagcccttccagcattcgtagcctgaaggtgggtcggagggcagtggctgctgcatggtgcagagggctttggatgcagccagacctgagtgctagctgtgtggccttgagtgaggcacttgacctttctgaacctgtctcctcctggagacaaaaggatcgtttgttgttttttgctttttgttatgaaaaattacacacccaaaagcagagagtagtataatgaatcccataaagcttcacccagatttaataattaacattttgtgttgtttcctattttgtcctttttcttttttgctaaagaattttaaagtaaattcatgcacagtggctcatgcctctaatcttagcactttgggaggccgagggaggaagattgcttgataccgggagtttgagaccctggctctccaaaaaacaaaacaaaaaaaaaacaaaaaaaacaaagctaggtatgctggcatatgcctatagtccaggctacttggaaggctgaagtgggaggatcaaggggcctaggaatttgaggttacagtgagctctgattgtgcctctcagcactttagcctgggtgacagagcaagaccctgtctctaaaaataaaaaataaattacagacatgacactttatcccgaaa

SEQ ID NO: 103503 - DNA, 1699 bp, Homo sapiens
tattgtccggtgtgggaatagtcattaagatggggaaactgaggctcaaagagaagtgacccagacagaagaccacacagcaggttttgacagaacttgaactagaatgtgggcccctgcctcccaggtttgttctgtgttgtactctacaggtccaaggatgtcgccatcagagctggggtcaggtctctctcctggcacctgccactttgtagtgaaatgtgcttagtgtatctcttgccctgccacctccccccccaattgtgctgcgaggtctttaaaagcaggagctgtgcctgaggctcctctgaaccccagggtccagatagcctggcactgggtggatgctctggaagcattttttgagcggaacagaagagctgtggccctccctgcagctctgtgcccacctcctccaggctcctgcccaggatatttactggcatatctcagatgcgtcctggctccccttaaccaacaagcttcccgatggctctattacagtcggacatgatgtcacacctggtgaagatccctggcatcatcatcgcggcctctgcggtccgtgccaaggccacccgcatctctatccagtgccgcagctgccgcaacaccctcaccaacattgccatgcgccctggcctcgagggctatgccctgcccaggaagtgcaacacgtgagtctgtggcccagagggactgtgggaggtgacctgagtgaagatcagaaaggatgagaacaagtagcaagcactgcctgcagctgcttctagagatccactgggatgggctgggcaggggtgtgcccttaggattggcacagatctgatgccctgtggctctgagacaccatgaacagggtccctctacattggtgacttctgtctcaccaggatacccagacagcgttgtagggaacccagggttgggagggaaaagcagtccagggtaatgagtctacttggaatcttctgaagcaaactatggtttgctcactaggccagatctagcctgctgaccctatggcccaggaacacgttcgttcatttaagtattgcccacagctggtttcgcactacaaaggcagggtatgtggcctcttggctggcagaacctggaatgcacatcctccggccctttctagaaaatgtttgctgcccccagtctgaaggaaccccaccctcttcactggctgctctttcttggctccttcgctggtgcctcctcagcttcccatccacctgtggcacagctgcctcattccatgctgttgacatctctcacttggagaggcacgctacctcctccctgatcccccgcgtccaccctccaccccctcagtctgttttccacccagcagccaggtgtcccttgacactcaggtggtccagtcatttacttcttagtcaagtcctgcacagcccaccacgatctgctcctggcttccccaggcctcgctgcccctcctctctccaggcccggcctcactgcctccttcctgtttctggaatacactgactacccccagtctcactgcctttgaccttgctgtttcctctactgggagtgctgttcctcaagctaccatagtctgtgtcctcacttcttcaggcttctcttcacatgtccccttaccaggggcatcttgcccaacccttcatcttcagtttggtgtgcacgtacctcgtctctcccacac

SEQ ID NO: 103504 - DNA, 1038 bp, Homo sapiens
attctccaggtagctttggtgactcttttcccttaccttgtacagagatcaggctgggcgccccaaatgcccattggacccgtacttcatcatgcccgacaaatgcaaatgcgtggacttccagaccctgaagctgcaggagctgcctgatgcagtcccccacggggagatgcccagacacatgcagctctactgcgacaggtgaggcagacgggctgggaggtgggcatctacgacggtggatgtcccagctgtggccctaacccgagtgttgggagtgggtcatctggagcagggtgagtagggtggagaaggtggccagttgcagagcacctgctctgtgcctaatgcttccataagttcctctcatctcgtctttccataatctgcaggggcatgtcagccccattttgcagatgaggaaatgtaacttggagagattaaatgacttcctgtgtggaggagagccgggctttcagcctatgtgcattgctttccaaagtctgtgttcttcttaggataagaggcccaggatgcacagctagataaccaatagctggcaaagcctcttcccagcctgacaccccacctcctaccccaggctttctttttttttttgagacggagtctggctctgtagcccaggctggagtgcagtggcgcgatctcggctcactgcaagctccacctcctgggttaatgccattctccggcctcagcctcccgagtagctgggactacaggcgccctccaccatgcccagctaattttttgtattttttagtagagatgaggtttcaccttgttagccaggatggtctcgatctcctgacctcatgatccgcccgccttggcctcccagagtgcgtggattacaggcgtgagctactgcgcccagcgtaccccaggctttctgttaagatcctgctgaacagccacggtggctcatgcctgtaatcccagcacttggagcggctgagacaggaggattgcttgaggccaggagttcaagaccagcctgggcaacatactgagacc

SEQ ID NO: 103505 - DNA, 2722 bp, Homo sapiens
ttgaaaatgcatgtggtgtttagcacaattccttcatgcagattacgtaatcaggatgtatgattttccaagcagttcatgaatcctgaaaacttacgaagtgggtatgggaagaggggagttggaggctcatggagtgacggtgatggtcttttctggagctgtgatgcctgatggtataaagcacttctatgtctgctgcctcacctgactccacaacatgagaggcaggccacttcgtcatccccctaggctcagaggtgcaatgacttcgttgaggtcacacagcgactaagtgtccctccacaccaccctgtctctgactgggggacttggagacttccctgtttcaacatctcattttgaaaacaggaaatgaaaacccagaggcaaaatgagctcacagagccatgaagaggcaaaaagggcgagtggcccctcaaggaggctggggggcgtgaagaggaagtcttgccctgagaggctaaagggcaccacacagtgagctgacagcagacacgtggagatggggcttttggagggctctgtgggctggcactaagcctcctaaaccagcgtacaaatgagttagcgagttcagcgagagtcaggccaccacctgcctttctgtttggctgtcactgtgggcaacaccatcctccaagcagctgagcatgggctgagtgacgtggggagagaggccgttctctgggctccgtggggctggagccagctcagcatgtggtgcctgtggcaaaaatgctgcagtggaccctgcgtgtcctgggcatgggtggaatcagagacttgctgtccaagtcagaatctcagcttttctcctttctcctctaccctcctctcaggtacctgtgtgacaaggtcgtccctgggaacagggttaccatcatgggcatctactccatcaagaagtttggcctgactaccagcaggggccgtgacagggtgggcgtgggcatccgaagctcctacatccgtgtcctgggcatccaggtggacacagatggctctggtgagttggctttggggtcctggcttagccctgctaaaaggctgtgcttgcatacttctggtaacaggcagctcgttacttcatgaggtagcccaggatgtccttgtgttgctcatatcattagaacgttcatttttatattaagtgatccctggaacttccacacattggtcctagctgtggctcctgggctgagggtgtttgcctaagtgcaggattaaggcagaaggactgaggtcaaatcactggggaattactgaaagccaagtcttcacttctgtgacaggaaatacaagagaagtgaaacgcagggttccaggcaggcagccgcctagtgtctagttggagaaataagaaaactgtgagaccgctggggacatgtgggtaaagtggtggctgttgtgggtcacgcagttccaaggaggtgctaaaggaggtctgagaaggaggaggtcggggctgggccttggggaaggttttctgggaggaggttaatctgagctgggctttgaagagtggtggatgtggaagaacttccaggcgggaggggatggcaggagcaggtgaaaaccccggcctgggcaaggtactgagtggctggagggccgagtgggagtctaggggatgaggggccaggtggtgtaagaggccttgagtgccgagatggggagctcctgcttacacctgagggcagcaggggccactgagggttttcaggtttgtttcagccctctggctgcagtgaattgattcagaggggtggcttccccagggctcagtccatggcccaccccacatttacacaaactacctagattattacaactttaaaaccactgacaggtaagtagctctcacatttccatttctagcctgggcttctccccacgttccagactttaataaccaactgctgatttgacatgttcacttacatatctgaaaggcatctcgaactttacatggctgaagctaagctcccctttccccaccctcagactggctcctctcagtcttcccatcttcaccctttcagttgctcagacaaaaacccccaagtcacccttggtgctcttttctctcatcccccacatctaatcactcaggaactctggccagctccacctttaaaacgtgtccaggatctgaccacttctcatcctccccacctgctctgagcccttgtcagccctccctggatcaccgttgatcctccccagtgttcgtctccaccttgccctaccttctctgttctgcagcagccagtgagcgatgctgtcatgaccaagacactatatcactcctcggctgaaaggggagaccttccagtggtttccaaggtcctatgccatctggccctctgtttgctcagaacccttctccccacttcccctcaccctttggaccctggaacacaccaggcccattcctgagggcttgagagctgggatctctgtttactcagataggttgtgctgtcctggccctaagggccctaagggctctgccttctgggaggtccctgagctggtgccaggatgggcagtgggctggaagagctcccttgtactcactcatgcgcctgctttgcctaccaaggccgcagctttgctggggccgtgagcccccaggaggaggaggagttccgtcgcctggctgccctcccaaatgtctatgaggtcatctccaaga

SEQ ID NO: 103506 - DNA, 1048 bp, Homo sapiens
cgatgccctgaccctggcaagggggagactgggggcctggcaagtgcagtgggagagcactgagcttagggtcgtgtaggtaccaggacttaaatctcagcactgagcttggggtcagtagcagggatattattagcagctgccatttactgtgttcttcctatgcacagccattctttgttttttttttttgagacagtctcactctgttgcccaggctggagtgcagtggtgtgatctcggctcactgcaagctccgcctcttgggttcacaccattctcctgcctcagcctcccgagtagctgggactacaggcgcctgccaccatgcccagctaattttttttgtatttttagtagagacagggtttcaccgtgttagccaggatggtctcgatctcctgacctcgtgatccgcccgcctcggcctcccaaagtgctgggattacaggcgtgagccaccgcacccggccgcacaggcattcttctaagtgctttatgtgtctgaagcccagtcattcctcacagtaacctgttaacgcagctgttgtgcccattttatagatgagggaattgaggcatagagagttaaagggacttgctccccagcacatgcaggggagccaggagcctgctgtcatggtgcttgttctgccgcaccgtgcacagcccacaggcagctctctgtccttttctttcaagctgggaggaacgttgctcagatgctgggtgtacccgagcacagccataagagccatttcctttaaccctcctcttctgggaggcaagctctgtcctcattgctaggcaagacctaccatggtttgggaactacagagctgggtaggaacatgggtctcaggccacagccactaccttcttaccaactctgaggcccatgatagttgggggagtcaactgccagcccaccaatctggtgactggatgtcacatgcgatgccctcatggattctcaccttgtccatctacccttcgtcccccaggctccctgatggacttactcgccgaggagacatcaacctgctga

SEQ ID NO: 103507 - DNA, 3270 bp, Homo sapiens
aaagtagctgggtgcggttgtgtgcatacctgtagtcccagctacttgggaggctgaggtgggaggatcacttgagcccaggagtttgagaccagcttgggcaacatagcaagaccccgtttcaatttaaaaggaagaaggggaaagaaaaaaggaaaaacaggtgaagttacttctgtttaactcgctatatctaaaatctcatttcaacatgttgtttgatatgtagattattgagatactttacattcttaggagctctgagtctttgaaatcgtgcgtattttgcacgattaaggacatctcagttaggactttcccaatttcaggggctctatggcagtatgtggcgtgtaggtctatatagagacgacaagggactcacgatgggggcaggctttccctgggagtcaggagtcctcatcctagccctgaggctaactcctcttctctgggcctcagtttgctcatctgtgagttgggcctcacaagactgtgtcacagggctgtggtgaggcttaggtgagccatggatgtgatgccctcagcggggagaacatctgggcacaccgaggcccagggcagcatccccttccagagggagacgcactgagttggagccttgagtcctattctgtaccctgcagccagctttgatgtgtgaccttgggcaaatcacaacctcagtgggtctttttgtcttatgggggtcaaagcatggagttgttattgggccctgacaccaccccactgccccaggtatacacgtctgggaaaggcagcagcgcagctggactgacagcctcggtgatgagggacccttcgtcccggaatttcatcatggagggcggagccatggtcctggccgatggtggggtcgtctgtattgacgagtttgacaaggtgagtctgatgaggtgggtagtagccaaaaggtgggtggcaccagggtatgtgacttcctgtgctcagccagcagaaatcacctctgacttgggagacatgttttcaatccctgggccggtcactctagtaactgtgggaagctgcttaacctcttcaagcctcagttcccatatctgaagagtggggagaagaaaggcaagcccacacagttgttcccatgattagaggtgacctggttgctgccattggccttgcgtggagctggtattcaggagtgagggctgctgttagttttcctgtttctactgctccctgctccctcacttcagtaggtctgatgatatttctctcttccccacttagatgcgagaagatgaccgtgtggcaatccacgaagccatggagcagcagaccatctctatcgccaaggtgagtggccctccatggagagcccagcctgcagcagcccagcgtggcccaaccgtcctcaggctgccctgattgggaccaagttctctttgcccaggcctagaatctgtgtgtgtgtgtgtgtgtgtgtgtgtgtgtgtgtgtgtgtgtgtgtgtgtgtgtgtgtgtaaacgtgtatataagaaggcatctttgccatctcctcccccttttcgtcgtctgtcgcctgttaggctgggatcaccaccaccctgaactcccgctgctccgtcctggctgctgccaactcagtgttcggccgctgggatgagacgaagggggaggacaacattgacttcatgcccaccatcttgtcgcgcttcgacatgatcttcatcgtcaaggatgagcacaatgaggagagggatgtggtacgtccaggggcagggctggtggccatgggacctgcctccaggcaggcttgtgattgtgtgggaaggagaatggagaacaagggccttggctggcaaagtcctgactgtcaggctgtgaaattggggagcacgtgagagggcggttgttgtggactgcagaggattgaagcagggtctggagtcctgtggcctgctctgcctctgccgtgagtgataagctgtgtgatttgggctaaatcagtttctccctgggcctcagtcccttatatatgaaacagaggagttgacattgggttatgagtaatagaacctcagttctggttagtaaatttttcaaagaaaaaaacatagtggtttatagaattggtaagtccggcggcttaaggcccaggtagatctggattctcaaacaactgtctctgcctttctgttctgcttcccttggtggaatctttgtacttgggcagctgttcctcttgtggtggcaaagacaaaataagattttgtcctgttagcttgtagcttaacagcccccaggaaagaggaggccccgtcttttccagtacttctatcaaaagtcccaggatagactcctattggcttgggtagatcctatgtccatgcccaagttggggtggacaagatacatgccccaagtcggggtggacaagctgaacccacccctttatggaccagggcagaggagcaaggagcattaagttctctctaaaggagaatccagatgctcccatcagaacgagggcctggtgctgagcaaacaggctgagcacgcctgagatctcagcaccctttccggctccttgatgccagggccccatcagctctttctggctgttccacctcagtgctgggactcaggcttgggacggcctgtgggatgacccattatcccctctgctctccagatgctggccaagcatgtcatcactctgcacgtgagcgcactgacacagacacaggctgtggagggcgagattgacctggccaagctgaagaagtttattgcctactgccgagtgtgagtcctggacgcaggcccacgggggtgaggttgcccagcttccctgggtgggagagaacccagtcccctggtcctgctcctcctcatgaagaacagcccagatgttgctgttctgaggttctcagctctactgaatctgctctgctcccttctaaccttgcgtagctcactggctcttggcttcagttttcccacctccacaccaaggaggtgggatttagatggtcttgaagacctcctcgagtctgacatgcagggaggcagtgaagtgtagacatggtagacatgggctctgggtcatacctgccttcactctatgactttgggcaagttggttggcctctctgagccttgatttccccaggcctatcgatgtttgctaggatttttgtaaggattgcacaagatgatgagtaagtgcttggcatagccctgccctgggtaaatactcagtgagtcgcagctgcaatttgattgttc

SEQ ID NO: 103508 - DNA, 3922 bp, Homo sapiens
ttgttgtcccccagcccatatgagtgggcagctgtggtgtggtgggaaagtgcatgtctgtaagctggcagggggctgggggaaagggtaggtgccctaagagtccctcctggcctcacaccagcctctccccactgtcctgcaggaagtgtggcccccggctgtcagcagaggctgcagagaaactgaagaaccgctacatcatcatgcggagcggggcccgtcagcacgagagggacagtgaccgccgctccagcatccccatcactgtgcggtgagcaggcgggcagggctgggccatggcagatggggcttgctttacacagcagggtgtgcttggcaaccaggggcagtggtccaggcttttcacttggcacaggcccatagtagctctgggcaggaagagtccctttggagcataaactatggcctccttgatctcaatgatgatccatgtttcttgatttaaggccgggcaaacctagacccctcttgtctgaatttggcctggcttctcccattgtaggaagcccgaagggagggaaggacccaggcctgggagtcaagagtcttgggtcccagcctctagcccactgtgtgactgtagggaaattacattccttctctggccctcagtgcttttagctcctaactctgttcattcttgtgactttgtagacaatacagtgggtaagagttgggatttacctggtttgaatcctgtctccagcactgactggttggaaatggatttggctataagtaatggtaaatccagataaagtagcttaaagaaataggaagttcatttctcttttctgtagcactgtctggaggaagatggtatggggactggtgtgaggactcctcaagctcccccttactcttagtccgagatggccgctagaacttcagccatcacctccaggcagcaggacaggaaggaaagagagcttcccttttaaaggacacttcatgaagtcccacacaatgcttggacttacaacttactgccatagattggtcacacaaatacaacctggtacaaaagatgtctgggatgtgttttagtggatcgctgtgtgccagactaaaaactggggttccaagctaggtgcagtggcctacattgtgatcctagcactttgggaggctgaggcaggaggattacttgaggccaggagtttgagaccagcctgggcaacatagcaagactcccatttctacaaaaaataaaaaattagccaggcattgtggtgcatgcctgtagacccagctcctcaggtggctgaggtggaaggatcactggagcccaggagttcgaggctgcagtgagctatgatcatgccactacattccagcctggtccacagagcgagactttgtctcaaaaaaaaaaaaaaaaaaaaaaaattgcagttctatgactaagatcaaaagggagatggattatggggacacctagcagtctccaccacagtcttaccactttgggcaagcacctccctggtaacgggctggctggggaggaagggaatagcggaccgaggctaccctgagcacgctgttgcccccacaggcagctggaggccattgtgcgcatcgcggaagccctcagcaagatgaagctgcagcccttcgccacagaggcagatgtggaggaggccctgcggctcttccaagtgtccacgttggatgctgccttgtccggtaccctgtcaggtgagcagatgcaggggccatggtctcaattgatctgggttccctggctcggagctctgtgggcagggctctggcctgctgggggcctgcagtgtgtgtcttgcttctctgagtttgctgagcttctctgagtttctttttgccataagacccctctcctcctttctccccaccgctgtttcctccaagatgggaagaagcagcttctctccagacccttgaacacaatcctcttgacccaggtcattgatgataacccttctcactggctaggaacaacagttgatgctctgcttcctagagcttgtcagcattttcagtgcttccagagttatttcttgcattttgccttacagctgccccctggaagccaggtgagcagtcagtcctgcccatgttagaaatgagacagctgacactcgaaggggcctttccctggtgcccaagatcacagtcgcttggctggaatgcaagtctcctggcccctaggccagcgttttccacaccataagccatactgtctggtttcggtcagcctttcaacagactgtcccaggcaccgatcatgagccaggctacctacgctggggaaaatctgttccttcacccagcagatacttcattagtgttactgtttgccaggcactgttctaggtgctgggagtataagagcaatcaatcacagggtcccggccctcctgggttctcattctcgttctagttggggagagatagacagtagagaaacaaatgcaggtagtgtaggtagtgaaaaaggcagtgagggagatgatggcagggccaggtgtgttggaaaaggaggacgtgctctttcccatggagtgagtgggcatggcctctgcaaggaggtgatgccaagcagggagctgcatgaaggggacagtgtggctccttgggggaagagctgctcaggtggaggcagcgctaagtgtcagtttccccaggagggagcaggtttggtgcatttgaatggggaggcacttgggtgaggaatggggtgggtggggcctgttcctcctgtcccccttggtgaagactcagcctctaccctggagacacttgctgtcacatgagacattgcaggtggaggcctctgggatgctgcaggcacagagggcaggggtgatatggagtggtgataatttgagttgggtcttatgggctatgtaggagtttgcctcacagactcccctctcaatgacttcttgaccatgagcccaccatctccttagctgaaacaccaaggcctctgtggcagtaattggaagtcacgagcctcctggttgccgagggctcctcagggcacctcgtagatgtgtccagggcaggctggcttccctcctgggtcactgatgggccccttccaactctctctctaatctatctgctccagcaacaaaaggagtcctgctgtggcctccaagggcccgcaggacttggtccctagtgacactctggccatgtctctgctgcgctgggccccgggctgctttttgaatgagacaggtgtgttcctgcctctgtgactttgtgcttggcctggagtgtccccacatgtgccatatcctgtctcctcaatcaggcctgcaccaccctggcacactcggtgcccttttctgacttactcttcggggcctggctcaggctgttcttccttgggctagaggctgtctctgtccaagaactcccattgtcccagctccccggctgcctcacttctccatgcccacaggggtggagggcttcaccagccaggaggaccaggagatgctgagccgcatcgagaagcagctcaagcgccgctttgccattggctcccaggtgtctgagcacagcatcatcaaggacttcaccaagcaggtgagcctgccttggagtgggggtgtgagccggcacggggtgcaggtcttctgctggttcccacccactcagcactggcatcttactcagcagacaggccctgaacgggggtaggatggacaactgtccctttctcagaccttttctagccatcattccttccctagggacatcttcatcaggagcagggatgggggtattttttctgtcccacgaaggggaggggagagcagaggtggttggattctggtgaaaccccatacaagttccccgcagcccttcccgtctgtgcctttccccgttggcgggcgtttcatgg

SEQ ID NO: 103509 - DNA, 1491 bp, Homo sapiens
gacttaagtcccagctctacctcttaattgctgtgaccttgagcaagtggcttagcctccgtgtgcctcagtgtctggtacacagtgggcactcaggaagtgtgggccctttaggtcaaaggagcctgagtacaaagttccccgtgagcctggggatgtctgggctctgtcggagtcccctcgggcagcacgtgccgttagccagccatgtgctcccacagaaatacccggagcacgccatccacaaggtgctgcagctcatgctgcggcgcggcgagatccagcatcgcatgcagcgcaaggttctctaccgcctcaagtgagtcgcgccgcctcactggactcatggactcgcccacgcctcgcccctcctgccgctgcctgccattgacaatgttgctgggacctctgcctccccactgcagccctcgaacttcccaggcaccctcctttctgccccagaggaaggagctgtagtgtcctgctgcctctgggcgcccgcctctagcgcggttctgggaagtgtgcttttggcatccgttaataataaagccacggtgtgttcaggtatctgtgggtttgtgcactcggtgacctgtcacctccatcgtgccctcatggcagggtaagtgtgagggaacagggtctggaggcagactggccagggtttctgacttggatctgccactcagacttctgggtaagtcacgtgacttgagtgctccggtttcttcatctgtttagcggggctcataaagccactcccttgatgctgggaatccagtgagaccagggagtggggaagcgcttctcaaagtgtgtgattttgatccgcctcacctgttccccagtaacttattggggggctgcgagccgtggtgcggcggtcagactgcctggattcatggaccctctccatgccttagtttccttatctgtaagcaggctgatactagaacctgcttcacagggttgtgcttagggtcagtgagcagctgttagtgaggggaatgtagtggccaccaggcaggaactaggactccagccagttctttcctggtgggccacgtgtaactgtgtggccttgggcgagacatttcacttttctgtgcctgagtttatcagtaaactggagatggggggattcctcaccctgagttgtgaggattgaatgacagaaggcactagtgacagtgatgctggaggaaggagtgttgccaagtgcctcggtcactttgcctaatttcagaaagtcactctgagttggtatgttttgtgtttttaaaaaagctaggattcataaaattaaatagaaatcagtgaaataaaatatttgatatttaaaatacatttagaaatacaaagtgtcaagcaaaacgtgaatttggaaatctatggaacattagataaggtatttaaaagtaattgccatgtaaaaatgacacgaacttgaagtaagattatttgatttttctaaaaatacaagaaagc

SEQ ID NO: 103510 - DNA, 1012 bp, Homo sapiens
acaaaatctctcaggacccttgttaactctgactgtctataattctaaaattcttcctggtggactctgagcatcctaggtttgattctcatgcttcctccagctgctgacatcagcctgaaatggctcctttccctctcctgagtccaatccctgacacttaaaagcaaagaaaaagcaagtgaccgttctaacacccttaactaatgcagccaactgacctaccccacgtgcaaactttccaccttgcagctgaacacccttgatcttagggtgtgggtggcaggggcaatggaatctcttccttttacctgatgaggacttcctgcccatggcctgggatgtcagcctccaccttcccccagacgttcagcaccaactgccattccccgtcgctgagccccatggcgcagtctgaagaagacaaaaagagcaagtatgggctcactgggtgtcctggccccaacagctggggtttgaggctgcctggtcccaagggcgtttttataccttctgggatgcttgacaaagatcgctcaatggctcgctgtccccctcccctgccctccttcactttctctctctcatccagggagggtctaatcttttcctttctctagccctcacatgggaagctattttagggcaggtgccattgtggcgaggcaggacagctcaggccacagggggtggggtggttgtgcgtgtggaaagaaggggaggaggttgggcactgtctggactctcatagccgacagaaagggcaccacagaagccgacgccagcagcctgaaacccaacgctccctgcggtcagccctcccaagaggacctgtcatgtttctaagcttggccaccaggtgccccggctggccccaggacagtcctggccattcgcaacctctcacgcaccttctgcccctttgccagagacccctcacccagccagaagtgacagaaaggaaccggatggttttgtgcttatagccaggtggtcccaggcaagtccacaa

SEQ ID NO: 103511 - DNA, 1106 bp, Homo sapiens
ctggttggcagggattggtaacggagagaactgctcatcagccaaaactcaagccttgccttttaggaggccaccagcagagggacttggtcctccttgtctggtacttgtgtacatgccggtgacctgaggactccactcacactggcgagcaaaaagggagcagtgattctcttttctctccccaccccctgccctttgttaccaacaccagtttcccagggggtacatgagtttctgaatttttaaaaaatgtttttggtttggtttttctggggactgataagtgctttaagcaatgtccataccccgtcaagactcccagcttagtcattttcttgtatttttctgttcacagtatttgtgtgtgtgcttgttttggcagctcattttggctgtattatatattgagtgatgaattgatcctcttttttccctaagggatatgaattgtttttcttgtgttatattctgcttgtgaatagctggagcaaacctggggctgacacgcgtaagctagggctgcaaagcgagaagagagccggtggagtgtacttgtccctgacaggctgacctacctgagtctctgagcttttcagtccaaatctttgcaaggctcaaaatgccacagaacctctcctcttctccccactccccatggcagggaccggaccatccctacatgcaacatgctgttcctccagcccctcccattgccatggcaaaacaggtacctttggggcatgggggcattacatgggatgcttgtgtaatcgaccacctagccttctctctcccctcccgtcctcccccagaatcacttcctaggacacccgagctgcttgcccagggtcctgtttccctgctaactccagagaagcatcccagggctttgtgacagtctctaattcccttcccttctcgttaagaatcatattgtatagtagctttcagaccatacagtattcattgggttactcctattattatcaagtagctggaattgtgaaggtcggagtagttagatctttagcttttattccttatttttttgtattactctccatgtgtataaattattgatcatgttgctggcttttataaac

SEQ ID NO: 103512 - DNA, 1943 bp, Homo sapiens
ataaaagcaagtgtcctacagcatttcccaaatgaaggcattaggaaatagaaaagcacggtctttttggctccctggtctagtcacattggtactagggtgacctttcacccaagggacagctgctaaagggagtaattcagagacatggagcttctggttatgggtttgttttgggtttgtttttaactcctgcctccacacatgttcttgactgataactgactcatgtccctgaattaaaatgactgacctatgacagcatcaagcattctttgtaagcagagtgatatatctgagagggcgttgacctgttgtgtagaatacatatcctttcccccttcagaatcctgtctcgcctcgtaactgggagagaggctgtgcctgaaactaggggcgatgtcaaggaagctagaggcctcgatgcaattattactgactctggggaggaagacagagaataaggggacaccaactgcccagtccactggccatttttaagggtccccccaccccaagccaaagtttggtttgttgctgttaagacaatttttgttgtatgtatataaatattttagttagaggagcggggaatgggatgcgggctttcacagttctagggaatgggggcagggaggattttgcttttgcttttgctttgagggagaactttagctgactaaaaaaacagaagtttggggtcatgatcacaaaggggccattcccaaaagatggcaagccacgtattcagtggagactaggccaaattctaaatggttttatccatagcaggggagaataggagaatgagtttaagagtttttctcttcttttttcctagaaagaggtaaggataatgggaaaggtagagaaggcggctcccacagaccttttaagagaggcagaatcttgagcttgaggcaccttgagtgcatctcagttcagctggttctggctgaggcctccaaaggcaagctctgtgctttccagtggtttctgctgcatttccagggatggtgtttaacaccgcttcctccagctcccttttctaagaaagaataaatggagttctgctttttatgaaagggtctttggttttcagtgtcaacactgagaattggggctcttgcaagcatctggatttcacagtatcaacctccccgtcaccttttgaactttgagactccgtacggtcaacttcaccagaggcaggttgctcgaagcagcactgcttgtctgttcctgactctggttctcactgtattaaaaaagagagtcagaggagtctggcatttcgtgagtttgttagaggatgctggctgataattccagaaaacttactgatgctaaatcacagtacatgcatgattctttttcagctttactatagttcatgacctggactttctgtactcttggaagctgggctccttaaaggaggcctctagtgaacacctttatctccatgtccctcttagagcccagagagctgcccataggcattttccagaattcctcatgtcacctagttcaatttccattaactcagatcagccattgtgattcaccatttgtcaggctctcaggtttaacaaaacctactatcaccatcatccttcaacagccacagtctgaattgagccaacatttttttttctttgagaaagaagtggactggggcacaacttttagtctgaggggagctagtggaaatctagacaatagaagtcatcgatagcagcttttcctcaaatgtgtgactcctcaggggctaaactgctcttagcttagaattatgctttactagagatctagcagataagtgggttaatcactaccatcctgtaactagttatatagcttccagacatgagggagacatcaaacagggatggaagcaaccccaaggatatgcaagaagggcatgatgaacccccttccct

SEQ ID NO: 103513 - DNA, 1033 bp, Homo sapiens
tgagcaccttagaagcagaagttggtttcctgacttcactgcacaaggcaatgcttgatcagttgctttgaggcttcgaagcaggctgtttctagatccctctctggacatttttcttcactgttaatgcttctctcatcaaccttttaattatttttatctctttaattactgcaggcgagtttataccgaggtggctacagccgatttgccccctactgaagtgacgtgagacccctgcaaatgggacagccccccagttcatgaggcctggctattgcaatatttactagtagaggaactctatagcaagatgaagaggaaaaacaaacaaacaaacaaaaaaaaacacaaaaaaagaaagaatacttttttatacctcactatgttctttgaatatgtatttttcctttaaatttctgcctttaattcttttgttccaaagattgtgcatttttttctttttttttttaaactgtggtaaaaaaaaaaaaaataatgcatttccatgtctgtatgtccgtgcttagcttattctatcaatcacggaagaggcagtcaaggaggaaggagagacattaggagccgataaatgcatctgatcagaaatcagcagacagaattaccaaagtgtatctggtgctgaatgactgggggacaagcagaagtggaagagatctttctgcaacaggatattcttctagtcttctgagtttctggtctttgacaggcaattctggttggctgtggctggaatccacatgctgatagataggaatttgtgcttacaaagcaggagaattaaaaagacgctttcctctcctcttccctcctgtcttctccgttctttttacaatcatcttacacgcacagcctgagacagctggcatagtttttggaattatagtattgatatttccaaacgtgctctcagacagtggataataaacacctcattaggaaaccgatctcagaatgaactctggagtatgaaaaagatcatttctttttgttcctgtaacctagcattcct

SEQ ID NO: 103514 - DNA, 1457 bp, Homo sapiens
aattacccttgtttgcaaagaagttttactaaatagccctgctgtaactttacactagcaaacaaattctaaactaatggaaccatctctagttataatgaaaaattactagggttcattttagtgttaaaattccaactgtaattaacatttgctttgtttaacaaatgcttaaaaaaaaaaaaggtaaagaaatactttagttagtttaattatgttgtggccaggatttacagctttgcccagatcctggctagaattccaaggaaccatgttgatcagaaacggcccccaagggtgcttcctgccatgttcccattcattaccatttcattgtcagtgtttggtaatattaattagagtcttcatatatctctggaagaattcgtaattaagaaggaaatgtttactttctaagtcactcatttgaaaaacaaaggaggaataatgtataaccactgaaagccagtcagggatttttttaagtacatttgaaactaccctgacttcaagcagcataaacttgaagagcaggaataaatttccctcacaatgcagtttcttcatttagagaaagcataaattatataaggaagaagcaaaaggctttagaagctcataagaaattataggtatttctaaaataaggggtaacaaataaaagaagcaagctaggacttgccatgcaagatggttaagaagaacaggggtccccttagaaaatagttgttctcaatcccaagaaatgatacagaagtaaatttgaaatttcttttgtagatttagaaaaatcgaacatttgaaaaaataggaagtagaaagcacagggcagaaaccttcagatatccatgagaaatgagcacattttatccacagaaataaaatgtttatgctattgttcactactgaaatgatgttcagttgggccagttgaacatagttgtttttgatagtgaaaggccaataataaaaatttgcatctgaattacgtttaggtaaaatagatgaattctatttcataaataataaaaagtagagtttgccacttttaaaaatatcctgtctcatgtggcaagcatttgttgttgtgattgtctcttgaaatgctttctgaaagagtgcatgattcaccctgatagtgaaaaccttttgtatatttgagttatctaaactgagttgaaatagaaggatgtgatggtttgaaattctttaggactgagaggatatttggactattggaagaaaagctcagagtctactgtaagattaatatgtaagaatctcaaaaccttttagggaaggaaaatgcagttaagtgctagaagcagggttcctgatctatttgaatccagccaaagaatcctcagaaatttgtaattgatttgctcaagtatgaaatgtagatctgagttggcaaactttccgtaaagggccaagtggtaaatatttttggcttt

SEQ ID NO: 103515 - DNA, 1112 bp, Homo sapiens
gtgattttgctggttgtttagctccagatgttggcatgcttagtttttaatgtgattaataaatgtggcgccatatccctccccacgcctgaaccctgtctcttctacctccttcccacccttgttctttttgaaaaacttaagaaacagtaatgaaaaccttggtgtttcaaactgcactttgttctcatgttttataaaagcctttagatttgctagtaagagtgaaagctgaaaaaacggtttctcagcctgaaatttctatgcactttgaaatctggaatagaaataaatatatctgaattttctttttctcacattttgtgatatgttttgttgaataaagcagcaaaaatactttcgagtaagtgtatgtgtgtgtgtgcgtgtgtgtgtgtaagagagagagagaggaatacatccatgatacacaattaatttttctacttttggagtagtcattagtgaattaccaagttagtttagtaggatattgcctatctatcctaaaatagttcatcttttaaaggtttctctgtaatgccattattataaagtaatcaggagaataatcatgttaaagtcatctgctttaaaaaaaactcttcatgtgttttttcttagtgctgatattcttgagccttttgttttcagtaaagtatttgccaaccctgttctgttttcttccacttgaaaagcagagaacttcatcatgtttaaacttcaaagtcagacttgacttatcaaagaaggaaaccgctacagatagattctctccatctccttctggattggaaggaagattcttttccatagtctgatccatttgaattgttttgattagcagtaacattactcctaaaccaccaaggttcctatggcttcctgtaggcctaggaaaatgaggggaaattggttctgtcagcaacctcacttagaacctgttttttaagaatacagcttaaagccatgatttgatagaatactcagagatcgtacctccagtacctcactcagtcttcctgagagtcaggtgtgaaacctacccttggttgagtacttttgaacctcagtatccctttgcaagaatttatacctctgccgtatggcat

SEQ ID NO: 103516 - DNA, 1056 bp, Homo sapiens
tctcaaaaaaaaaaaaaaaaaaaaaaaaaaaaagacttgtctacttcaaacttgttaagtcaaccaacccaattttttaatagttatcttacttccttactttacaatgtaagattttattgagacagatgatttttctgttcctgttaataaaatactcttggttttttttttttaatctactaactggattaccttgctgagctaaacacaagtaattcagtgatcttgctgaaataattttttttgaccagtggccccttgttaatgaaagtaattaatagtaatgttattatttcttagttcttatcttaaagcagagttacttagagaaaaaaaggttggtcactagtgctgaaataatatccatgcccctacatgaaaagcaagaatactttatgaggtaactactgagttaggcctaatacaactgttgcttttaaaactgtgtgttctgtattccacatgtgagggagcaaaggatacttcttcaaaaacacacagacaacaaaacactatcatttttgccttgagtttgttctgcttctctccatacatttcccatctgtggaaatctgtcagcatacatttagttcttatttcctccgaaaggcatattagaaatagaaggaatagagagtttagtatgaaaagtgcaccgaatcggagcttgaagagaagacacaagggaaaagattttaaattgctggttatgcttaagttaaatgaatttaggctattaattgtgcaaggtttttgtaatccctttcacagtcccattcttagacagtgattcctgctagccatttactttctgtttcttttatggcacattcctctctggagaactgatctagcaattctgttcctagtttgtaaaaagacctaccgtgataggatttgggagtgtggcagctagattatgtatccagccctccctcttcttttttggccagtagaaaaggcatagttcgccctaattcactttttaaatgggttaacaaactgctcctaaatcacctcctgtgaaaagcatgcttgcatccaaaggaaaga

SEQ ID NO: 103517 - DNA, 2134 bp, Homo sapiens
acatttctctgtttactttggtcagaattgattgacttgtttttctgaggtgttgcattggttcttaaaatgctgaataataatactttgcatgcttgtgtgatcagccaaatcttatcgcatgtctaatgtgcagggtaaaaagcaggtgatgtatggatatcagaaaaacatttacatattattacaatactgaaaacaaaatacttaaacgtaatgtaaaaacatactttgcatacaggccctgccctagtggaattctttgggttcagtttttcatgttaaactcctcttcacccctaccctactttgtaagctctttaaaaagaaacttcctcctagggcaagcttatttttaaaaatactccatatacaaaaagttatttccaagccagcagattttggatagatataataggctcttctaggagtgctttttattgtgtgaatcctactttaattaccaaatatccaggttgcgcattctagttttgcacacctttccctctcctcgcatgtcctggagctgtgtaaccttcgtgtgcactttcacattttctcaccaacttgccgaggccccaagcccaggttatgtattcatacatcacctgcctgtgtagagcgcatgtgcatgctgccgtcctcaataaccggaatgtgtttctgttcttttgttttttttgtttttgtttttgtgtggattttctgcagtgtggtttaccaggacggattttacggtgctgacctctatgtaagtacacacactggggccttctcgaccccatcccctgacaagccagcctttttttttctgtttctttggtttggtttggtttttttccttttaatttatttaatttttattttctttttccttgtggatatatatatatatatatttatatatttaagaatgcaagcatgcttctctgccactgcgcttgcccctgggtgcaaaaactaagcctttgggtttcctgatcattgcaagggtcagtctactggacatattcttttcccttccctatacccacagatgttctgtggatcattaatttacttgtgagatgatcagcaggtttaaagtcttttattattgtcgtgtcatttgcatacataaataacaggactagcttaaccttaaaccagctctttcccttttctgcttttcttctcatttcacatccctctttagatcattagagctgtgatttagaggttaataagctttctgaactgtacattttcctattttacctactttgagagaacatgaccttgtgatagccaaataaggaaccgatgccagcaaagagtgtgtagtaatgagaaaacgccagatatttagttcttaaaagccattggaggaaatgagtagcataatcagcaacccagactcttcttacagctatttgactatcatagatttgctgactctactagccatagtaatatggactccattatttaaactgtctagctatcactaaagttccatgattggtttgtcacatattatttaaaatgtggacaaagtgatataattgacaaagtacaagtttttgagttttgaagtcttttatcatgacctctccagatggactttttctgaatgcaagcttgatttagtcgctcaagtcatcaagggaaaatttttataagaaaaacttgtcagcatgaaatgattctgtggggataggttaaaattgtctagaaatactttctccacccttactttccaaaatcaataagaggtcctttttagtgaactgtttccacagtctaccagagattcacaagcaacctaaaaaagttaatgcactttcagaatgcactcagaggttttgcgttttgcaggaagtagagatgggatgatacagttcttcgaaatacaggtgactcacctgtactacttagcataggcctgtaaggtatgccttaatttaataactacttgaaggaacctcagctatgatttggtccaacctcctaacttacagatatatttctcagagacttacccagaactacataaattattaatagtcaggcataaaacccaaccaatccatatttcattacctctctttgtactttaattaaaatccacctctttcctcaaaatattttcaac

SEQ ID NO: 103518 - DNA, 1618 bp, Homo sapiens
tggtctttcatgagtcagttgtaccaaggacttcctcatcaaagatgtgacatttctcttcaccttttctctgccagataatgtcaatatgacatatttttttttgtattcttacggaggaataagtagcagcagagaagcttgttggctgctacttagttaaaatataaagggaaggaacctcctttgtatgtccttttctgacagcaaaattggcttagccttgaggtgtactaatttagcattcattcattcattcattcatagaccaaatggatgtaccattagaagttctccattccacagagttaaaacatttttattagacaaggtatgttgaagtgggcaggctccaaaagacactggaagggaactgcttcagaaattaacttttgtttggagtttgtagacatttaaatcacatgcattccatcatctccatcttatgccattacttacttttattttaatccttttttctctcaacttgacctttgaccttcaacctctgacatctctttaaagaagtgaatatgcagtattatttcatcaagaaatactcaaatgaaacattaaaaggaaccttttggaagttttacacactaggaaaattgtttgtgaaatgtcttccgttgtaatccaagagaatttactgtcatatttgcaaagagagactactcaccagaaacatgggacttccttattttgtaacattgctgaattactttataaagtggttgaatttagtcctgttcaatgtagtcgtttcagtatattgaccaaacttgagaacccattctctaccaagtctgtgtcaggtatatatttgctcaaagatattttatctttatgtctaatcatatcaatttctgtgcattacattgaacactgatttcccatgttttctttttattaactaaaccacctgtttacatggaagatggcaaggaataagtccagtatttcatgggaatggcctagaattgcttttcagcttagtaaactaatttcatcattaatcattacgtttctagcctccttgtggcatttgatacagggaatattgggattcttctagaacgtagatgaatattcccaataagttatttgacttagggtaaaatgtattcgtgtttttaatgccaacccttctttatagaaggcttatttgtaaatctttgcctatatccccttactaagatctttgaagtttaattaatcaccacttggtctcagtgctttccattttatcagccttctcattttgaacaagttgtttttttccttaaaatgcagctgagaggcagattactttctaatatcagactttaactgcaactggagactatgaaaatgaatgggacttagctaaatgaacatcagagatgagtttgatttgccttttgtgtgatacaagggcatagcatatttggggcattccaaaatgtgaccatgctatcctgtaaatacaaccaaatgtcattggaaatagaattaagaaacattccacctacctataagaaataagttatttcatattcaagttaaaaatatgatttgatgactttacttgtcagcttgtttattgtaacagagaaggtagtggtgaaaatttcca

SEQ ID NO: 103519 - DNA, 2178 bp, Homo sapiens
agccccccagccccagcccctcattatctcttcactgtgtcctagttctactactgttactctctcatataaaccccaagctggaattccaaagagaagttgataataggcaaaaatagccccagagatggctgaagccaacttgacatgcactgatcatccctttcctcaaacagtcttaaatgcttaccttccattttgtgtgtttcaggttggaaattaagcccagtagttggagctgtatatggtccggagttatatgcaggtagtatttaagtaaatgtttccacttgtgctatttaattgtaatagcatctgctgtttttcaatttgtgactcctttttaatcttcttgcatttttaaattttttaaaaatccaatcagcatccagctttcaagcagatgtgtccctaggcaatgatgcagcagtgcccctatcaggaagagggggtatcaacacttacattcctttaatcagtaagtagcctatgttggcctggcatggattttgactgttgtgagtgaactatcatgtactgtttttttttttcctagtacagtacataactgaaatggaaatttcttgagagggatattaaatactatcccagtgccctgtcctgcttaacctgtgctagaattttcctgaccaaatattaagattgcacaaagcagaaatagttggaaaaggtagagggggtaagggcatatgaagaatattttagtctgtacttgacgataaagaaaacaaaagaagcaagtatgtgtagagcatattatacatttcctctgcgagtcagccacaggttctccagcagaggatcacttagaagtacttccagtattattgattattcccagctctcttgatctctctaagtcattttgacctgagccattttactccagcaagaggtataattaaacaggattcagtggacatggaatcaatgtctctgcatgctttccagaggacagcacacttaaaataggctcttagaaattgtctgcctctttaaaggatatgaggcccctagaaattgtctgcctctttaaaggacagggtaggagttgtttccctcaccttacatttgtggattaaaatgttttaaataaaagaatgaaattgactaatgaaatgaaatgtctaaagactattatgtgccttagaggttggtaccatgtaaaaatataaaaagaatgttcttttgagtaataattattatgtggacatagtaacattgggaagcaaggttaataactgaccggttgaagagtttgtgtcaatctgatttagactgcccacagtaattaaaagtctgtctcttattatggcagtcattctcagagcttcttgacctgtttctcagcagcttgcattgtaaagctgaaattgagaaggaacagagaagctcactcaagatttgtgatgaatgaggcatggaatcttttgcttttgcatgttgggtctctctttccatttcttccccactgagagacccagggtagaacgtttattgaatgcatgccaccttttccaaaaaggtgtggttcgtatctttccatcttttctataattggttcatagcaagttgtgactgtgcaccttctattgaatgcaagttgaaatttctgtcatattttgggtctccctttagttcctggcttcccttaccctactgcagccaccacggcagccgctttcagaggagcccatttgaggggcagagggcggacagtatatggtgcagtccgagcggtacctccaacagccatccccgcctatccagggtaagcgttagattccaaaatcagtatgtttctaaaataagcagttggaccaaaaaagaataccatggccctttcataacttctgggatgttgccgtgtcacagagtaggcattcagtgaatatttgcaaattaacagattagatgacaaaaaacaaaatataccatcatcagaatgtgacaaactgtcaattcattataagtcttcattttggccaccttaagccctcatggtaatggcttaagacagtagccagaaccgtcttgtgtttactagcagtgtgttggcatgaagttcactcagaagcgcacgaatatggattaacattactgcagagaaccaaaagaggagctcaagattgtagtacaagcctgcatctgctgtgt

SEQ ID NO: 103520 - DNA, 1028 bp, Homo sapiens
ggtatgatggctggctggcgaatgtactgtgattatgaccaagtctaccgcctggtattcaccagccctttttgataacacatcgaaggttaactggctcctttcccctttcccaattttttaaagtattaaatgtaaaagccaccattttgagtaagatgtctgcatattttgctttttttcccctcctttccaatggtttagcatttagggcccttcacttgactcactctttccatggtaactatacacaatgctggcgatggtgcccgttggcggtaagtgaacaaaagcactagagaagaagcttttaaaaatgtaattacaaaacaattaaataagaaagaaaaagtccatctgccatctcacattaacactacaaaatgtgatttgacttgttgttcctcttccttttcctttcccccttttattttcaatgctgttgagtaatgccgcctggattttggatgtacatattgttttgtagcggtctgagctgtttgattactgacttcatggtgatttttttccccttgcacatcttactcagagttactgaactccagtttggctggttttattaatgcacttcctgcccctacatccttccctacttttcctgtttcccaaacccccgtttgtagctctgactgttctttctttgcccgttacacccttcctgactttctcttttctttttccctaccttactctctttttccggatccttgttcctgtccctttccctattcttcctttcccatcccttcagttacacgcagctgttggtctcttttgctgactggtggtttctgattggttctggccatttttccttttaagtgcttggttgctttctgctccagcagctggtttcagctcttgctccattctaatccttgtctgtgagaaccttgcttttcagtttctcccctctttccaaaattgattgttttttctttcttttatttgtgtgtgtgtgttttttaactgcatgctctcagtctcatcattgttgtatcccattc

SEQ ID NO: 103521 - DNA, 1373 bp, Homo sapiens
ataagtatatagtaaatgctcctggtgttaaaattggtagtacgtgaacatcggagtgaaggtagtcaactccctggtctcctgatttgtctacttaatgagttaaagctccactccatttttatagtatcttgcaaggaacaaacaaattaatcctaagtcattataccagctgcattgctgttttctgatatcctttttctactgaatagtgtacaactgatgtcactaatgtagatctcattcccattgcctgttgactgttccttttttctctatatatagaaagttactactacctttaatagcaggtataaacatcaataaatgaataatttaggcaaatttgggttagcagttttctgaaattcagttgaacatatttttactctaagtgtcaatctggtcatttaaaaagggcattgaagaaaagttataattgaccactgcttagtgatatttttatttgcttagaagagcatgaatgctctcctctcccacacccagtacatagaaaattgtacaccgactatgccctaagttatcctgttcccaaaggaattaatagtgataaaagcaacaggcaacgtggggctaaaatgattagacctactttaaaaaaaatctcattatgcaatgttgaacctgaatgtcagatttcatgtagcagttactggaaaataatagatttgggatgtcagagagtcaatttaattaagtcttttttagtattacataaaggggcatgtatattaaattaataacatgaattgagagagaaaggtagggcattaaaaaatcttcagatttttggttgaatagtttgacccgagtaactctgtaccttaattttggtctggcctcatatgctttatgttttattttattattgttacattgctgttaattattattattattacagttctttattcttttattggatttaatttccctttacaaatatgcatggaccaaaaatgtgactttgggagattattgctgagttgttgctgatgtcagtttcatactatgatattttttctctatttaccaagagatcagtatttcaatataacgatgtgcatgttttccccccttctcccgctgcatgcagggattcgggttcgtaactttcgagaatagtgctgatgcagacagggccagggagaaattacacggcaccgtggtagagggccgtaaaatcgaggtgcatgtctttaataattcaatttctggtttatatttttatttctcttttttcgtgttgcctcacttagttcacatttggaaccctgtcttatgtgtgcgtgtgcacatgtatgtgtgtttgtatctctgtcttcttcaccttcttgcactaaaatgtataa

SEQ ID NO: 103522 - DNA, 1046 bp, Homo sapiens
ctcgctctgttgcccaggctaaagttgcattggcacagtcttgactcactgcaacctccgcctcctgggttcaagcaattcttgtgcctcagcttcccgagtagctgggataacaggcgcacactaccacccctagctaatttttggtatttttagtacagacagagtttcaccatgttggccaggctggtctcaaactcctggtctcaagtgatctgcctgccttggcttcccacagtgctgggattacaggtgtgagccactgcatcctggccccacatttttttaaatttacctgatccaattacttctctcatgtaactcatttgaaagtaatgacatgagctttctctttgagaaatctaaaagcataggctgcttctgtcagcttgatgctgtgtcctcactgccccatttttctttgggctgctaaagggtgcacagactgtgtactaattggtaaatgttttaaaaacaaagcatagaattcagaattgccctgaatctgccttcaaggactgatacaaaaccttgtttttgtcctttgaagctttcttaactgctacctaaagttatttgctggaatgggtgcccttggaactgttctgaggctcctaatagagatttattttggaatcaaacccatggatgcctcctctgggatccacctaagagaaattaatgagcactttttgttttgtgaattaagtttagtttcttaatccttttatatgtttggggttgactgtaaaattacagcgtattttgaaaataaccagagaaaaggaggctttatatagtcctattgtttagctaagagttcctctaacttttaaacagagtgcttttctgtacagaaattagctttattgaatttttttagagcagtaatggaaaaactagtcacaaaataactctaagatagcaatacttaatgtaaaacagggtttaatcaaattgttccaaagcaaaaagcaactccataccatatcttattttgtataataagaccatcacccagggttttaggatatacccatttgaaa

SEQ ID NO: 103523 - DNA, 1035 bp, Homo sapiens
gaaatataaaaatatttccttatttcatttccttgagagagcctgagatcatagaccaaaaaatgaagtgacctccataactaagtacaacagactctattttcaaaatagaaatatcttaaaaatagaaagttctaagagtctaagaatgaaggaactatttttgtatcttcagatcctaatgtatctccatgtgatcttgggcaagtcacttagtacttccgtgttcgttagctcccattttgttagcatactataaatactcaaaacaccaacattttgtttgtagacggtagcatttagaacattaatagcatctttgtgttttgttgttgctgctgttgttgttgcttttgtctttgaagggactactgtgatttttgcttaaacataccctgtttggggatgattgctgtggggggataactttaattattttaaagtaattgtgtatatttttcattctttatttctttgcttagcagacagaaggtggagcacagacagacggccagcagtcacagacacaaagtagtgaaaattcagagagtaaatctaccccgaaacggctgcatgtctctaatattcctttccgcttccgggaccctgacctccggcagatgtttggggtaagtctctgaagtctttttatggattttacaattaaagtagattttaatcccccagatgtgttattagtcattattactttaggattaaactacaaatagattgaaagaacctgaggtaaatcagtcttttcatcagtctttagaagcctttttctgtcatccagtctgctctagacatagtcttgcaggtggctgcacacataaggtggcgatatgacccagcttgctgtgactgaggggtttcttgtgatgtgagactttcagtgctgaaaccaggatggtcaccctactcacctaccaaactcagtaaacataccaataatatgcttagtttcatctgcaagaacaaacatgcacattcttttagagcaatgattcctaaacttgtttgcacactggaaat

SEQ ID NO: 103524 - DNA, 1050 bp, Homo sapiens
atttttgcccctttggcatctagtccacttaaatatggttgtgggcctgtctagtaactacacattaacaaaagtgagtgtgtgtgtgtgtgtgtgtgtgtgtgtgtgtgtgtctgtccacatacatatatctatgtgtgtatgtgtaataatattttctccaatcctggagcaataagcattccattttacctatgcagtgagagaatattcagagaattccatatactcactttaaaaatagttacgtaacaaggattcaaagtcactttttctttctcttgttgtttgttttagggtaaccaggagccgacaacaactcctgacgcaatggttcagccttttactaccatcccatttccaccacctccgcagaatggaattcccacagagtatggggtgccacacactcaagactatgccggccagaccggtgagcataacctgacactctacggaagtacgcaagcccacggggagcagagcagcaactcacccagcacacaaaatggatctcttacggtacgtggaccatgaggtgaaaaatggaaggatgcatggcaatcatatagaaattgtcgccttaattatacaattagaagactctcggaattaatttagcatttacacctgttctcatttacaccttctctcaacagcattgtatacattgtcctccctcctcctagaaatacttagtctcttggcttttcgagctctcccaattttcctgccaagcactgggtgttctgctcctgcctccttctctgttcaacttttaaatggtgcagtactccatatgtaggtcctggaaccccttttctttttattttatatcctttctctgcataattatactaccaaactcaagcaaaacctaggaatattctttctttctttctttcatctgtacatctaattgattagcaagtcttgacaaccataactctaaaactacttcgtcttcttctctacatcttattactcttccaccaaattgcttgtgtttgaatctcaatatggcccctactaaactgtgtgaccttggac

SEQ ID NO: 103525 - DNA, 1030 bp, Homo sapiens
tatctcatagtttgctgaaggctgttgtacttctcttctgagcatagaactttggaatatggcctggaaatttaatacaaatctgaaaccatttgacatttttaataatgtatacttggggaaatattcagacattgcatgctatatgagagaaaatgttaaatcactcctatcccaatttcattcccttaatatataaacaattgttgttacatttttaacaaaaattttaaaagaaatttctgtaagtaacaaaataatccactaagaatttcttcttgacctcttaagggaggtacataacccctctaggaaaacagagcctctgcctggcttgcatttctgtaaaacgcctagtgcctaggctacaagtggattgcaggaaatgtttttacctttctccccatctcccactgctaattgatgtgtttattcagttatctgagtcagccctgttgagaataacgctgtgagagaattcatactgtgtacttgtgtgccagagtctcattcccagcaggctggggtggagaatggaggctggagtaaaacgaggaggctgaaaggagcagtgtcagagcaggagaaagtcgccttggccttgttaatcctaacttgaaaactctatcttttagcttttaccaattatttagtagaactttcttatggattcctgtgagattatatttatgcctgatgtgggcataagacctttggtgctcttattgtgtttcattcaccagtccacctgaattccaattcaattctttttcatgtctgtcttcaggccagtagattcagcgagggcttctgaagcagtatgtttcatatggctagagagagacagagagatagagcattgaataatttgaaggggaagggagataactattttatatctctcgtcagatgcccagaatagctataaagacatcataaaaactatcctaacctagaaataacgtaaagaagttatatggtgatgggtgacgaagatagactttttccaaaaaaatttaaagttttcata

SEQ ID NO: 103526 - DNA, 1124 bp, Homo sapiens
tatctaagtaaagtaatccccccatccacagtgtcccttttcatggtttcaattacccatgatcaaccatagtctgaaaatactaaggtatggtattttgagagagagcgagaaggaggccacattcacgtaacttttattacactatattgttataattgttctgttactattagtattgttgttaatctcttactgtgcctgatttgttaagttaaactttctcacagttatatatgtataggaaaaaaaacagtatatgagggttcagtgctatctgcagtgttaggaatctactgagagtcttggagcatatgccctgtggataaaagaggctactatatatgctttaaagttttccctcctgaggaaccagggggcatttttgaaaaacaggagatgcagggggggaggtttgtttacttttacttagcctatctcttatatgcaatctttaggaagaagaatgtgatttttcccctcatatttgtattgatgtgactgttcatatgaaaaagaacatggagaactttaagattataactcagctgttagcatttatattttggactatgtatgctttctattttttcttattctttcacaataatagtggtaattattatctctatttttttttttttttttttttgagatggagtttcgctcttgttgcccaggctggactgcgatggcgcgatctcggctcactgcaacctccgcctcccaggttcaagcagttctcctgcttcagcctcccgagtagctgagattacagacatgcgccaccaagcccagctaattttttctatttttactagagatgaggtttctccatgttggtcaggctggtctcgaactcctgacctcagtgatccatctgcctcagcttcccaaagtgctgggattataggcgtgagccgctgcacccggcttttttttttttttgccaaaagcaaagaattttttatatatgatcttagttaattccttttttttttttttttttttttgaagcggagtctcactgtcttgcccaggctggagtgcaatggtgagatcgtggctcactgcaacctccacctcccgggttcaagtgattctcctgcctcaacctcctttgg

SEQ ID NO: 103527 - DNA, 1408 bp, Homo sapiens
caggtatgttttgctttgtttcattttctcttttcctgtttttgtttgtctggtttttgaaaggagttggagtagagaatctattctgtgattttgctaagcatatcccattttctttgaattctggaggtcctctcagcatttagtctccattttgtggcactgctttaaagtgattccattcggttgcctgccagtcatgctcccttgccactcgaaccttatcccacccttcatccacggagctgcagccacactgtttgttttggcacactttccactttctatgggctttgcaggatttggggagttggaggataggcggggattgtgggttggagactgaatttatgttcctttacaatgaaaaaaaaaagcctcactttttccagagatttggtttctttctgaattcttctacattgctccatatcttcagttataatcatttcttcgctgaggccaagattgtctcttgaaaagtattgcttttctaaaaattacttagctttcttgaaaagataaacagaatttcataaatgaagctatgatgaaatccgagcaatcttgactcattaaattgttttttccgtcttagtcaccccctaatcacacacacttttctctttcttttttggcccccttctctattttttcctttatctttctccttagctttgcaattgagtctaggtaagcttaatatttgacaacctattacttaaatttgtattgctacaggagacatcttcatattgaacagtaatgacattcctcattcctctcagtgataaggcataagctcaaattcctggttttgttcctccagttttctgttctcccctgagaaattccaaactctgatctacacagattgccatatgtaaacaattttatctctctcaaatttgaacttttcatcatgtaattccttacctaggggttgtttcttggacatctgtttatggtagacagatagtttctgggaaccagtcatactaggtgatacagcccccccttacccaccctggtctccttctggtataccattcctctccgggatctgacattattggtatcccacatgttcccttccgaagtcataattcctcactcttttttttcaacatttccaaaccactgtcaaatcttttttgaacatttcctcccaacattttgtatgtgaaatttgccaggcacaaatacaaggctcccctgcagtaaatactttgctcttttgattgtagcacctttcttagtgggctccagtgttcaacctcttctaggcagtgagaaatgctgcattctgccatcacaatgtattgtgtctattccccagactcttaaatgtttctctattactattagaatgattaaattcaggaaactaattcattagaggtcattg

SEQ ID NO: 103528 - DNA, 1051 bp, Homo sapiens
tctcttctcttcctctcccagtaaccaccggagggcgagagagccagctagttatcaggatggaggcatcattttaggagctggaatcctgtttagttatataatgccctgcagtgctgtttggaaggagggaaacctgtagggatattttcccattgggacccagaggaaagaagtttcaaatatatcttttcaaagtaatttttcaccaaatctgagtttagaaaatttcaacaaactccttcctcttttggaaaagcggagaagcttttgaaatgtttctcttccatgtgttatcccctcatcatcagtctaattacctcttttgaaatactgctttatgctctcggccttagcgccatttttttggaaacctctgtgccatgagagccaagtggaggaagaagcgaatgcgcaggctgaagcgcaaaagaagaaagatgaggcagaggtccaagtaaaccgctagcttgttgcaccgtggaggccacaggagcagaaacatggaatgccagacgctggggatgctggtacaagttgtgggactgcatgctactgtctagaacttgtctcaatggatctagaacttcatcgccctctgatcgccgatcacctctgagacccaccttgctcataaacaaaatgcccatgttggtcctctgccctggacctgtgacattctggactatttctgtgtttatttgtggccgagtgtaacaaccatataataaatcacctcttccgctgttttagctgaagaattaaaaaaaaaaaaagaaaagaaatactgctttattttttaaaaaaaatttacataaaagataaatcctgtttctggattctctttttgcttgggagatgatacttgcttaaccttagagccctcattcaatttttattaactggcaatattagagggtaacagctctcttcttgcttagcaattactgaaggcttttcaatgacttgacttttcattatttattttttaaactagtgaaagaatgatctaaaatggaaatttttatgatgagttttctattgcctcttg

SEQ ID NO: 103529 - DNA, 1478 bp, Homo sapiens
aacaaaaaaactccttggggccttgtctctttccatgatgtatggaggctgcagtcacacctaagtgtcaaggtagctgctgcttttctaaggatgggggcgggggacattgtgggggagatgctatcttcttagtgccccaggctttttgtcaagaatagtgtaataaaccagaggattcagagaatgatacacagtgattctgaggtttatttcaattattagaactgaaaacacagttatcccattagtatgattcaagattttttccaaaaatacactgggttgctcttgcttccagtgaaactcacctgcccattttctgcttactcactttgtctttagaaaatttgactgctttttatctccttctgattggcttttcagttgcaaattcagagagtactatatattctgtgttccaggtcacttctaaaaagtgttaaataagaacaggcctagtacttatctatattactttactcagcgtttttcctaatatttgaagatctcattctttttaaaattattactatggattatgccacaagtatacagatatctgtaaaatgcacagaatagagcctgatatactatgttacatcagtttctccaggttccacagatggtcctgtatttcctgtgttcctttcagaattgttaaaatgattattaatttaggagcgggtgtaatgatgttgtattggcagtgtgccagccaatggtgttatacaacacatttttttaattttaaaattttaaaaattgaattcacaatagagatagggatttgccatgttgccttggctggtcttgagcttctgggcccaagaaatccaccagccttaacctcccaaagtgctgggattacaggtatgagacactgcgcctggccaatacagaacatttttaaaagcctggtactgcatgttgccaaacagtccttatggagacagcaaaaaactatgtattctcagtgtgatttgttattttgaatttagatttctgtagatgtttattttttaaatggagagctcgtgttgttagccgtgggcttgtaaaaaataaaaatagataaaaattaaaaatgggaagcttaattttggaattaatctttttaacctttgggtagtcttttagaaagtatatcctaaaaatacatagcataactaaaatatctcataaatccttcagaatgagctatttattagaatgctgtaaaaaattagaaaatcttaattttatgagacaactgataaactcatcattttataaattgttttatttgaatgtgtgataatataaaatagggaaattatgaagtttatattcagaggttaaagatttttccaagatcactagtaaagggcagaattagaccaacttctggactgaaccacatctttgatgcattttttaattatattattttaataagagaactttaaagaaactcttattgtcagtattctcctaaa

SEQ ID NO: 103530 - DNA, 1052 bp, Homo sapiens
tgcgtgcacacgggtacatgctccccgcccaagaaagaatagagtagtaataccagtcccatctgcctttctgtgtcctggattgggagtattctctgacgcacttaaagcctggaacatatatattattttggctcctggataccttagacttcctaccgtgtttgtgtgccagtgtgaggagcctgtgttcccttccctggctgtcattctctgcctcttgagtttctggttgagttgtcaatttaaaaaccaacagtaacagcaaatctccagtgtagttttcagtctgtaactagtaactcaaagctttttgcttttttctgaacatctcttctgtgtattgtcaaatcctgttggggtggaggcctggtctcaaccaagctccgacttcatcagctgagccagcatacctatctgcgtagactggaggtcagcgaaggatttttttggtgctacctagttcctttggacaggacagccagcgcaaacaaggcaaaaacttagacactttttgtactgtccttatctgaagattttttcccttttgctatgtatggtgtatattgtatggattatcaatatcctgttgtccaggtaagctaagggttataatttctagatactgtttgatttatgtgaagctttatggtggaatgaaatgcctacaaggctttctgtcttttgacccggtaccattcagagcctagctttcccagtgctttttgctaatttactgtaataagaggatttaatttatagtattggcggccagacaaaggtggttggcattcacccctagaagttctgaaactttggagagattctgtgtgtctgtgtgtgtgtgtgtgtgtgtgtgtgtgtgtgtgtttgtgtgtgtatgtgtgtgtgtgtgttttgaaccaggtgggctggacaatataaatgtaatgtaaaaaacccatcatattatgataaactttaggctttgttttgagcagatgagaggcacagttggcagtttccaaatgttgtattttccagaaaggtaatatataaagtagagggcatct

SEQ ID NO: 103531 - DNA, 1016 bp, Homo sapiens
tagttttgtgctgtagcattgttttgctttttggctttgcctgtgtccttatctatttctcccataaactgtgaattcattgacaacagaactgtgttcatttctccagggcttagtacaatattttgtctgcaatagatgttcaataaatgttttattaattatactgaatagatttattcttgttcttcatgtgtaatgcacatagaatcagtaccagcaaattgaagataatcgagtatagtggtcctcctaatctgttagaactgagttcaggtaaatgtttaaccaagaataccatcaaaatatgctatagccattttgactcttaaaaatctgtttcttctgaacaatcctaaaataaattacagtgaccgtaaaaggagaagaattacactgatgggggcggggcatggagggcatggtaatacttaaattctcacagatgccctcacagttgcatttaatcctcatggtttaatcatccaaaagcatgttacaatattactggctctccacgattagggacgtcatagcccctgaaacttatttagaattatttaccattttgaaattttgaatgcttgttccaaatagaagatttcgtaggatcaatagttacaactggtttgtcttttaataaacattaattttcactttctgctcactctgtgtcctttttctaaggattacttagcagttttctgatttttgatgggccatttaggctctgaaagccaactcttgaacctattgtgctttgtcagacaaacctaacacctgtccatgtttgttactgcttttaatatctgttatagaaatatgtgtgcacatgtgtatttgtatataatggcagggtgggtatagcagctccctaaaaggagaaaagcaactggcttttctgaaaagacctttccacccccacctttttgcagacagccggagttaatccttccaagtttgactggaacagctgagcaagtgtaccctgcatatctggaggcctccagtggact

SEQ ID NO: 103532 - DNA, 1008 bp, Homo sapiens
gatggagtttcgtcatgttggccaggctggtctcaaactcctgaccttaggtgatccgctcgccttggccttccaaagtgctgggattacaggcatgagccactgtgcctggcaatttttttcatttaataatgcatcagtcgtatcttttcaccttgtatgtatagtctagaagaatttaatctttctctggaaattgactaggccttcaataacatttggggatcactttcatgcttaaattatgtcagttgttttaggatttgaattacagtctttcatcttaaatacaacagcatctgggaatttcctctataattaagtcaccaaatattgaactgggttaactcttgaagtttaagttagtcagtcatagttcattattacagccttttatgatgtataagacatatcatcattttccagtcttcatatcaagaagaatcttaggagatttaatagtgatttaagatactagcttataagtgtatatgtggcccatcctgctgtactgctatgtatgaaatgacagaagtgtacagggaggaagaaggattaataattatttgatttgattagaagaggaaatttagcataaggttttattgcagaaacattctttttttttttttttttttaaaaagaaaggtgtcactatgttgcccaggctagacttgaactcctggcccaaatgatcctccctagtagctgggactacaggcacatgctgctgtacccagtcttttgttatttcttaattaccattttaatacctatacaggagactgttagaatatatagtcctctcatatctgtgggagattggtaccaggatacaccctctcacacccctgcagataccaaaattggcagatgctcaagtttcttatataaaatggtgtagtatttgcatataacctatgttcatcctcttgtagactttaaattatctctaaattataatttccaaaacaatgtaaatgctatgtaaataattattataactat

SEQ ID NO: 103533 - DNA, 1034 bp, Homo sapiens
ggccaaaaccaaacaaaataaagtaaaaattctccttgatagaggcaactgtgggtagttgaatgtatcaataattggttttgtactttattgccacttggaaatcaagtatcccaatagaaagtttgttaaaatttatatgcaggcattttgtctatttttcattctgaccatgagtttatcaggtttgctaccattctttttactcatattactaaaacagtgctctgaaaactctttaactcttgtttgctaaattcagtcatttatttctaaattctcattttctttaacctttctagatttctacttggcattgttatatattcacctctgatatcaatttatgaaataccttccctagtataaaggatgtgagatcgaagaaaagaaacagatgtcctctgtattcctggcttttgtgaatagtacacgattatgcttaatctttttatcctctgtttctatttctgccttcttgaagcaaggattcctcaaggttctattttcagcctttgccttctatctgtctgtgtctcccctccacctcccatttttcttttgtctctacttttctttttttggagtacatggttgatgtataataaatgttacagactgcatcagtgtgggagaggaatctcaaccccattatggccatggctatttctccttttctctttgatcttcgtgtctaaccctgacctctcctctagctgtaccttcaaccccgagtacctgttataccttctctaccattacttcaaaccagtttatgcttcagatttgtctgtattagcagtgttattcttatttggctagttagctagaattagaacctttctcttataccctacatgtggacagtcttcaattactgtggatgttgtcttcgtcatctcttatatatctataccttctttattcctactgctaatatgtattttttgcattagtcatctgtaacctcttgtaatggtagctgctaattggtttccccacctttaggttgttccctttttcattcttacctg

SEQ ID NO: 103534 - DNA, 1066 bp, Homo sapiens
gctaggcacagtggctcatgcctgtaatgccagcactttgggaggctgaggtgggtagatcacttgaggtcaggagtgtgagaccagcctggccaacatggtgaaaaccctgcctctaacttaaaaacaaaaagtgaataactattgtcctatccatttactgatttatgaatgacacttttaacaaaactgctaattccttgcctcacagtttgtatgccatgtctctcattccaaaacagaaatgcatatcagccattccatggtttactctgttattacccatacttcctttctgtaccatgtgtcatgcaaaggagtgtttccatacttaactatgatttgctattttctggtaggtataatttaaagatttccattggtgtagaaagccttacaattttctcagtaccttagaatcaatagaactcttccatggatatttttaaataggcttttgactttttttgggtatgctgacctgcctgcctttctgtaggtatggcttcatgtatgctatgctgttttatgcacttgaaaagttgttccactgcctcaaagcttcccaccaccaccctaatccatctagaaaactcccgctagtttttttaaagtacattttaagcattaattgcttgtgaaatatttctgggttttcttcaccctgagaaattagatggtggtggtggtggctatagtagcaattgctgctttattttctcccaagccatattggaataagcgtggcatttatcgaatggtattttggtgtgtattattttctactttttctcccctgtattttcagctcttgaatagtttttgctgtttgtaggccttcatgcaatgttgaagatatcatgattgaatgaatattgactgactaacaaattagggatggtctgtatgtggtgattcattcagttacctctgatttgtagtttgaatttattgcagaccttctcttttcatatactgatgagcatatactgtataaactgttttagcttaattcttttttttttttttttttttgagacagagtctcactcttgttgcccaggct

SEQ ID NO: 103535 - DNA, 1046 bp, Homo sapiens
cctaaatccctctttaatcttattaatcatgccaggctttttttccaagggccgagatatacatccatccatccatccatccatgtatgtagtatatattcatacagttatttttccaaagttatctatctttctatgaaagagaagatcagttttctcaaagagagccaaagacccatgaatacttctgcagagtagcattagtattgcaaggatgacatcagttctgtattcttaaacctaagattaaagtaggtcttggcagggcctcctgagagggaatctagtcttagccttggatttcctgagaaggcatatggcactcttctgaaagtgggatgttatttcagtttagaagctcttagtcaaaaaatattggatgaattaattgcaatggagacactgctttctaatagtggaacaaaaagtcatttcttagcttttgacctttgccctgaactggtgctgtgtgcattaggaaaagaaaatacacatttggtcttaagtcactgtttctactttgcacaatataactgattcagaccttgtgctctgtttctttcatttctcaaaggataattgtcagtgaccatcctctccaagcaatcaaagtaatagatcctaagtataagttattatttttcttatttctacttttgggggtgggaagtttgagaattagatcaaaacttttattgattgattcagcaaccagtaaacctgtaccaaatgttcacctttggggcctcacatgattatgttccctctagttattgggtggtggttgtcatcattgttttcaactgatttgcccacattatacagttttgacctggactgagtaacttatgtaaattccttaaattgctatattatagtggtttcaggtcatggggaaaaaaccctggtaggtactatgaacccttctatgtttatttcacttatgacttaattactcagattcctagatataaaaagtgtagcaaaacattgtattatgagttaaaataaaactggctttattttttgatattttatgttcagct

SEQ ID NO: 103536 - DNA, 1445 bp, Homo sapiens
cagtagtcagctggtttttcaaataattcgatacctcattacccatgtaccaggggttaaacattacccttattaaattggctagtctactcacctggtcttcttgccttggtgcatggtggcactctagtttctcttggaacctgagccaactctgaaccctcagccattttttgtcagtgcctcttttgagcttactggatcccaattccttttttgctttgagtttgatggtattcctttccatgtggctaggaaaagtgagaccatgccttgtcatcttacaccaaagcccttgaataagaacagctcagattaagctagtctgatatattcttaagacctgaccatttggatcttgacctccatctgcagcacataataagtcttttcccagtttctaccttgaacagcctttattttagtttcataatttctgtacccaggacttcaccatttccctgtatttccattgttgcatattgaggttatgcagtctgaagctcctctgaactgtttttcagaatgcctttccttctgcttcggaccatcagagcttcctagtttcctctattcccttctctcaccttcacatttcttttgttcccctttcctccaaccatagagtacacattacttgggaaaacccgattatataatattttagagcataggtcttggaaacatgtttatgcactgtcaaagttgcgtttccattcatctgtctctccccaggtaattagcataaatgaaaatagtgaccttttagaatatctttcaagggtggtagccaacataccaacccaggatactgctgagtaggagccagctggcatgaagaagcaaggacaagagtaaaccttttaagtgggcagtttcaaaagtatagaactaaatggaagcaagaaaaatgaggggagtgtggatatggtgctaattctaatgtggcaaagattttaaaataatacagaggcaatccagaatacattgagagccccagtgaattgttttctttaaatttcatgtcatgtgtagtcatgtttctcaatggacaaatggttagtggaccaaatgacattttttactcatccctgagtaaaaagtccaacgaatatagttcattagactgctgcttgttgtctccaaacagatcctgaaagttcaaatgactgggagtcagaacctaaaaatataatataccccactgttttggcaggaaattgagacctgcttttatcagccacttatccagaaagcatatgttctatataaatcaagccaaatctatattgtctgcaagtattcctgcaatatagttgatgttcataatgtgatccagatattttcagtatacttctgtgtattttgattatcacatgactttttatttatttgtttgtttgtttatttatgttttgagatggagtctagctctgtcacccagg

SEQ ID NO: 103537 - DNA, 1058 bp, Homo sapiens
cgctcagaagaaaagctagagtccccacaaggctccagtcaagcctgctcctaggtacttgtttgactttcatctcctcctgttctcatttctcacagctacttaggccttttggccattcctcaaatttgccaggcactttgtacagctgttccatggtattcatgagggggttggttccagagcctcttaaagatacccaaatccgcagatgctcaagtccctgatataaaatagtgtggcatttgcatataacctacacatattcttctgtatactttaaataatctctggagtgtttatagtacctaatgaagtgtaaattttatgtaaatagctgttatattgtttctggaacacgatttacggtgacaaggaaaaaaagactgtacatatccagtacgaattatttctcctgccccaaatatttcccattcatggttggttgaatccagggatgcagaacccacaaatatggagggcttactgtacttgtttcttctgcctgtaatgcttctctccagatatactcatgtcttcctcctggccttcaaatttttgctcaaatgtttcctattcaataaggccttttgaaagccattttactttaaatttttcatagcatttatcttctaaatattataaaaacaggccatacggccaggcacagtggctcatgcctgtaatcccagcactttgggaggccaaggcgggtggatcacgaggtcaggagattgagaccatcctggctaacatggtgaaaccccatctctactaaaaatacaaaaaattagccgggtgtggtggcgggcgcctgtagtcccagccactctggaggctgaggcaggagaatgatgtgaacctgggaggcggagcttgcagtgagctgagatcgtgcctctgcactccagcctgggtgacaatataaataaaaaataaaaaaacaggccatgcatggtggtttatccctataatcccaagactttgggaggccaaggtgggaggaactccttgaggccaggagttcaagaccagcatgggcaacatagtggtaccct

SEQ ID NO: 103538 - DNA, 1391 bp, Homo sapiens
gagggacactacctgtactagcattcagcatggtacaaggctagagtagagaaatgaaaataaggaaacctgaattctgttttcatcacccttcgttacttgagacaattacttaactgtgtataccttgatttttcaggttacgaaaaagatatattcttaggaacattcatggaataatcttagaaaaatgcatatcagtcattttagaaatgaagtagcaagtaactgatggctttatcataaaacttgaaagtcacagactgtgagtcaaaagatacagtttcgggtcttggttgtgccatttgtcagtgtatcatctttctgagcatgtttcctaatctttaaaatgggaccaagagattatagagataatctgtgaaagtttctggaagttcttttgtgtgaggcaaaaataagctaataacaacaccttattcaggtttcacgttagtcatttagtgctttttatcactattttgccactctaattgctctacacaattagagaactagacttaatagtaaattgaattatcacaaaatgtagacaatggctcagttcagataacatttaaggtcagatgccgtgataggtaccgtacttgacagtgaaaagccattaaaagattctaagtaggattgggagtagggtgaagtgaagtttataattagattttttaaaaagatacctacatagattagaggagagtaaaagtgcagagagaagttaggtgattgttgtgtaagagtctgagtgacagggaaggtcatgatagaatgggctggagggaagcggaactgtattgagagattcagaaggtaaaattgacaggatgttataatttagaagaggaccaggtttttgtaggagggaagatgaaagggatcatgggtttggttttggatttagtacttgggtaactttgagatgttcaagaggaaatattgcttacatggccacctaggtctggaaacagaaggaaagacagaggctttcctctattgtgagaaacctgcatgccccgagcgggtctcataatggcttaaaatgataacggtctagggaggaatgtagagcaagaagagaagttaatgcctggagaagaatgaattttcttttcttttcttttcctttttgagatggagtcttgctttgtcacccaccctggagcacagtggcatgatcttggctcactgcacccttcgcctcctgcattcaagcgattctcctgcctcaagcctcccaggtagctgggattacaggcacccacaccacgccgagctaatttttgtatttttaatagatatggagtttcaccatgttggccaggctggtcttgaactcctgacctgaagagatctgcccaccttggcctcccagagtgctg

SEQ ID NO: 103539 - DNA, 2669 bp, Homo sapiens
actaaccagctttttgaaagtttccctttgccctttgcccttcagcccagatgtctggaattgcaggaacctacttggctaacacaggctaaatttataaattatcagaaagcaaatgttaactgcgtttgcagagatggagcttgttcacagaagatgtatatgtatgtgtgtatgttcggaggggctgcttttcgtgcttctcccttcatgtttaaatatgaccttgaaatattattttctcttctctattgattttttttgtagtatttgtaagagctcagaacttttctgacacactaatgtgcattaagtagttttcgcctccctgtaaactagtcatctgtgcaggctctttgcagccttgtgggtgggattgatcagccctgttgacctgaaggatgggctgttctgtcttttgatttgtttggaagaggagttatgaaaggaagcaagttgaattaatctcattttcactcacttatgtttgatgaaagcagacagtgacagtctccttagttatttcctttgtgcttatgttacagttacttgtgtatttatctcaatttttttttttacttattaaccctggaacagagcttccctaccaatgctacatgccagattgagatagaaatatgccaagattactataccccacaacccttggagcagccagctggggcttgggagtcccctggtcactttgatcatgtgcaccctaatttgtttaccactttgtgctataaaaatatttcctatgtatgccatgacacctgaaggcttgggtagcactgcctagagggcaaaaagcaggtcagctctatctcttttattatttgtgtcatctagcccaatgcctttgtttacttcattgaggacgtgcagaaggagctatagcgaataatgcccagatacatagaaggaagccttggtggtcacgcattcagtgggaggcacagaggagctgctgtggactaggaataggagatgagagttttagtgtaggtttagccagtaccaagccatgtgactttcggcagtcatataactattctgagactcagtttccacatgcgtaagataattgaactgaacctcttctgattctgaaattccatgaagtgaattttatgtaacagtagatatgcctgaaaaatgcccagttctgcaaggatgtttaggtctaggtgatcagagaaaactgtcaaacatactgtatcacctcccttgcatgcttggtttggtaccagtaatgggtcaaaggcactctttctgagtattctagaaaaattactggactatgttcagttgtcagtacctctgaattggtgcagatgggcatttttagaacctgtagaattgaagagtaaaagttacagcttatccaagcattttcatttgtgtagttagatgcagctcattaatttgctcctgtgtgtctagaactctgagatagaatgctatcttgtgcgctctctatgctgctttgccagattttctccccgctttcctgttgagtcatcctcttttttagtgaatttggtagcgtcagttggcagcatgaggtggtgaaaagaatacgggtttcagaaacctcactaggtctaaatcccacccctgccatttccaagtgtatgactgttaagttacttaacctctctgagcctcagtttcatttgtcatatagggaaaatagtggcactcaggattgttgtgaagatttgagataatctatgaatatacttaacatagtgaatggcacacaatagatgctcagtaaataactagtacaagccaactttttgctttgaacatttgcataggcagactactcaccactccgaagtgttttctgtatcacgttgagggtatctttgaattcatctagggagaactttgataaacacaaactagttttttgtgaaatatttttcctcttagtttgtatgttaagtactcgtggctcgggagcccttgttaaggttgcctcctgatggagaaaaatccccattatttgttgtaaactttttttttttttttgcgttgcacagtactattaagcattcattatgtcatttattttccctctctcgccatcatcaaaaacagggaaagagacagacagatatgattcctgtactgaggcaacttacttgtttgatgattatgtaatttatatccaataaacataattatagaccacttacttaaattaccagaaaacaggatatgttctccctgtctgtgcagtcttagctggacaggcaccaggccctctcttattcatgctctatatggatgaacttctggattttattttgaactgttgttttttcatagttcaattctgtcttcttaataaatcagttcagccaacatttaatgaatgcccataatgggtagagccagctgttgcaaatacaaagatgattaaagattaaagacatagtgtgccctggccggccttagtggctcacgcctgtaatcctagcactttggaaggccgaggatggcggatcatgaggtcaggagatcgagaccattctggctaacatggtgaaacaccgtctctactaaaaatacaaacaattagctgggcatggtggcacgcacctgtagtctcagctactcaggaggctgaggcagaagaattgcttgaacccggg

SEQ ID NO: 103540 - DNA, 1159 bp, Homo sapiens
cttttggtaactagggtgaaattagtagcactctaactttatttataggacttggttagacagttgcctgagtgccagaaactcctgcaaataactttgaccttccctaacaaaaagtcaaaggataaagcgtttcatagtagaagatttcagttgtatctgacatacacaaaacattactttctaatggagaaatctgtaaccaaaaaaagcataaataattaaagattttggtaactgctaggaagaacataaacagggcacagtaacagagagtacgggcttgtggggaaagacctccaactagatagaggagtctggagagttttatttgaggaagtgatatttaagctgagttctaaaagataagaaggagcctggcttgcaaagaatgaaggtggaacgaggagggatttcagaaagagggaattaaggggtatgggggagaggaattgacacaaaatcagtgtctttagaatagtgattgagaggagatatggtatgaagtgaggttggagaagtgggcacatagcaggtcatataggaccttaaagaccatcataaggagtttggaaagaaaaatgtaatgtgatgccgtggaagtaggagagtgataagatctggtgtttgttttacagagtttctctggctgctgtgtgatggtgttttggaagggagcaacaatggaaatggggaaactagtgtgatattcaggaaagagatgatggtggcttgggttaaggtggtttaaggcagtggaggtcaagtgaagtcacacacacagaagttgctgtaggttggatgtgagggatgaggggtgaaggaagggtttctggctttcataattgtcaggtagtaccaggggacttcaagggtggtgatggtggagaattaaggacccaattttgggcatgttgagtttgacatgcttgtgtgacagctaagtagtcatattggagcatggggagaggtctctgctaggggtgtaacttggtagttattaacatgttgatggtatttgaagtgatgggaatggatgagacaacttagagaagatgactcaggattgaaccccaaggaacacttgccttttagaggtctgtcgagggagaagccataaaaagatactgaaacagtaaccagtgatgcatgaaaaaac

SEQ ID NO: 103541 - DNA, 1043 bp, Homo sapiens
aggcacagtaaaaacatggcattatcatcttacgggaccaccatgacatatgtgttccatcattgactgaaacattgctatgcagtgcatgactctattagagtatttcataatggtattttaagagcttcctcatccccctcccccaaggctatactgttcagtgtttcactgtatggataagccataattcattaaacaggagagtcatgtcttacttacatatctatacctgctctgtaaacgcattcattcatattcaagggactgaactcttgaatttgtgcagaatatttctcttcttcatggctgagtatcctaaccagctgagaggattttcccttctttaaagaccaaggtatttaagattcagtcatttcagaaataaatccttctaaattgtgttgtataactataaaatttatttcttcttaacagtaaaatagtgggcatttttaaatggttttaacacaggtatcagcatcagtattgtttaggaatataaaagagtaatatttcaggagcttttgctggttttgccttactaagtggcaccattttgacatatatcatctatctattttacctgctttttagattttttttctcttcatctttcttgtttcctatgttggctgcctctaacataatattcctttttcctctggtacttattccccactgcttcccagttccttttcttaatttgctttgtaaatttttggtggacaattagccagataaccaggacagaaatattcctaaaataaaaataaatagattcagagagaaggtctgatggagttttcctgccgatgaaaattttggaatgaatgttttggaattctggatacctagagggcctttttgcttcctggttattaccgtgttctaggacagctctgtctaatagacctttctgtgatgatagaaatgttttatgtctgccctatccattatgatagccactatcctcacgtggctcttgagcacttgacatgtggctagtattaagtaactgaaattttaattttaattaagtt

SEQ ID NO: 103542 - DNA, 1014 bp, Homo sapiens
ttcagtagaaaccaatgttcattcagtagaaaccatctgagtacccattttttcacttttattataatattcagtaaattacatgagatattcaacactttattataaaataggcattgtgttaaatgattttacccaactgtaacctaatgtaagtgttctgagcatgtttaagataggctaggctaagctatgatgtttggtaggttaggtgtgttaaatgcatttttgacttactatattttcaacttatgatgagtttatagggacaaaatcccattgtaagttgaagaacatttgttctctatttgggtttgacaacatccctgtaatgtaggcattattaactccattttgcaggtgaagaaactgagtgtatccatatttgactgtttctcattatacgaattcaagaatggttaagttaaaattttatttctatcattttggtgtggaatagttatggatagtagatcagagtgatacaccagttgacttcttggcctaaacatttgaaatagacatttcaagattctttgacagtctctgttttggtcatcaaatgtgcacactgttgatgtgcataaagctttctgttgtttcaagtgaaattgaattttgggtagagcacagtggctcacacctgtaattccagcactttgggaggtcgaggcaggtagatctcttaaggtcagaagttcgagatcagtctggccgatgtgacaaaaacccgtctccactaaaaatacaaaaattagctgggcatggtggtgggtacctgtaatcccagctacttgggaggctgagcacaagaatctcttgaatccgggaggtgaaggttgcagtgagctggagtcacgccactgcattccagcctgcgcgacggagcgacactctgtttcaaaaaaaaaaatcgagttttgatttgtaagttaaagtaaataatttattattgaaaacatttaggattaagttcagctgcatataacaatctcctcttccccacacagaatc

SEQ ID NO: 103543 - DNA, 1582 bp, Homo sapiens
agaccagcaaatgttgttgaggtttagagatgaaaggggttaggatttgctggagcagtaaaaacagggttcattaaaaattttatccagagtatggagtggggaagggctggggtgagatgggatatgggtcatgccactgctagtgaaaggaaattgaaaatggctcattggattagaataaggtacttataccttctaaaattgttgatggagtcataggcagagattgggaaggggagattccaccaattagcattttaagtgaggagtgtaacgataccagcagctaatgtaaacaacaccaataataacaacttaatccctgagatcacaatttttaggaaaaatttcttacatttatttatattttggctcccttgattagctttcctctgattagagaatgtggtatcctgtatattaaaatacctttactcttgttggatttttaaaagatgcaaaactttaagataaatcagaggtcgattaagacaccagtaggccttgttgccatttccatttcccatatgcattgattactgtgtagcagtattcctgatgattgttgaatatttatgaggttctctcccaaaaaagcccaccaagtgaagaactatctttcattttttaagttcctgaaaattacctaaaactcttctgtaggagatggcttttacaaagaagattctttccttctcccttcccccaacccatagtagcttaacttaagtacctgggggagataaagataaatgtgggaaacttcaggatgaaagggacattattagagaccagagaagtcccgggaggtcatatcaggcttaaagtggaaactatgttacaacctaagcaaggagcaactgataggtctataaatagggttttatctcctcctagaaaatttttgtcatggttatagctttccatgtgggggactattatatttactaaaaataaaccgtttcagaaataattaaaataagtcccactgaactcatttatgttattaaaagtaaagtcatagcctgaaaataagtttatagagtttggcatgtactaattttaaggaacattttgatgctgcagccattgcttatatatgggatagaatggtaaagcccaaatggatttgtatggattaaaatagattaccttctcagaaaataatgttatttcagtttttttccgctagttcagaagaccctcaacctcctttgcatgcattcagacacataagttggcattacaaatgaatcatctagggaagtgggagtacttctaattctccaggaatctcacacagtaaagctgcttggatatggctattcagaacagaaaggtatagaaatggacaatggtatcccttccattggtattccttctgggcaacaaaaacccttaagctgtctgagtctgtttctcacacttctgttatcctgattgtagccctttaaattgtggagcaaattcttggcatctgtctgcctgtcagctacctatctctgacacccctggatagcttgttttcttcctatgagtatatgtgaaatttgtaaaaaagcatctattaatttaagta

SEQ ID NO: 103544 - DNA, 1832 bp, Homo sapiens
aaatttcattgtggctgtaagaacaaagggaatgcacttttcagcagctccttactgaccagtcgtgtggagtccctgtagtgtactcagggagagcggctgcctctctgattctctgcataaaacaaaagtattttgtacatagctttgaaatgggagagagaaacttctgaagaaaaaaagagttgtttggggtaataagattttgaggaggcagacacttcctgcattctcccctggggaaagaatctagctacaattgaagggcattgcctcaactaatttagttaagtggccccgtcctggattaataacttgggcagacttcccaatggatttggcagggtattgggtttctctctccccaaaccctcccttctctctgccctgcacatgtgtgctaacataattacagaaagttacaaggggatggggctgctcttaaaggaggtggctcagaggagagaatgtgattgtgtagtcctgtcatatttccgaaatggcagagttcgagtaaaatggtagggtggaagcaagcaggctggtttctctctgtaatggcaaagggggaggagggttggtggcagtgtcgatttcaagcacctagagcacacgagcactgggtactaattttgtgctagagaaatattaaactgtctttttgcatttgtttgtccagattgcattactaaggatctggtcattacagaacaacctttttgattaaggtcagaagttaacagtttttcaagtttggtggtcaagtgttcagaaatatttcacagatttagttgaaaacctgagcagatgcttttgctgttgtttacccccggggatcgggtgacattcttctcccttttcctcttccccacccctttgggaaccaaccaatcacgtagaggaatggatttcagtgcctaaggagtcagccaactccggagctgtagctgagactgaatgtttaactcttaggtatctgaatcacagggaatggcagacattgcagttagcttgttttcttgttggcatctactctcagagcccatccctaagggattgttcctaatgaggcgaggtacattgcattgaacttgaaggaactggcttttagccccaattctgccagtaactagtattgcaaccttggaaaagttattttctctttttagacttgcttctctttatgcacaatgagaggaaaaggagaaaatgggcatgtatggtatatcactatatattccagtggcgttttatcgctagccttgaggtttaggggaaaagcatttaacctgtattgagtgcctattctgaagcagtttgtttttatttgttaccttattaaattcttatgactctgcagggcaaatgctgttaacccaattttacagatgagaaaagtgtaggctagagaggctgtccagcttgcccaaggtcacttaaggaaggcccatctggctctaatgcccagactcttccattccactaggctggctaaaaaggccctagaagtcctgccagcattttcactctgatattctttaactccttcacagcttttaatcctgccctgtaggaggaccaaacattactgtctcctctttcacagccccgctactagagcaagtaaatgacttagggattcctccatcacctgaaagcagcaaaagaagatggtacagcattcaattttctccttcctccataaagaaattcccgtcctttatagccagctctgcccaccccttcctcattccccttttcttagacaggcagatattttcttttctctttccctttggcttgtgattatcaggtaaatatccctggtttga

SEQ ID NO: 103545 - DNA, 1463 bp, Homo sapiens
ctcctgacctcaagtgatccacgcgcctcagcctctgaatctgctggaattacaggcgtgagccactgctcctggccaatcatcacttcttaattcctctatgcccactacttccccagccctatgcaacaagtggtctccacttttctacagattttgcctattctgtatacagtttatataaatagactcaatagaatatgtggtcccttgtgtctggcttctttcacttagcataatgttttcacttagcacaatccatgttatagcagtacttcattttttaattgctaaataatacttcattatgtggatataccacatcttatttaatattttttttttatggtgggaaaacatgtttttatgttgggaaaagaaaggtgaagagactgagacaataaataggattattttccttaatttaaaatgggaggaataggtgactactatgaaaaccaaggctatcaggctttcttgaggaattgcagctaaaggcctaggtgacaggacagttggcatctgctgcttcatgaattgtttgtagcagagtggcagctcttttgacccgaacacgtgcagtattcagggagctcattgtgtaaatcttgtgtgttggccagcaccattgccccctacaatacctcatggggaactggagaggcctttgctgatctaatctggatacatttccctcagttactgcagctctgggtccccagagagtcctctctaaagagctgccagtttgttgagtgctggcatttgtaagattatttcttactatatgattcgtccagtgaagatgacacccatttatgaggtcctgatctattaagcagaaatagcaaccatcattcctgtgtttttggaatgaatgctgactctagggcccctgtatgctttctcagctgtagagtttggagggctcctttagcaagcaaacaatgtgcccttctgggtgccaggtgactttactgttgttctgttgattcctgttaattactttcttgatttaatctccaaggaatagagataccttcataaaatgagtggtatggctcaggatgtaagtctttttaatttgtacaccagaaatgttgtggatggctttctactttgccagaactttcagtttagtttagagagtgaattgtaatcatttgtcttgataccctggccctttggcatgtcagccctaacactgaaacaagaactctgggtagaggacatcagcttggccctcagttcctgagccattgaatgtcagcgctacatttaatcatatcacccccgttttacatttggggaaactgagttccagagaagttagatgacttaccaaatccatagtcttattttcttatagctcttgctagtggcaaagctgagtctgtgatattgagccttcattctcagtggagtgcttttttcccagtgcagagctgtttcctgaagaacat

SEQ ID NO: 103546 - DNA, 1386 bp, Homo sapiens
acaaaagtaatttgcattcattgaagaaaatttagaatatacagcagatcaaaagaatagaataaaatctgccttaatatatttaactttatcttaacgttttgttgttgattatcttgtttcagcgtaactctgtttgcatatatacacattttaaaattccttaccagatgtcaatcatattgtgtaaacttttgtaaaatgcctccagctcaggcctactttattataaacatcgtttcatgccattagctatgtctgctgcatcatttcatggctgccaagtagtcccttgtaaggttgtaagcttttttatcataattcttgctaaagtccgtcttgttttgatttcatgatatgcttttaggaagaataggatactgagtgctttggtactatgggtaaacaatttgtccagagtggcttaaagtataaaattaaggcagtaagcagattttggttgagaaggggacatggaactggaaaggcaatactaaacatgtttgaggttaaagtgagcccagaaataagaaaacaaattgaagtaaaaaagccaaagtatcaggaatagactgggatctgtgagttagatgggttagaacaaataggaatactgatggtgaacaatttgatggcaccaacagcctgcttttattgttggctttttgacatagaggctgagctgccgaatgacagcatgagaaaaactgggcataagacttccataaatagcagttattatttattgaggaccttcatgaccaggcatcatattaatcatttaatttttataataaccacatgcaattagatacattagttttccccattttacagcagtggaaactgacagtgacatttaaagtaacttggccaaatgctttgattggaaccaaattagttaaaactcccaaacctgtgcttttatgctgtcgtttatcctcattctttttttcatggtgtggcaggtgtttagccactattctgtgtatatgtattgttttactatgtgagctgggacagaaggagactaggtgtgtaagaaaggacactaaagtccactagagtggaggtggacttgaagaacaaaacaaaactaatagcccagtcgttttcgtaggaaaggtgtaaacctgagctagatagtgcagtgagcagaggatgggaatagcaaagtgaatcattgataggaaggagcaggcaggcatttggaaacaagggatggctagaagaatcaaagttccctcattaaaatttccttcccaaaggaggtgatatactctccaagggcactttaaaacagctttattgagatataattcacatactgtacagttcacccatttaaagtgtgtggcttttagcatgtttacaatcattcagcca

SEQ ID NO: 103547 - DNA, 1026 bp, Homo sapiens
cccaggctggaatgaagtggcgcaatcttggctcactgcaacatttgcctcccgggttcaagtgattcttctgcctcagcctcctgagtagctgggattacagacatgcgacactaagcctggctaatttttgtatttttagtagagacagtgttttgccatgttggccaggctgatctcaaacttctgacctcaggtgatctgctcacctcagcctcccaaagtgctggaattacagatgtgaaccaccacgcggggcccattctttgatgtttaaaatgcttgtcaatgacttctcaaaactatatttttttcttcaattttctaaaattctgttgaaagacacaatgtcccattgattagcagaaacaagtgggaacatcaaaggagatgcttaagttgacaaatataacatagacaattatagatttaaattcagagtggcagccttacttttaataagagggtaaatttaaaatgacctaagggtttcttttcttaacaagtattttctttcctcaagattttttttttcttttttctaaccagttttttcatgggtagaaaatgaactttattttagtcaaatttttgcaatgaactttcaaggctttttttttattgggagctgtggacaacagcaaatatatcttctgtagtgctcatttggcttgattgaagaaatgatgactacttttcttccctcggggatagttggtggaatggaggacatggtaagtgtgttcaggttctagcttagtgcttttgagcttaaaaaaagactgaccccaaggaggcagttgcttttatgtcatgacccagtatacacacatacatatatgttgactataacttagaattagtcttaccaaatgctgcctatcttaaccatgttctaagtactgtgatattttctgtccccttcaaaaaattgtcgattgtgactaacgattgaccaaaattgatttctgctggatttttcctggacccactaatggattgcaacctgtttgaaaaacattgttc

SEQ ID NO: 103548 - DNA, 1192 bp, Homo sapiens
ttgagctcaggagttggagaccagcctgggcaacatagcaagaccttgtctctactaaaaataaaaaaaatcagccgggtgtagtggtgtgtgcctgtagtcccagctactcgggaggctgaggtgggaggattgctggaacctgggagattgaggctgtggtgagctatgattgtgccactgcgctccagcctgggtgacagaacaagaccctgtctcaaaaataaatgaataaataaacccaggcaggattttagattgatgatacaatgtagtggtttagattcctagttgactgtttgtgatttgtgcatgtgcttaggcgtgttcccaggccttgattaaggctagaatgttttatggatttgcagtatttttaaagtgggagaatacttatgtgcatcagctctagggtttttatataagaagagcttaagagcagcaatctgattagaagagggccttgttctgcacagcagccttactgtttttgcgaagattatttatatgggatggctcttaggggtttcctagaaagtgatgggggtcctaaggctcctaaggctggcccctcgctcgcttttggtgcaacaactttatgtctgttataaataaggtgaccatataaactttagcattcaagttggggcacttttgagaataaaaagtgatgccaataattagtttcaaacagtcccaggtaaactgggatgtatggccatccttctctaattgaagaaatacagtcagtgttttcttaaccaaagtgatcagaactagtaggccgtgggttaatctaaacaattggttgaagtggggaaatattttaaacttttattttaatatagagcatttttaatttaaacaaatatatgcttactctttagtttcctgatatgaggtcaagatccttatatatagatgtgattgaaatactacttgaattttttgcataaactgtgctcccagagcatcatctgtgagttctaatttgtttttttttttaaagaggaacacggtcttgatgacattcagagcaatttgggtgaaactgtctatctagatttgtatggttttcccttcttgcccggtcttttacagttatcctgcccacatctaatttgagcctaagttttcagtgtcttgacttatttttcacaaagcattcacattagttattttcaaggaaatt

SEQ ID NO: 103549 - DNA, 1831 bp, Homo sapiens
gtcaggagtttgagaccagcctggccaacatagtgaaaccccggctctactaaaaatacaaaaattagctgggtgtgatggtatgcagttgtagtcctggctactcgggaggctgaggcaggagaattgcttgaactggggaggtagaggttgcagtgagctgagactacaccattgcattccagcctgagtgatagagcgagactttgtctcaaaaacaaaacataaaacaaacaaaaacaacaactacaaaaaaacaaaaactaggatggttgataatcaatagtcacctatttgcaggcctttcagatttgagagtatttgtccaattcttgcacttttggtgctgagttgatatcagagtggccccagataaggcatcgggagaagaagtgttgttagctctgtgttcatcccctactgagttcatcactgttgatattgaagatggaagcttttggtaaaagatagggccatttaccctaaatctaaagagaatgtaaagatttatttgtttttcattctggtttgtgtctgtcctagagcttctctaagctgggaaacttatgcctttgatagtacttttatatcttagtcatatatcagaaaaacattctcatacctggagatccaccccacggagtttctgattgggtaagtgtaagattgggcttacccattcaaatgtttaaaaatcccaaaggtgattctgctgtgtagtgcggttgagaactacagtcctatgggctgctttaaaagcagtgacagtttctgtttcatcctgtacttttcacttaggacatgtaataaaggggtcgtggttagtctcttaatctagtcttgcaaactaatgcagttactttattatttataaaatgttgcttattgtggatttaggaaggtaaagctaattgatgtaaagtatggaaatagacttactgagtttagaagactgaaagggtactgtattcttcttgtggggattatagatcaataaggagctaagcaaaaggagttaataggaatttattaaagcctaaaaaagtagtctctttgattgtacctactttttctttcttttgcagtaggggcccacttctgtaacctgcacattcattactcatgctgtctctgctgcaggcctgttacagaccctttgccatggtttaaagctgctgatttactttgaggcacattctgatggtgacaggtttattttagtttattttcttgggctttaatttgtactctggttggatctttgaattagagatcttagagtgtgcaaataggcaaatattgaatagctgcttgttgtatttgatgaatacagaatccaaatgagtactgctaattaatgcgcctaaccttgtgaactctcactttgcgttttgagatttgggaggcatttatcagcgtgaaacactggtcgctgaacagtctgagctggcggaaatggaacttgtgatctttacgtctcctcagcatggttttggctcagcaaatcgaggaactggggaatggggtgaaggtgaattttaattgtgcttttgtttgctttcccttttttttttttttttttttgttgttgttggtttggtttggtttttgagacagggtcttgctctgtcacccatactggagtgcagtggcatgaacatggctcactgcagccttgacccctggggtgcaagtgattctcccacctcagcctcctgagtagctgggaccacaggtgtgtgccaccacacccggcctgtttgctttccttattctttcactgttccttcctaaatagatgagaaccatctgcagacaagattcttatcag

SEQ ID NO: 103550 - DNA, 1529 bp, Homo sapiens
tagtggaaagtttactctattgttatattcaaaagtcctatcaatgaaaatttcttttacgctgttctgctagtaggaatgaaagtacagtgaatggaagaagaggatgaatatctaagtagcaatgttgagcactttgaaaattacaaaagcaatgtatgttctcatttactccttcgtgtgcacgtgcatcttccctcatttaaaagttcccttgaaagcaagggccttatttttaattcatctttttttactccatcagtcgactaacagtgcttggaaaatattaatattagtatatattaactgaatgattgaatgggtcaagtaagctggaaatgagtgttcatgttatatgaccttatactaaattagggtttgcatggcttttattagctatcatccttgccctcaaggatcttgacttagtggtttaaagtgaaaatgagacagatactcaacatgatatacctttaaaaaataaggttaattagaatcataagtaacataaaaagtaagctgcacaagtaagctaagtaaatattaaatattaggaggagtcacttgagtccataggatgatatagagtagtagaggaagtcttgaacagaggtcagatttcatccagatttcaaagaactgaggggataaaacaaaaaataaataaataaaaaagtaaaaactgaggggaaacaggctgatagagacgaagacctaaaacttttctgggttaagaggcagttctcagcagggttggtacttgtcccctttccatccaggggacatttggaaataaaccaacaagtttttggttatcctagtgtttaggggtgctaacggcttagtgtgagttggggctggggatgctgaagtcccacagtgtatgatgaagttaggaattaactctgaccccagtcgcagtagcaccctgcctaagatatactggaaaggaaacagatttagctgcataaggaagaaatagtttttatgaatagtgctcctaagcaaatactgttttttgtttttgccagtgtagaggcttaacgaggagatatatacacttaggtagggtggaatacagttaatggaacattttaggaaccagggcaggaatttatatttgatcagtttggatgattttgattatgcctaacattttctttcatctcatggtttgatatttttcttgtctttctcatagaacgagcctctgactccaggttatcatggattcccagcgcgggacagccaggttggtatctgctgtttgtaactcagatgatgtatgtgtgtggtgtgtttcatcaaagggttgctatgatagagagcatttcctgaaattacttactttgaaaggaaatgtggcttgtttcagcagtgaatttacttttacagatgtaaattaagcatatttttaaattctataagtattatgttattaaaattgtggatattagaagagaaaataatcactcaagcacagtcatgattggttttgtattttcttctccaggctacataataatttt

SEQ ID NO: 103551 - DNA, 1102 bp, Homo sapiens
tgtgttatatatgcctgaatatgaggaaaccatgaatataaggccttaatgctgtttttccattgaaaggaagggctaacctattaagcgtttagggaaataggcaaatatctacttaaaatatttatttatgtaatttagaaacattttatctttttgggaaaaaatgtgtatatgctctactgcatcagtatctgtattgttgcttagaaccactttgaatcttcagttttccagagtatatattgagatacagcacttttttgtgtctatatttattgtagtcactgatgattttatctcaagctgtaagtacttattcaaataacaacaggaagtttcttcatttgtactgtggtgtatactgcattgcttttaaaaaaaatgttaatggaggttaaattcatataacataaaattaaacttttaaaaaagtgaacaatttggtggcatttaatacgttcacagtgctgtacaaccactatctccatgtagcttacatttttacatcaccctcaatggatacatcacccgtatccattaagcaatcatcctgtctttccccttccctgctggcaaccaccaatctgctttctcttttgatgaatttacctgttctggagattttatataaatggagtcatataatatatggccttttatgtctggcttctttcacttagtactgtgtgttttcattgtttatccatgttgtagcatatatcagtacttctttcctttttataactgaatgatattcctttgtgtgtatatagcacaatttgtttatctgtttatcccttaatggacgtttgggtttccatcctttggcttttttttttttttttttttttttgagatggagtcccactctgtcgcccaggctggagcgcagtggtgtgatctctgctcactgcaagctctgcctcccaagttcatgccattctcctgcctcagcctcccaagcagctggaactacaggcacccgccaccaggcccagctaattttttgtatttttagtagagatgggatttcaccgtgttagccaggatggtctcaatctcctgacctcgtgatccgcccgccacagcctcccaaaat

SEQ ID NO: 103552 - DNA, 1628 bp, Homo sapiens
ctagtcccttagaaagggccaccagtggagtctcagtaccatctcatctctgtgggctcttcttgcccttctcccagctatcttgagtatttaattgtacttgcagaaaactaagctttacacaatatatatatatatatagttttctctatctgtttctgcaaaatgccttttacttaatggagactattatctaagagggctagaagatgaagaactaaaggatttgagtaattgagttgatacaggaatcaaagtataacgagatatgacaggcagctcttttatgaattcttaatagttgaccatttgtttaaaaaaatgtaattcctggtttttaaaacttggcatcaagaaaaaaaatcctcggtaggtttgaagttgtttgaagtcttttagattggttccaagcaagaattaacgtggtaattatcagaagatcactgaattggtaagtaatgagcattatcttctttctgaccagggaattaatacaataaaaggaagttcagggacttgctctgaggacactagtagtaggtggcagagagtctaggtcagagagttggcagttgtagccagtagggcattggaagcaacagcagcaggaggaaatagaaaagtccagttttacccagatcttaatggacttagggataggcaggattgtgaactcaaagcatataataaaaattgttacaataatagtttttctctatggggtaggtatactttcaggtgctttgtataccttgtgcctaaacttaacatccttgcaaggtgtagacatgatcacatatattttatagaccagaaaataaaattgaggcccagaaaggtgagtaacttgtcctaagttgttcctctaataaacaccagagctggtttaacatcatgttcaatagcaatgtgagtgaagagactgttataaaactcaattgaaataatgtctatcaattaaaataaaatttattattttgtctataatgactttttttggggtagaattgttaatttaaatttagactgtgatagtcaactcagcctgtcttaaagggacttttttgaatgttgcagaatgatcctttgaaatgtatttcttttatactctgaggctaattaagaggtatcttttgtttttttaaatgccaaagcttgtgaagtcttcagtttagtgaaacaccagtttaaattgaaatatcacaacacaaactgatttgttggtggttatcaattggcatatttagtcataatgagtattcacataattgtgtctgttagtctgttattccattcagatccagatgtagataattatcaatgattgcacagagtgaatcatgtatttagacagatttctaagttacggttggaagaactacaaatgagaggacttgggttccaggcctgtttttgtgaccttggacatgtcacttgaaactcaagggaatgaacctgagtttccattatcaatcaaaagagaataatgttatctatctaacagaattgttatgagtaggaggatgtgcttgacaccaatttctgcttcttagactagctctgtaaccttgagaaagacatttaaaaccttgtggtacattggttttcttatctgtaaggtcagtctg

SEQ ID NO: 103553 - DNA, 1038 bp, Homo sapiens
ggaagagagagtgatgtcatcagattccatggaccagcccaggaacccctgtgaggttggtggggagttgggtgtgtggggggtggtggagtgggagtttgtgcaggggaattgtggcttcagtaaggtgtggggagtccagttcaagcagagaggtcggtcgtgtggaattgtgctgagctgcattaatgcctgatttaaaaaaaaatctggaaaccattctgaatttgcagagtattttctttgttgaaagaagacatttatttaacaaaggagctcatctagatgtagcaatgtaatatctttttatagttgtatccctgaagtatttgtgtgtgcctttatcccttgtatgtgagggtatttgtgtgcatattttagtatatagttgcctttgtacaataccttttatggtgctgcatgcagttaaatgcttcattaatgcctgctgatggtattttttttatatggatgggtgtatataaataaaacacacttaaaaataatctgaaaagaatatcaaagcagttgctttttcagcagaaaggaaaactgcatgcttcaagacagttgttctgaacatatgcatgtttgtgctgatagtgaagggcaaatgtgtttcttttggtatgactaagaggctgctttttttttttaaacaaatataacagaacctgtgcatccaaatgaatattgcccttcaaaatagtcaccttggttggtgatacaaccattgcgcaaaacctgaggaactctcattcggaatcggctttagagatgagtgatgaggaaaacgttttcaatacctaacactgaatttttttatttaaaaaaatacctacctaggtttttgaaagacactaggtttcttcgaattggctcttcgtgattttgtggtgttgtcaaaaagtcaaatctgtgctcaaatggtgagcttttaccccatttgaagatacttaaagtcatgggtttaggctctgaaggcattttcattttcagatcaagggctctttaaatgtttagtttagcagtggccgt

SEQ ID NO: 103554 - DNA, 1393 bp, Homo sapiens
ttcatcctttgctgttttccacaacagttataaagctttttctagatgcctgtgtgttaactagaggcatcttgactcttttgacttctctaattgttctaaattgtttaagttttctgtggggtagatgactgttattatactaaattattcttctttcctgtcttttttttttttttttttttttttttttgctggagagttggtgccctggagttgagtctctgctttgcaaactgaaaatacaattttcctgtgtgtgccttatttttttcattccttttctccctttcctactacaaggctctgacctgcttggagcccttattacttggtcacaattgatactttgtccttcagagtcacataggacatagccactgcgttgattcagtgctcagctatcaaatatggctctgagaaggaattacttctctagaatgcaaagtgggcatctgagccagagaatgaagccctggtccatatttagtcattatttagggagagtgaggagtaacaatttcaaaattagagtttggattaagcaaagaaaatactagtcacaaattggctggtgtatgaggtgagtagagctggatttttaccagaagtagaaacctttgtaggaactgcctgtggttcaagaagttatgtatattttatggtatatctatgattatgaaaggataattttctaaaagtttatgttcttcctctggggattgttaacatctgttaatatccacaggaattttactaataataatgccaacttactcttgattcagtccctttgacacagggacccaaactaatttacattaattttgtcagtaattcttataatatccctgtgtgggagctgctttttagatgaggtatgtgagaatttgttaagtttacatagtgggtcagtcccttggatggaaagttggacccaggatttgtgcttccaggcttagtgtgtttgatcactgaagtgtgcagtctttttacctaattctcctccccatttattcttcctatgatggaggaaatcatatcaaggaaatagcaggagaattccatcttctaagaggttaaagacttttctgccttgaggcgtggagttcccaatccttggcttaggatggaaggaaacagcggaacactgtgatgttcagctgaaatgacccaactgtttttttgcatagttttttgttctctttttaaaaattctcctgttgggaggaggtgaatgtgagaattttctctctgccaatcttatatgtgaggcaggtggcttggttgtttttaatgctcagcagatatcactacttgcttttgggttggggaccagagaggaggaggtgaagcagccacttttgggtggggttgagaggagggtacaatg

SEQ ID NO: 103555 - DNA, 1059 bp, Homo sapiens
cctgtattcttagctacttgggagggaggctgaggcaggaggattgctttagaccaggagttaaagatcagcctgggcaacaacatagtaagacctcatctctacaattttttttttttttaaagttgactgcgcataatgccatgtgcctattgttccaactactccagagtctgaggaaggaggattgcttgagcttaggagttcaaggctgcagtgagctatgattgcaccactacactccagcctgggcaacagagcaagaccctgtcttttggagggggaaaaattatatgtatataaaagaaagtaaaaaggcaaactacaaagtaggagaaagtatttgtagtatagggatctggctagtctctagaatatctaaataacaactacaaacccatatataaaagaagttcttttaatgaatcttttgaacaacccagtagcaaaatgggcaaaatatttgagtagttacttcacaaaagatgatctccaaatgttccaaaaaatggtcaggatcgttaatcatcaggctaaagcaaataaccacgatgagatattatcacactacctccagaatgactaaaatgaaaaaggcagacattaccaagcattagtgaggacgttcagcatctggaaccctcatgtactggtggtaggaatgtaaattggtacaactttggaaaactggcagttggtagtatctaccaaagctcaacgtaagtgtaccctataaccagtcattccactcctaggcatacccaaccgaaatgtatacatgtgtgcactgaaagacatgtgcaaggatttttaggaatagcctcaagctggaaatggcacagaggcctttcaacattactgaaatatttttcagtaaattatgatatatttataagatggaatacactcaacagatggatcagttttacagatataatgtggagtgaaagaagccaacacaaaagaatgcataatgtgcaattccattaatacaaacttcaaaacaggcagagtgaatttatggtgttaaataaagtcattgtgggctggtgggagtga

SEQ ID NO: 103556 - DNA, 1236 bp, Homo sapiens
gtcaaacctttgtctgttgttttgcatcagaggagtgactttgaacattttcctgataaaagagttttaattccataagcttcttttcttcttgtttactaccttagctcaagatcttctcttaagcttactgacagagtcttgctttatttcagaaaatgtgcttaagacctggaagcccagtctgtgaagcatctggtttaccttgacctgtaaaattatcagactgcttcttttccctcccgttctgtgtgtttaagagaggcgcataattctattttgaggcttatgatagaataggagaataaagcaaactcgatgactctgtttactttaaaaacttgttgctcatctaaattggttgaatgactatcccttcccttaactaaccctttcaacttttcatcctggattgaccttccctaaatttatctttcataaaaagaggccatagatatatttgatctctaacccactgggactcttttttaagtttggcttttggctttttttttggtaacctttttctctaagatcaggaagaaagggataagaaattgtggacaagaaaattggaaaacacttaagaaaaagtttcgggttgtgtgggtgtgtgaaagcatatgtgtatacatatacatgtttttcctttcctgccccactgttctctagctagaatgacctagattttttttattctgggaaaaattgtattatttctggattctgctgtttcttttaagtagttggactggaagatgctggacttataacttacatttttaagttctttcttgtactcttaagaaaagtggtaaatggtacggattttagatgtgtgtactggaaacagtagcactaataaggaaatgcctttgtcctcctgttctttgttgaaatcagcttggatagctgaggatggtggagggttatttattatttttgggctccaatgtcaaaattctcagttttatttaaacactcaacacaattgatatttgagtgtcatgcaattattagctaaggttagtattcacttaggttaggaaacatctcttaccattttcatctcttgtagcacctaacacagccctgggtgcatacgaggcacttgataaaagcttgatgagtttaatttaatgtaatcttgcttaattcatagattgagttgtttgacctattaggtggaagaaaacatcattgtccttttttttttttggtagggtattttttttt

SEQ ID NO: 103557 - DNA, 1050 bp, Homo sapiens
acatgccagcatgcctggttaattgaagagtgtgtgtgttttttttttttttgagatgggtctcactgtattgcccaggctggtcttgagctcctgaccttgagcagtcctcctgcctcagcctcccaaagtgctgagatttcaggcataagtcactatgcccagccacattttttcttgagctaaatgtacaatatatcctctgatgaaaaattttagtgctgtttctaggtagcgaggatgtctgggagatagagtttggatgctgaaatatttgatttttttgggatatttttgatgctataggaataatgtgtcagggtatttggaattgggatagcataagacaagttacatggtcacccttcttgagtgagtcttagcaatatagcattgcaaccgacggagaattatgttctcaattcaccagtaggatctttctcactgtgattttttaaaatcccccatttgactaggtgtaaagaagagaaggtagctaagatgttgtttgtttttcgagtggctcttatttgccaggtaccagactcatgttatctcctacaatttatcagaactctaggataaatggcctcaagtccatttgcgggtgagaaaactgcacatgcacagtgtcacacagctagctttgtttcagagacagcctcaacccattgtgttctgggcctaaaggtgatacatattcttccacattctgagttatatataaattccaaacccttctcagaaagaaactcctttctaagggtaatgtggtagttaaaaagatttttaaaaaatcactttaaacttatttttattgtcatccttgtcccattttaagcatactaacttcctgcctctgatatataaagagccgatgctggagagaggaaggaggcaaaccattttgtcatgtttatggagagacctcaaggctctaaaagctgcttttatttttttgagacaaagtttccctctgttgcccaggctggagtgcagtggtgcgatctcggctcactgcaacctcgacctcctgagttcaagtgattc

SEQ ID NO: 103558 - DNA, 1491 bp, Homo sapiens
ttcatttaaatgcttaaaaaaagcaggccacttcaaatttctaaaaatagcatttaaaaaaccccaaaatgatctaaaaagggattttagttgcatgaagactatactgtttggggggtttctgggctctagggaggatgctagctctctgaatgctttatgttcttatatgactcatcttgttagtggtgaccccagaagggcagtgggagaaatatgttccgaagggtgatttggaaggaagggatgatctggaaggaagggatgagaaggttgcaggcaggaaaactgagctaagtggttttagagagtgttttttttttttttttttttttttttagggagaaaaagaaaaaaggaaaggctgctaggagcttggtcctaactgattccagatgggcctgctacagtacaaaggttttcagtgtgtttgggatggggctgaccaagaaggccccctcagcacttcctgtgcagctctgcaattgtatgcacctaatcagaaacagcccttactgctggagctcaagagcaaccgtctcatgttgtctttgtgcctcattctgtgaactgctccctttgcctgccctgtttacctccctctcctagtctcttttcctttctaatcttttctatatttgttttcagggaatgttaaaaggaggggagatatgtatatataaacataaacatatgtatatgtttcttgtgggttgggagcagagaagagagggaggaaggaatggccaaattaaacgcagatggtgaatatttaggaaaggaatttttttctggacctgggaggcatttgctagaaatggggattgggaacatgagaatgtgaatgagacttggaaaaacaagccactctttatttttcatttttttgaatcctgcacacttgtctgaatggttcaaaatataacattgcatggggatggtttatttacattgtaaactgagtatcactggccctgtgtagctgtgtgccaaagggtgagtgtgacagtgactttaaacttaaaggaagtaggaaggtgttttgcacccacatcccatgtagtattgttgccaggggagcatacctggtgtgctctgacgtgggcttgaatttggccgttttcccacctactgcagtatatcaggcactctgcacagcttaaaagaggatttttttggtgacactcagctgcaggcactatgaattgttcttttgtgccctcctgattccaccagggatatattttatatatatacttgattttctattttgcttctattttggttgcctggttagactgagggtatgcctggtattgactgttagttttttgggtctagctgatgattacagaaactctgccatcccaggggtccatttaggtctttgcaattttattctaatccactcagctgttgtactgatgttgttgcgtaaatgtgagcttattaggatagactatgtaaaaatatactgtgttggcataaagg

SEQ ID NO: 103559 - DNA, 1637 bp, Homo sapiens
ttgggagtcagccgagctgccaagttctctgtgcctaatttgaagtgtattaatgtttcaggagtgggccagatctcttataggcacctcctacagttcagctttccacgttccaggaggaaatgtgaccctgctgtttcgggaaccccacctcatgtagtcttaatttctctccgaatgtgtttgaagtcttgccagcgtagagaggggaagtttaacacactaagagaatacatttttagggagcctgcccacaaggtggtcggtcccctatgccgtggccaaggaaaaggaacccactcatccttcaggttacttaatatatgagattaaggcctcagcccatataggagtaattttctcttcttctggatgtgaaatggtaaaacaggccctttaagaactagaccatttttagttgagaggaaaacattgatcacattggctccagataagagcagatactgtgtgtacttcctggcaaaaactttgtatgtggttcacagcaattcctgccattctggttgtgtctgaggggctgacaacagacagttctaatctaatctcaaaccttttacttgctggactggttcttaatcccagaaaccagcctgaggtcaagaattggttcctaattgccataggtataaaggtggcgctcctattgagggagttttcagtgttcctgctctggttgtcaccagtgtggcttgggagatggtttatgttggtctgtcccccctctatggatataaactaattgttaaacagttactgactcctgtaagtttagacagtttatagcgccagcctttaaatttcattgtgaaatataatcttcagatttattagaacagtttaacggaagaaaataagagaaagagctctaaaaaggtgtagactgtcaaagaaggctcatggaggaagcatcagttagaggactctcacagtactttataattacctcatcattatcaagtattggactaacattgtctttgaacatctctctctgttgcctgtagattataaacttcttgaggatagggcagtttctgttctttttttgtatttgactctggccttcttgatcgatttggtaaatatttattgagatcaattaaaataagatgctttaaaactgagcacaaaggacaagttacatttcagtagcttagtagtgaatttaattctgcaggtcttggtgctgtacttctttggtgagtttgctgggcccagatggctaggcttgtactttccttagacattttaatggcctgtcttggttgtgatgtctctaagcactaggaggacagggaatatggctcatagaagagggtgccaactgagagcctctgtccattctctccacccccacacaactcctttctgtacagtctttggtaggtaataacatttctttaaagtgatgattcctaggtgaaaccggaggccagttttgtgtgtactcttatgttttattaggtgtgtgggatttgaggaagttgtggtgctggaaagaatctgccttgccccatattactggtgaaaaaatagagacctaggaaggataaataatttattccaagccatatggctacttagtggccatcaagactattgtccaggtctcctta

SEQ ID NO: 103560 - DNA, 1041 bp, Homo sapiens
tgcatattgctactagagtgtccttgcctctaggctgtctcagcaaacagctagaaattgtgtgtatgtgtacatacatatgtacataaacacatatataccacatatacatctatatttccatatctctttgtgctatatacgtatatatacatgcatgatgtttgtgtgtgtgttacatattttaaattataaaacaatgcattttatattataaaatcatgaattcacactgataactccattaaatgcagccaacctctttccatatttgtaaatatattctccagtagggaaaaacttggctccccttatccccaatatgtttacttatttgctcagtgtagccagttttccaaccgcgatggctgactccaccacctctgtaccctactcctcatgttctggaatcctcagtcaatgggctcctttggcccattcttccttgtggcttcctaatctccctagagtttcccagctttacctgtagtcttccagtgccccctgacccccaaccactcttatctttggcctctgggcctgctgtcctgtgcatccttgattcctcagctgctcacctacctgtgtccttggctgctgtgctaactcctctgtgacggaagggggacagggctttttttttttttgagggggattttatacgtatacacatatgtatatgtgtgtgtgtgcatgtatatatatatatatatatatatatatatatatatatatagttcattcaggtataatttacatgcagtaaaattcattcttttaaggctacatttctatgaattttgacaaatgtaatatagacatgtaaccactaccacaatcaagatataaaatgcgtccattaccgtagaaagtttcttcaggctctttcacagttagttctctcttcgcatccgcagccactggcatcactgatcagatttctgttcctatgattttgccatttctaaaatgttatataaatggaatcatgtattatgtagctttttgagtatggcttctttcacttagtgtaattctttt

SEQ ID NO: 103561 - DNA, 2541 bp, Homo sapiens
aatcttacagatggtgtcagagataaacagagtgtgcctggtcgttgaggaggaagagagcttggattccaaattattcatcgactctagctttctagtcacatgtaatgagaaaacattgtacttgaagtaaaatggtcatgggtcatagttctagattcccactaattagttgtgttcatttagttcagttaaccaaccatttatcaagtgccgaacactgttggacactggagacaaattagatacaggtcttgccatccaggatttgatgatctaggaaatttttttgtgtagccgtagttaagcagttattaacatctctgggtcattctccatttgcaaaatgtggtgatatgatgttatttctgagattgcttttagctctaacatcttaccacagtgattcaaagtaaaatctaataagaatcagcatctcctaaaagtaattattatagttttcttcaatagaaaaaaaaatccaggtaaaaaaatggccaaggggtctaaactgagacaatcttagaaacttactatatccctttcctgtcttacttttctatcaggttctgtttgattttgacaactatagttaataaggaaggttcaagagcagatgcccctggtagggggcgggtagtagctggtggattagagctaaagtagagctggtaaaagcctcctggttgcagagctgagggcagattgggcaggtgcactactaaggtatggttttgagatctactatttccagcaccttgttgaaaagttgatagctacattcatcacccaggtgaagtctaccataatgaggaaaaaattgcttatcttgccagcagccctcaggataaacttaggagaactggggagatttgtttttctgatgattcttggattttgtagtgcagtcattgtttgctttgctgccttgtaggggaggaagggaagaggctaaggggagagggtgggtgaaacagctgtcaaagaaagaggagtcctgaaaagctatttgtgtttgggagctggagctcaatggtagggctgtggtagttttgtaggccacactctcttgttgctgttttgcttttgggacataacactaataaataggattagtggttttttttttttttaaacgatacccttagcttgttagagttaaaacagcttttgttctaaaacactctatcagagactattaaagaatgatttttcttatataactgttgcactcaacatgttccattgtagggactgtagcatggtttctattcagatatcctggaccctcagacctcaaattaccgtccaaccatttccttttctcctacccacttccctgttcattctgcagttcttgtaatcaccccagcaaatgtttatttagcgcccgtatgccctgtaccatgctggctgttgaggatgtggagggaggcagagagagagagacagtccatgacctcaggggctcccagtgtagtagggagactggtaccaacaagacctataatgtggtaagtgcattaagagaattgagtaaatggggagatggggggaggagggtctaaactagctgggaccggtggaagtcagggaaagggacctgggggatgtaacaggagctatccttctgtgttttaaacagtagaaagaatagagaaatactggtttaatgggtagaacacagggtgggggaattaggactcttccttttcggtcttttgtgttcaaaagtatagcagctttctttgcttcttgctcctagcatcagattatctattcccctggaattatgtgggttggagaagaatggaaaggaatttgcccacctgcatggagagagagggaggcagtagggatgtgggtgtttaaaagcccttggcatgattggctgtaagtacagatggctatttgtgttaccattattgtagctgttatgcctacattccctttggtgtgcctctctacagggataattgtggggtcctgacttataagtcttcctgctgctggataaaatagatgctgatgtgttgtgcgttacagggtatacagtgaattctgtgtgggctgtcttcttactgctgccttgatcttttggggcctcaaacataaggggaaaatgactaattttgtgtgtgcaaattcacattggtgaaaaccagtaaaaccataaaaatggttatattcaattttcctaagggattgacctccaaatgaagctaaaattaactttggtgaatgcttatatttttaaatttttaattctaattttttttttttttttgaaatggagtcttgctctgtcacccaggctgaagtgcagtggcatgatcttggcttactgcaatctcagactcctaggttcaagggattcttatgcctcagcctcctgagtagctgtgaccacaggcgggcaccaccacacctggctaatttttgtatttttagtagagataaggatttaccatgttggccaggctggtctcgaactcctggcctcaagtgatctgcccacctttcctcccaaagtgctgggat

SEQ ID NO: 103562 - DNA, 2198 bp, Homo sapiens
gtgctatgtggggtgtctgtgtctgtgtgtgcacatgggttgtgcctctatttaagcatacctgattgcctataatagtggtatttattaagctcgtgtgggcagaagcacaacagttcagcccaagattactaaaaatatagcggactggctgcttttataatctgagggagaggttagaattggtcttttcattatccaggctgcattttgcattttctttctgagcaacaagggtttgctgcctgaggaattatgaggaagactctatctatctatctatctatctatctatctatctatctatctatctatctatccatctatctatctatctatctagagatggagtctttcctgctttgttgcccaggctggccttgaacttctgggctccagtgatcctcccaccttctgtgatctgattggaacacttgtgaaggagactgtccttttctctttctattctttgaccccgttgtctcctctttaactgtttttctttgagaagatatttcatttagagccatagactgttagaattagggaggacttaaagattatctagtcaagaggttgcaaactataggcctttggtgtggctcccacacatgggattttgtttggataacacagtattttaaaggcctttggatttaacatttaaacattgggaaagctcacatgaaacccagatttgtggcttcacttggcagcacggggcccacattcctacatctgacaatctgcaggagctaaatagtggctgttctcttttggaatgacccgtttgcttcagtattgcacagtctctacctgtgcacttcactctttacctctggtgagtgttacaatcccggtctaatccagtctacccattttacagaagagaggaagagatttgctgaaaacctagtaggtagttggaacaacttagggtttgtgtctcttgacttttagttgattacgattatttctactagtattttacttttgcctttcttactctttttttgttgttcattcaaaatattcattgtgtctgtagcaagagtcaattctgagagtgtgaaaaggaatgtgataaagtctcctttcttgatttggtcttgagggaccaaatgagtctactttggaacagccaccatccaccattactgtgtcacattatgttgtcatcttttcttcgcatcatctggaattttaaaaatttgtctccttgtttactggctgtcttcccaagtacttgagtgtaagcactgtgaagccagtgactgtgtctcatttaatgttgtatctccattgcctgtcacttagtgaattctcggtatttgttgaatgaatgactaaaggaggcatttgaactcagctttgaaagatgaataggaattttctatgcagactgggtaagggtgttccagacatagatactggggtgagcagagtcatggagacatgaaaatacatagtatattcttgtgcttctttcgggctgggtttgttcatgtgccacaaaaagctatttttgatacagaaagaccatctggatttgaaggactctagatctttggttaaaaaaaaattgagaaactaaatgtgtttctgagccaacttcagtatagctttttcccctctgtaagtcttttagccagatgctgggcattcattatcattaatgatttatagacctttaccaacatatttaccacagttttattatataacagatgtgaaacaagggtatggttccaatgtgccttcagtctagcaacacactctgccttgtgcaaagcagtctaatattttgcaagtccagaacaactggcagtatgtagttatttttagagtatataatggactaagtggtgagtttctgagggcatagggcagaggttctcaatattagccaactgtgcgttagaatcacctgggaagcttttaaacatttcagtgcttaggccataccctacccagaccaattaaatcaggaactctgggggcaggacccaggaatcaggtttgtttttttaaacatcttcagatgatgctagtatgcagtaaggttgagaaccattggcctagggggacacaaacaagggaaggagacagatttttgaagcttgttgtaagttgttgaggtataaggagggatccccaagaggtcagtcattaagaagattaggtaattgaagagaatt

SEQ ID NO: 103563 - DNA, 1125 bp, Homo sapiens
ttgccatttaatggttgtatggattataggattttagaactgaaagaaccttatctgtatggaatatagatcctagatttgcagggtgaatgatcgctgtgcggttcttttgctagagataatcatttcaaacaaagtcatgttcaaaggccaaggtggcccccctttagggttttacctctggctttcactggttaagtagctctagttagtttgtttcaaggcttaattagaccagtgtttcttaatcttggctgcctgttagcatcctctggggagctttaagaaaaatactgttgccccaacctcaccaaataatttacagaataagttttattcttcttccgggaagtttgtcatccattttccaacttgctaaagttgatcaacagtggctttattgttctttgacaaaagaaaaggcatatcagactttgtattatctcatttttagatgcaccagtcagtaagcatttggcagttgggggcccccatctgtgaccattgggagcttgccttatgaacccttagatcctgatctgtgacatagaatgtgagcagaaagttccatctggtgtgattgctgcctcctctcatgggttctctggtttgagtcactgctgttgtatcacacgcttctttatgacaggctgacagattaattccctagaggctgacctgatgtaaataggaaaatttgcttattatcagtagaaggagcaggttatttaattactattcaattttagtgctatttattttttgcttttaggactgaaacatctcctgttcagccatttgaattttgaaaagttgttagttgcttttgataactttgaggaatcagattaatttttaaaatggtttttaaatgtatgagctcatgctaagtgcatttgtttgtggtagtaattgctttctgaaatctgttttctgcaactcagaatagtataatatttagaacttggtcactgtttttagaaggaattctgaaggaattgtaaagaacagcctaaatttgttcttatcccttggtttttctacaaacacaattttagtattgtggcattcagaagttaatgcattcttggtatgttgtttacaagtaatattttacaaatgtaa

SEQ ID NO: 103564 - DNA, 1169 bp, Homo sapiens
catggccagtatttctgtttttaagtgacctcttggggatttgccacagtggctgtttaaacatccctcattgtcctacatttcctttccttttgcttcccttcacttaatcttgcctcttaatttatagaaaccctcagattggagctcctttaccttcgtgccaccaaatttgagtgccacttttcgtcctttctgtagtgagttctacttggatttttcccaagattttaaatctgcccttctatatctttttttcatcaactttaaacaaaataaataaataaaatctagcacatttagttatctttaccctccatctgcttttcactctcctcccttctacaagccaccttcttaaaatagttgtctgtgccctttgagcccattgcagttctggttttctctttaaccacaacattgaaactcttttctccaaaatcaccattaacccccttgcgactacatccaatgaatattcctttgtgtcatctttgtccttggaatgccgctcttcccctggcttctcttgtaccatgctttttagaatttctccctctgtctgccagtgcatttttgttatcccttcctcagcccaccacttaaaaattggtgcttgaaatgattctattctaggtctttttctttttaattcttttaagttatatatatttctccttgggcaagctcatctattgctaaggctttatttatcatctatatgctgacaacttccaaattgctgtctgtagcctagatctctttcctgcacttaggatgtctgtatccacctgctcagtgtgcatctgtgcttggataccccatagttaactgcaaacacaacatctaaaactgattcctccttatctgctctttttaagaagagatggagttttgccatgttggcaaggctggtcttgaactcataacgtcaggtgatctgcccgcctcggtctcccaagatgctgggattacaggcatgagccactatgcccagcccttatctggaatttctgcaaaattctgtccttgtgtaactcagcaaccagtgccaccatttacccagctgctgaagctactgttatagcctcttaaatggtccttctgtctttaatttcgtccctcccatcccacatcattgcgttgcagtaatttttttcagagtgatc

SEQ ID NO: 103565 - DNA, 1056 bp, Homo sapiens
tgttgcacagtgagcaaacttccttcatcttcagcctcttaactgcatgttatttttactcctttctcttaactaaatttgttttctttctcaggactttacatcctctatctcccttctagtgggtgggttttttgttttttgtttttgtaatttttaaaatttagagatggggtctctctgtgttgcccaggctggtctcaaactcccaagctcaagtgatccccctgcctcagcctcccaagcagctgggactacaggtgtgcaacaccatgcttggcttagtgggtgtttcggtgttccttgttctcctgtattacagagattagtattctgttgttctctctctcccctctccaatgcttacataaaatcctatacccttgggtgaaattccctgttccttaaaagctcgtgtaatctggctagtctaaccttttcccttatgcagtactgtcatttattgttttgtccctccctcatttaaaaaatgaacaaaaacttgtagctcttggattgtgggctttcttcttaccttaagtattgctattgtcttaagagactccagtgtctgtgtggaagactgatccagcaccttagctagtcttatgtctggttctctaattaatctgtttcattgcctttcttctctttcaccaactattctaaggccacattttggggttagtcaatttagaactgcttaatttctgaaaatttaaagacaagcgtctcattttctcattaagactcttcagttctctcatttaattacccccactgcctcttttctccaatgtcattgagaaagccagtgcattggccctctctgtattctctccctttttgttaactcccctgtctttgctcccttccctgtcttgtttcgactttgtcgtccttctcttaaacagctctttggccaatatcctctctttattttcatttttcattgtatttttcctacctggcaaaactcagtacagctctctgccttcctaatatccaacctttcctagacccttgactcctgcctggtagtatttctgtgtgtgt

SEQ ID NO: 103566 - DNA, 1370 bp, Homo sapiens
aacaattcgattcattttgatgatgcaaactctgacctgtaatcaaaatggtccttttgaggcgcaaaggtgaatttagctttgcttgggcttttaacacttgtatatgcatctgtttatgtcctttctgtcttatgtgttccttagttgattcttagtagtggaataaagctgtttggacattacatggtaaatatgttaaaaccagtattgtattatgtttttgtatgttatgttttgcttgagattcagagcacttaataaccattctgtatctcatcctacctctgagaagtttgaaagtaaagcaaggtatcctgttttctgcctccaagtagggaaagggaggggagttcatttacatacgaggctgagtggaagatgtgagggaattcagagttgtaaggcagagacatagatgtttccaggagtgggttcatccttactaaccttcatcttgtagctgttttgtttttggcttagcttcgaacttctgaagtttatactgaagcaagaggcaagacgtattggataaatgacccaggagacataatcagtaaaggtaaatttccatctgctttgggtcaaaatggagcttttttataaggaaactaggtatcataatgggaagtggttgggttatgagagggttcaagaatcaagagaataagtattcagttaaaaccatttgatttcattttttttctggtgttttagtaagctttaatcaggtatttcctaaggaatttaaaattatctcttaagtttgagaagtctgccgggctagatgaatggattgttagtttgttgccttggacagagacttaaagaactcttgaatctacattctgttatcttctgtatccttgtcatctttgtcattagttgaatacttaaacatagtttcgaattgttacttgtgtgtgtgtgtatgtgtatgtgtgtgtgtggttatctgttgtctctctaagcagagttaattttcttgaggaccatgccttttatttctttgcgttccctctgctagtaatgatactttgagttgtatatttcagaggatatatcttaagcatattggcaacatccgctggtgtggcaaggtaagagtcaagtggagctcagtggttaagagtttggggtttagagtcctattgactttgctgtttaatagatttattaccttaggcaagtttctcaatttctctgaggctcagttccttcatctgtaaaatgttaataatagtttctacctcacagagttgtgagaactaatgagatattgcaagtaaagcacttagccacaggagtggttacatatattaggtgtgtaaaaaagtaattgtttgatttgttaatttttatttttgatt

SEQ ID NO: 103567 - DNA, 1427 bp, Homo sapiens
taatcaacaaagcatttataatattatcgtgtaaggaaccatagagcaacctctctttccttggggctatttctctgctagatctcagcagcctcatatttcctggtgacttttttttctctttttaagagctttattcaagtcaaaggtgtcttgcctttacagttgcctttacagcttttttttttcttttttttttttttgagacagagtcttgctcttgctctgttgcctaggctggagtgtagtggcacaatctcagctcactgcaacctccacctaccaggctcaggtgattctcatgcctcagcctcctgagtagctgggattacaggcacttgccaccatgcctggctgattttaatagagatggggtttcgccatgttggccaggctggtcttgaactcctggcttcaagtgacccaaccaccttggcctctcaaagtgctgggattacagatataagccaccgtgcccagccttacagatattttttttaagataattctttcctcacctgttggattcttgtttatcctgtaccgtgggagacatatgggtgaggggaatggtatcccccatagtagattggataatgatctcaggaggtttttattggtgaatcaattattattttctttgttagaagaagaatctttagtaagaagggagaagaaacttttcatttgggagagaaaataaaaacaagctttgctgaggccagaatgggatcatgtgtaataaactatgaattcatcctctttttcctccttccctcctagttgcagttgatctcacaacagctgtttccagctgtcctctggattttgcccaggccccttgggatggctgcagtgactcacacagctgggcttttttccataatcgtctgaatctagctcctcaagaagcaggaggaggaggaggaaaagggtgacttggttgcactggaagagattttcttgttggtgtattagtccgttctcacactgctgtaaagaactacctgagactgggtaatttatgaagaaaagagatttaattgactcacagttccaaagccttaacaggaggcatgactgggaggcctcaggaaacttacaatcatggcagaaggggaagcaagcacatcttaaccatggtggagcaggagagagagagagtgtgaagggggaggtgccacatgcttttaaacgatcactcgagaactcactcatcctgagaacatcaagggggatgtctgtccccatgattcagttacctcccaccaggcccctcctctgacacgtggggattacaatttgagatgagattttgtgggggacacagagccaaaccgtatcagttggatcactgtctcccggcaggctctgggtttggtttattcttgaaagctatgatcctaggagataacattgccggcgga

SEQ ID NO: 103568 - DNA, 1060 bp, Homo sapiens
agcataaaggagaaaaagagggagatgcaaaatgttagctaaggcaactgaaaaactttttctgacttttacatctttttaacaaagatgtcattattttatttttttgagacagggtcgcactctgtcacccagtctggagtgtggtggttcggtcacggctcactgcagccttgacttctcaggctcaagcagtcctcccacctaagcctcctaagtggctgggactacaggtgtgccaccatgtctgggtaattttttatttattttttgtagccatgaggcactatagcctaggcactgtgttgcccaggctgattcaaactcctgggctctagcgatcttcctgcctcaacctcccaaagtgctaggattataggtgtgagccactgcatccgacagttattttaatgttaagcctgggaggccaagggaagtgttcctttggccttgggagctgactcagactttcctctatactccctccgcatctcagttccttccactatttacaggatctcctgtggctctctttggcaattagttgcaagaggtcttatatatattgaaatgagatggaatgtaaatacagtatttaaaaatatttgtggaagaaataattgaagttctgtagtgacagggccacactagggagcagagaatgcatagagggattttgaacctttgtaccttactttaggaacagtgttattgatggcaggtgggcagctgagagagttagaggagattttgttggcttttaaatatatctctagacttctgaaggcagcagttcttctattctcatgtatggtttggctggtaaattttaaggtatgaccgcttctattgtgtgaatgtctgaaagaactgtagaatccaagactgaccactgaggaatatgtgttgatcaaaaccatttgagctgtaagcccagggattttgaagggtggatgtctgggtgtgttaagaccaggtagaggagaatgcttattagtttcctaagtctcatattatcagagcccattaaatcaatattagtttgtatcaaatgccagta

SEQ ID NO: 103569 - DNA, 1082 bp, Homo sapiens
gaacagagaaggggttaccagcaggcccagttgataagctggtcagaagacaaagttgaagtttgagaaggaacagagatcttcattgtataggggataagagttcaaggagtgtcttttgaagaaaggaaggtcttttgaagaaagtaattgcaagttagcgattggaaaaacttactaaggtaggagctgcttagaactggaagagtccgggctgggcgtggtggctcatgcctataatcccagcactttgggaggccaaggtggggggatcatctgaggtcagaagtttgagaccagcctggcccacatggcgaaacccccatctgtacaaacatacaaaaaaattagctgggtgtagtggcacatgcctgtagtcccagctactcaggaagctgaagcagggggatcacttgaacctgggaggcagaggttgctgtgagctgagatcgtgccattgcacttgagcttgggtgacagagtgagactccgtctcaagaactagaagagtcctgaagttctttctggagtattggtgtgatagaagcattagtagtttcttttatgttctggagaacttctgtgcacataaatgtttatagatatataccccgtttgtataccaaaggaatcttcattatttttcactgaacaaaacaccttagagaacatttcgtttgttttgccaatcaatctaattcttttaaatgaccacatagtatcccacggtaagtttttttgtttgttttttttaaaatcatgatttgtttaaacatgtcctattgctcgacatttaggtcgtttccagtcttttgctatttgaaacaatgctgcttgtatgtatgttgctgtgtgcataagataagcacaagaagacggattctgagaagtggaattgtgtttctaagggtctgcacattttaacttttcataggtattgctgagtatcagagggacatttttctattatgttaccgtactttcatttttcacaagccgaagtgaaaaatggtatcttggctttttaatttgtttgttgttgttgttgttgttttcttttttcttctgtttttgaggcagag

SEQ ID NO: 103570 - DNA, 1101 bp, Homo sapiens
gtggtgttgacacttcgaggagagtgagaagttttagaagtagctgctgttcctatgtaataaggattcatcaagaagtgggatgaaagggttgctcagtctcagtaagtgccagctgggattgagttggtcctgatggtttaacttttttttttttgagacagagtttcactcttgtcgcccaggctggagtacaatggtgtgatcttggctcactgcaacctccaccacctgggttcaaatgattctcctgcctcagcctcccaagtagctgggattacaggcacttgccaccatgcctggccaatttttatgtttttagtagagatggggtttcactgtgttggccaggctgatctcaaactcctgacctcaggtgatctacccacctcggcctcccaaagtgctggggttataggcgtgaaccacctcgcccagctgtttcttaactatcagacagtacttggaagcccatgagtgtagctgagtgcacgttacctagtgccaagtgtcaataaactgagatgaatgggttcaggtagaataagggcgtgggagaaaacaaaggacagcaggagcttttcctacgagtttgagatcttgacgttagaagagttttgggtagcaatgatgtgtaaggatccaatggatgagtttggtgtaggtagtgccccctggaaataagtaggttgaagaacttggagtctcagttttgaaagtgttgtcaacttgaatgttgaaacgatctaggcctaagcattgaaactctgggcaaattgggagaaagtcatggaggttggggaagtggaaagaatgatgtataagtgggttaactcagtgactctcaactgggggtgattttgtcccctcagttgacattggcaacgtctggagacatttttgagttttataattgtggaggtcttactggcatctaggggttggaagccagagatgttactttaacatcctaaagtgcacaagagagtctcccacaatgaagaattatctggcccaaaatgtcagtaatgctgaggttgagaaccctgcattaactttaaaagaacagttgttgagtaaaggcaacagttgttgaatgtg

SEQ ID NO: 103571 - DNA, 1049 bp, Homo sapiens
caatgttgttttgtccattagaggctttcaaaaatttttatcaacatttaagtgcttaatttctacagtataccagggctggcagtaggtaggcaggtgatattttattcacataccctatatatttgcacattttgattgctcgttctgttaattaaggagagaatttctcttttgtagctgaaatgttttatgctttgaatccactcaaagacaaattattctggaaagcttgaactaaacctggtcagatgcttctgagttatgagagagggattgaaataaactttttcagctaaaaataattttgctcacaagttaccaaaaatggctgactagaaatgcttttaagatacttgtctaagctaccataagctaaaggtcaagaaaaaagtttagaacacgttatgagaaacgattggctctactttgctaaagcttttgccaaacctcttattctgtaatgaccacatgagacaaaagctggtgaaagtggtatgccttagattcagtggggacctagagattttttcagtggaacacatgtgctgcctatctcttctgacgacgaactagtacctgtggaaggcactagggttaggtgaaaatgggacacttcattctgaagctgttatacaattgcctatgccaattaattatttaaagcttttatcttctgttgcagagcaatttttgccctcagaatatttgtcagtcctcacaaagtgccaagtgatgggtatttagcatgtggcattgccgtcagtgttctgtcattttgtttagacacttctttgcatctcactgaattgcagaattaagaatcgttcacatttatgggcagcacgtttttgcagtatggtcatttatcattggagtttatattttatgcttccttctagactcttagtgtgctttcacgattatccagaggattcctttgcagcagcagtgtatgccactgattggtggtggtagccttgagaaactagggaggcatgttgactttccttaaggttgcttagtattgtagaataaaatcttgaatt

SEQ ID NO: 103572 - DNA, 1045 bp, Homo sapiens
ctacagatgctcttgcatctgcgtataagaatatacattatagcattatttgaagtagcagaaggttgaagaaacaaaaatgctcgttgacaggaaatctgctaaataaaataaggtacattcttgatgagaaaaaaaaaggtacattcatacagtggaatatcatgtagccattaattaggcagctctgtatgaacatagaacactctttaaatatatcaattgtgaaaatcaaagtacagaagagtgtatagtttgctgttatttgtataaagtaaaaaagtatccgtgtgtgcatagactctgccaggaaacacaagactccccagcggttgcctcctcggaggagcattgagagacagaggaataagggtataggtaaagacttaatttttattgtatataaaaaaatcataccaacaaaatttgttaattgtataccttttgttccttttgaattttgtattacatgcatgtattacttgttttaaaaataaaataatgtattaaaattacacagggataggtactgtgtaaacatagggtttatggtccttaaacttgctaattttcatagaaatgagtcaagttgtgtgttggagaaaaagtatgccaattctgcttaccacaaataaaaaatagtacttgtgtggtggcgcatggtcattttgtcattttgattttgtgtatgacattgtttattctatgtaggatattccagtacttatatttacttattatgtatttatattatatatatttatatgtttgtatattagctatgttttcttacattttttatttactgaaagtgctgatatggaggggtagataagagatgattaaaaatggaaagtacattagaaatggtgaatgtgtatacaagatgaatcattcaacaatacaattataaagggtcaagtgcaaatcataaagtggattgagaagaagcaaaatgagtgagaatcactaccataagcctctcccttgttcttaagaaatgtcccctagctagacatgcacccatgggttacttggatttttt

SEQ ID NO: 103573 - DNA, 3919 bp, Homo sapiens
aaagatatattagcccttatacaatctatttttttaaatcttaataatttgtgttgctttttctatagtcaccctccagatttgaagcatggtgactaaaattgctcgtaatactcaacaattacatttatgttattattatttttaagagatattcttagtcactcaggctggagtgcatcactcaggctggagtgcagtggtgggatcatagctcactgcagccttgaactcctcaagcgattctgccacctcagccttccaagcagctgcacccagcttccgtgttatgttttacagtttataaaatgctttcgtgcaggcccttatttattctcttcaacaaccctgaaagataggtgatgattcttcccatgtttcagctgaaaatatacctctctaagcctcatgactaggaagtggcaaagctgatgcttttacccagatcttgtggctctttatccagtgccttttcatggcccttaagactgaaagggtatgactgatgaggaatggagcaaaaggaatttcattggtttggcatgccgtatatttaatattgaaaacattttacctgttacctgacagctgattcatgtagaactgggatgacagttgtggtatgcatgatagtttgtcgttgttttttggctttttttcatctcaaagttattccatctctaatttagatcaacaacagatcaatcagtggattgataatggtgggtagtataaaatcatcagagctgaaggcatctagaaattatctgtaccagccctctgctttagtcatggaaaatagtcagtatactcatttttatagacagtgtatctcaggctcagagagagaatgtgacaacaaacaataaactcagactttgtctttaaggctcagtagaatctttcatttcttagtctttttatttcttggtgtgatttttttctgacagtttcttgtatggagtattttcttcttccttttacattttcttaatgcatatatattcacatggttaatgattcaaaatatgcaaaatgtagaagagtcaaaaatctctccctctcctagctgcctattttatctttttggaagtaactagtattgttagttatctgggtgtccttctagagacagtgcctacgtaatatttcttttaaaaactccattgacagtatgcgtactattctgcactttgctttgcttttctatttggaaattatttcgtatcagtttatatatgtatatatatttttttctatttattagctttctggacttaagattctggtctactgagagaaccatgtccaaatgtcccttgtaaagatgactgattagtacaggacctcaaataatatgattctgtgttttaatggaatcatgaaatcccaggattggagacctaatctacatctcttgttttttcacgtgaataccctgcagatacctgatgttgctaccttttagagatgtctgagtgaaagataggtatcctcgtctctccatgtgccccagtcagctgcccctggtcttttttgcactggtggggcacattgtgggtcagctatcgtatatgtcattgagttagtaattatactcaggatctgccatgagtcattgcacatggaatctaactgcagtgtgagttttattcatgatgacatcttgtataccagatgtttcccagatgcctaggtttatcctgattgagtgtcactgctgtcaggatgctgttcagtgaactaagttttgtgttgaattgtgagaaaggaaggtttagtttctaataggtgttccatctcagcagccataattgccactggctacccttaacccctctgtctgtggaaagccccaggattgagtgaatgctcttcttccctagggtatggcctctccgtaactgagacttgatgggaagtaagtagatttggctcaacaaatagagaatataaacacacgtgtgtgtgtgtgtgtgtgtgtgtgtgtgtgtgtgtgtgtgtgtgtactgaacagtaattggattctgattcagatgtggagttaatgatatcaaacttaggcttgactctagcacagttaatctttatagacttccacatttaaagatatgaaataaaatgtgcctttcggagttggcttttgcaatagccctttttctccgtgagaatattatagaagaggtagtattctagctgtttagagaatgagaatgaggccagtggggttgtgtctcactctctaggtgaatgtcgacctctactcagttctaatctcaccgtgcagtctttgtggtcccaaggctctgcagtaggtgaattaggcccgcgcagtctctgtggcccgagtcacagaggaaggtgttcctttcccaagtagtgaatggaagccggcagggcaccagatgctgtgttgtttcccctgttgctttttccttcacacccggtgtaaagtttccaggcatttgtgcaacctgatagcagaaagcgcctgtcctagcagtcgagagatgggttggcaggggctcaggttactccatgtccctgataagagccatcgatctgggctggtggctgctgataggtgggaactatactgcctgcattctacccagcaggaatgatgtgggtctcagtagtgtttcaggactccgagaaggtacccaggcaatttagaggtctggccagcatctctagggcagcagcacacactaagatgtagattttaccttagaagagatgggttttaggaaatggtggcacacaggagcggaagaagtaccagcataggaaaggtgaagtgccaacccgaggagtggaaatggtattttcttattccacctggtaacctaaaactcagttgcgcagtgacttaaatttgcagaggatatgtacatagataattttaatacactgcttggatggaaatagtcacagaatatatgtgaaagtgtagtggcaggtggctctgtggtaatagatactctgtgaatacctctgtctgagcagttatcacactgtattaaaatatttggttaagagggccctttctgtctgggcacagtggctcatgcctgtaatcccagcactttgggaggccaaggcgggtgggtcacttgagcccaggaatttgagactagcctgggcaacatggtgaaaccccgcctttacaaaaaaacaaaaaacaaaaaaaacgaaacttagatgggcatggtggtgtgtgcctgtagtcccagctactcggtaggctgaggtgggaggacctcttgagcccaggaggcagatgctgcagtgagccatgattgcaccactgtactccaggctgggcaacagagcgaaaccctgtctcaaaaaaaaggaaggccctttctggtaccagaaattctgtctctaatcttacttagctgtgtgtcctttaggcaagttacttagcccctctgtgcttcagttttttatttgtaaaatggagataataaatgaggcttgtactaaatgagtcattacagttttttgtgttatctgttgttatggtggttgttatagcacaaagcacgggcgccagagaccatggcaaacacatgatgactggagggctgcagagttcagtatttattgtgttcactgaaagacttctagtattaactatgctgggtaccatacagaagcaaatgcatgagatattaactgtgtgactgtaaaatatatgacgagagtcagttttttttgaagctgtgtagaaagaatattgatgtgagaagtttcagtatcctatggcagtttcagagaaggaatcttccttctttcctttgggaggcccttcagctttcttggtgttttgaagatagattgtatattttactttaaggtaggacaatacttaactatttcagacaggtatgaatctttcctttttttttct

SEQ ID NO: 103574 - DNA, 1857 bp, Homo sapiens
tagaaatttctgccaaaaattcaaggcacaggacacatgataaataccacttatgaagtagatgacattcttgaattgtcaaatgatggtgatggaataactgcttaaaaacctgttttcccaagggtggaaaacagcctttgaggtttagacttccacatgggtgtgttcagccataagacgtgggttttcttagggacttaggtccccaggtaacaccttggtgtgtgggatttttcccatgtataggctggttccttggtttctccgttgttgaagaagagagattttgcactgggtattggatattttattccaggcatgtggtttttgaggaggcatattgttgatgtattttttttttctggctgcattgatttttgtcagattctaactggaaataccacaagcaaagcatgatttatcatgagggatgggtggtgtggccgtgggactctcctagctctggggattggggtggaggcagaagctatgtgagtaaaactagaggaactacagacagggcctggggagactgggggtgtctgaatgtggcctgcagcagttgcttgagttggaatacttttgggcagaggctcatagaaatttctttcaattgcttttttttttcttttaagaagctttttcccatacaaattggaattgtttgaaggagtgggccttaattgttgccagccagagtgattttcaaagcagatctatatggatttcacttaggggttactttcagggggtatgtggcttgttctgagacaggaggacgttggttccattttcctggaagttgttgggactcctggatggccctgctctatttgtcttgggccattaggcaagtggaaaagcagctacatagttagccctgttgcatggagtttagtttcataattcatcctctcagggatttttatacagtcacacttacagcctaaagtttgttttctccctttttctttcttttccttcttcagttcagtggtccacaaaaattcttgggagggtaagtaataatttcgggtaaaaggcaggaattgtagatctttttttagccccctgccccgattaaatttctccatattcagcttctccttcatctgcaaaagcatctgcaaatgaggtcgctatcccctaatcagactggcttgtcccctaattagtctgaatatgtggctttgacagctttcacctgctgtttcttagtttctaggggataagataggattgtgtgatttcaaagtgaaaactggcaaaattgaaagatgttttgtggtggctcccaacatccacaaagcttaactcattggtttgcttctcatatacaagcttccaggaacatggttactgttagtggctggcacagtgggtttgaagactttgttggaacttcaggaagtttcccctttggcaaagcttacagggagttggtagtacttgtcctgaaagtctgaccctggtcttatgctatgcacaccttgtttaaaagaatgcagagtactgctattcagctattgcttaagcagtccgtttcatatatgtctgcattagttacatacttacataagattttactatgttttgtgttatatttgaactagaagtcatagtttcatacatgactcttattaagctgataataaattggcaaattttgatatcatccaagactttgaggtaatgctggtcatactcaaaaggtctgtatttgggtttagaaactaatttttctgttagctagcgcctctccattcccaggtgctgttcattactcattatagacatcttctgtccctctgctttgttaaaagtctttagctgcttgtcatgatactgaataga

SEQ ID NO: 103575 - DNA, 2226 bp, Homo sapiens
gctatacagcactcactaacttcctgcttactgtttaatctgcatggagtggttaatgtgcttctgattgattaagtgccagagttgggaactactagagatgagcagtgtgttaaaggggaaacctcatttgctcattatccagggtggaggagtggaatgaactgggtcattgtggtctctcttgtcagaggaaggggagacaattctttgctaaggagtgaaaggactgctgcagtatcacagtgtctgcaggggggatgtggatttcttagaacccgtgggatctctgttgggagggtgggtgacagattcactggctgttttagtggtacatggaaggcaggaacagtaaaaatgtcgtgtttcaaattttataagttttgttacgtatgttggttcaaaagtggcactttttgttctcattttgtctatggaaattgagctgggatgcctttgtgttgtctcttgtggtcccttttcagtctcttcaaacccgctctccagactgctaacacagtgatctatctaaaagagccaatctggccaggtgcggtggctcatgcctgtaatcccagcactttgggaggctgaggcgggcagatgacttgaggtcagaagttcgagaccagcctggccaacatgatgaaaccctgtttctactaaaaatacaaaaattagctgggcgtggtggcgcatgcctgtaatcccagctacttgggaggctgaggcaggagaattgtttgaacccaggaggtggaggttgcaatgaggagagatcgagccactgcacttcagcctggatgacagagtgagactctgtctcaaaaataaaacaaaagagtcaatttgttactccacgcttaaaatcttttgagagcttgtgttttttctcaggattgtctgttctcttgtttggcctgacttctgcgtaactttcaagctccgtctctttccacattccacctccaagtccatgtccagtggcttatagttttcttagcatgtggtgccacccagctaatgaatacctctgtgcttttgttcctttcccttctacccaaagttcctgcttcatctcttctacccccacatttgtaaggctcaatctttaataatgagtttggatattgattcctcctggatgccttttgtgactattcccatgtctcccacactcctgctgtcttccaagacatcatgtctatagctctgttaaaggactttttagattaatacttgattgaatgtctgccccaccacgcttacccagactgtgagatccttaggaatctgtaggattaagcaccatgcctgggcccaagtagtcaagaaactgtccatttttgttaaattgaactttgtcttcctgcttctcagttggggcctgcagatggctttaattgtttatccagattttccctggggggtctggcccttggtctgctttctatcccctgtgaagactgcatgttgtgtgatatgtgaatgttaacctgatcttttcattgatatcagggttaaaggtgagagaggggtctctgaaaacagaagctggggtagaatttaactgcagaatgtgttgggtaggcatagcaacctgatatttagtttcctgtgttcagatattaattgagtgcacgtgtgtatatgtaaaaagctcctttgtgatagtgtggttaaggagaaaagaggaaccacacaagtgagagaggcaattagagccaacctgttccagttcgctggagcaggctgttgatttacctttttacagtgctgctgcaggattctggagtgtagcagttcgcatgtattaccaccatttggggtgagaactatttgatcagctagggaccttaacctttctcttctcaaccagtgaatttcatcggatactatagctttattttttattttttattttttttgagaccgagtttttgctcttcttgcccaggctggagtgccatggcatgatctcggctcactgcaacctccgcctcccgggttcaaacaattctcctacctcagcctcccgagtagctgggatttacaggcacccaccaccaagcctagctaatttttgtatttttagtagagacagggtttcaccatgttggccaggctggtctcgaactcctgacatcatgatccacccgcctcggcttgcaaagtgctgggattacaggcatgagccacgtgcccggcactgtaacatgtttttat

SEQ ID NO: 103576 - DNA, 1223 bp, Homo sapiens
ttcctttgtctgtgccctgggggagagagagtcagtggtctcttcctcttcttataagggcactcatttatcatgtagttcccaccctcatgacccaatctgaagctaattctagaggtcctacctccaaataccattacactggggttagggcttcaacatacgaaatttagagggacacagacattaagcctgtaacactaccagagtggtaaatattgtagatggagaaactgaggaacagtcatgtaaaacttgttgcttttttccccatgtcttacaaggaagtctgcagatgtaaaactggaaatgtatttgagaaggagaaagtcagatctgatttcaaagtagaattattcttcagggtgactcaagagattagcttgagttgagtttgtctcccaactccctcccattttctagctactctgtcatttttttttcactatcacgctgacatgtgaacacaacagaagctaactagaaatttaactttcattttgctgtaaagcagactggtgcagacaggcctcaagtttacaggactgctgagaaagaaattgagttatgctactttgtataaacaagaatgttgctagtgaatctctagtttaacatctctcaggccttcagtttgatgtcaggctttaataatttgtagaaaaagacagtcattttagtaagcagatttctttgaatttttgttgatatacatttgtaaagcatagtaaacatctttattctggggcaaatgtgcacttccttcaaaggcaggagggaagaaccacagacatgattggaaggaaatggcagtaattggagcatgagcagacagatggagtgagggatggtgagtacatttggtgttttaggtggcccctaggagtattgagtttcttcttattctcctctacaaccccaatacaagcaggcagcttacatggctaaggtttcattatctaatccatcacagatcagcttgaataaacccattggctgatgctgatctagttaggaaagtagcaaagctgcttgagccaggattgggacaaatcggatcagaactgccatgtgaatcctggacgcatttctgtaatttgggtgggcaaagtagtttgggaagtcatttactcaagagaatgagcagtcagccatgagttttttcaaacattgtcttagggactctgaggggaaagtgtgtggaggatttgagatatttctct

SEQ ID NO: 103577 - DNA, 2146 bp, Homo sapiens
tcctgaggggccaggaggcacgacgagtggataggttttggggggaaatcgaacaaggttgagatggattccattttttcaaatccttccttagtgccttggggtggagtggaagccgggaaatcctggcttctctggactgagtcgaggaaaaggagatctggtgggaaacctcccgagaagagggagtaccttttggcagccctgggcacacgctgggatggggaagagaagtggcatttcaatgagaggagtgaaaagaaaactcctcgagagagccccgaggggatgtggctgagattgtgggttaaatcacacagagtgtgagaagtacaaggagtttggtaatgttatggggacacggtggtgctcagtctcatttactttgtggagcatactaatgagtctgaagggagacactagacatgtccctcctgttctttgccaattgcattctacatcaccaggacacaaaatagctctttaatgtcccgggctataaaaaaaatttttttatagggctattagaagactggattctcaattctggattgaaagataaacgtggttaatttgggtagggaatgggaaaggtattgatgtcagctgacttcatagttttgaagaagaccttgaaacctttggaggttttacgatttggtctttgcccagaaaatactgctatgacatgatgagtctcacctaccaacagttgtgcagacttgtgcctaattctctcggagtcataggatgttagagggatgctaggaggactagacatcatcttttccaggggttcttaacctgggaagacttggaagattcttactcatagtaggtgatgtgcactttttggtggaggagagtcaatagttttcatctttgttttttttggaggagattcaagtcccagcttgttttaaccaccttattttatagatggggaatcagaagtccagagaagatggtgacttgggtaaggccacccagttagctaatagtaaaactagaactagaagcctggtcttctaattcctattcctgtgctgtctccattacaccactcttggaaatctctgcagtgctaaaagacttcctgtgctctgctccctgcttttcaagcctctgcctgacttcctgtgttagggacagagctgtacttaagcctagcatgtttgttgtatgcttcttggtctcctttgcagagtttaccctgttacttctgttgatttaggtaaagtgaccctcttggtgtttatttttgaattcttttgttttgtttgcctgcttttattttccattagaactctgtcaggcagagggattgtgagaagtaaaagctcagggccatggcaaaaaagacaggaatgtgggagacttcaggtgaggtgagctaatattggatgataaggagggaagactggatgtaggtgctggtgagcaggttctacttggtgtgtgtgtgtgtgtgtgtgtgtgtgtgtgtatgtattcatttatcatttctgtcaatcctagttaatagtgagacccccgtccctttccctcatttactcctggggcctattatctgttggttgccttcaaactggctaaagatagtgatatttggaaatggagcagtgtgtagggacttcgcaggggtgtgcagaggaaagagtggttaggtccttgggggtacaaattggcagctgagagttatccctccgagaatccttttttcacttcttgtattttattttctttctatacattctcttttttttttttttgcccaggctggagtgcaatggcacgatctcggctcactgcaacctccacctccacctccacctctgggttcaagggattctcctgcctcagcttcctgagtagatgggattacaggcgtctgccaccatgcccagctaatttttcttatttttagtagagagggggtttcaccaggttggccaggctggtctcgaactcctgacctcaggtgattcacccacctcagcctcccaaaatgttgggattacaggtgtgagccaccacacccggccttctatacattcccattgttgtaggtccattcccctatgtcatacaggtattcaaatcattgatttaggccctgccttcaactagctgaatggttctgcag

SEQ ID NO: 103578 - DNA, 1019 bp, Homo sapiens
tcaagccccgcctgctccaggatacggccccgcccagaaaggagacagaccccgccccccccgcgctgccccgcactccagccgcgctgtgcctccaggacaatcccaggcccgtgccggagattcccgagcttccccgatcgcttcccggcctccctcgggcagccagcgaggagactacggagattgccgagggggcctggccccgccccccccgcgggccgccaccgcccccctcgccgtagcctcccgcgcgggctggagttctacatcccggtccctccctccctccctctttctctctccccgccttcccggtgctgccacagtggcgggtcggaggatcccggccagtcagctcgttcctgcctcgcgcccctcctccccccaaaataaacagccctccccacgcctcgggagcccggaccgcccccttcctccctcggccggcgtgctgtgagggagagtgtgagccagcgcggccggtgggcgagctccgggagtgcgagaggcggggcggcgcggcgggccgggccgggtttcgcgtgtgcgtgcgggggcgcgagcgagtgctcatcacgacccgccagtggccccgcgccgacaacccggcgggcgggcgggcggggagcaagcggtcaggcaaggagcggcggccgcgaggcgcggaggggcgcggagtccgctcgcgcgcacgcacgcacgcacgcgggggcgggggcaggcgcgcgcccgcctgtcgcgacagtcggggccgaggcccagggggaggtggcctgtcgcgggtcgcccggctcccggaggcgaggggggcgcgggcggatggcggagggcgcccagccgcatcagccgcctcagctcgggcccggcgccgccgcccggggcatgaagcgggagtcggagctggagctgccggtgcccggagcgggaggagacggagccgatcccggcctgagcaagcggccgcgcactgaggaggcggcggccgacggtggcggcgggatgcaggtgaccgcgcg

SEQ ID NO: 103579 - DNA, 1067 bp, Homo sapiens
taaaatctctttgcgttctttgagaacatgatcactttcctaattcctgttttttgtttctgtgttcctagcacctagcactgagcttgacataaaacttggctattccaagactcctgaagatattaaaaaacacaactgcagacctaagattttccctagaaaaacagataaagacccggagcagataatcttaaaatactgtcttaaccaggcagtcctctgaataaagacagggtctaagtccttccccaaaattgatcacctctctaatcagagcgaagagaggagatataaatagaagagaccattttctactccaaagctttcttttcaaaaaaaaaaaaaaaaattcagagaatacccttgataattcatgggccagaggaagtggaagcagctcctgccatgtgcctggctgatctgggagaagatacagagtctaatgagaaactgaattcagcaaaaaaggaacgagtgatgtttaagcctcattagggctatagaaccagcgttctgacaaaaaaatactcgctattgactttgacctcacttccctacctccctctgttcgtgggattattgaaccagggtttttcctataggccagaaccttgccagcccttttgcccttcacataatgtgtttgtctggtttctatttctgtagtttgatgaaggatgatagcagggtattgaattgttgtttttcatttagtgcagtcgccgccctcaccctgcccaccaccccccaccctgctctcaagtcattttcattgtctgttttttgccttgaggtttttattgcttcttcagagtggaagaaggctttgttttattttgttttccaggcgctggtatacataacctcatggatccatccttcctgcaaaaattatggtgtttctaaatcggcaacaatttcctttcactggggaaaggcagggaagggtcagatatttgctgagcccataacaactaccaggtgcaaaactaagtggggtttttttggttttgttttttggatttttttttttcgtttaatcctcacaaccgaccagagaagca

SEQ ID NO: 103580 - DNA, 1593 bp, Homo sapiens
gtttccaggacgacacactggcccgaagtcttactcccagtcgccactgcactcctgcctgggcaacaacagtgaaactccatctcaaaaaaaaaaaaaaaaaaaagaatgatacaacggactctgggaactcacggggaaggttggaaaggccaggtatgcgggatggtattggcaaggacacatatagagacacagagaaggagcatcgtagggggtatggggaagctatgcacatttcaaagtattagtagagcacaaggaagaggctgggacagggggaggatgaacttggagaagccatgactggaagcctgtgtcccatggcattgtcatctgtgtgtgtgccccatcttgactttgagctccacacaggacaggactctgactcatctttgttatagatctcagtgagtgcaaggcacgaagaagaaggggtgtcaatgagtgcttcataaatgaatgattggatgaatgaatgaatcatctgtttctccacttccattctgtggtctccggccaacattccctcccatttacctctcattaaactctttttgcagcagcactttctcttagttcttcctgtcatttgctagacttcagctttgtgatctttgggtcagacaccatgatgagagatgcagatcgcaactgagcgtcatttaaatattcagaagagctgaggctccgcaggctgaattctgaatatgcagataattcagaaaacactggagcaatagacttgttgaattcaaactcgaggtggagcagacgagggtacagctcggcttaggtgacccatcgtccccatcagctgctccttcccaaagctacggctccctcggcctttgagctttcaagcctcagcctcgtgtgttgcttcagtggcagctggaacattcctccctgcagcctgctcctcagacgcttatctcaccccatagggccctgctccatctcagtcttggatggggttagcagtgttttctggatcaaagtagcttctttccttgtgctgtatttaaactttgtggcgtaggcatcagtttccctaatgcctctgttatccatcttgcaggtctacagtattgagagacagaaagtcaagaagttctggacctgccaggaattcccactgtggaaacaaatccaccctccttacttcctggagaggggcaattccttcaggaaggtcttccatgagccttacatcagactttgtcctgaactccacccacagctcccctgtctgagcgtgtcccattttctctggacctctttcatctccagtcccagaccagcatcctcctgcatgtgcttctgaaagtacaggccactcctgcatcccttctatacctgggtcgccaggaaactcacggatccacttttgacgcagtctgttctgctctcccttctcaaatctgcccagatctcagctgtcccccatggtccttatcaaactcccatctacagcctctagaaagtgacttctgatcatttcctctatcgtggccctgaatggcagtcacatgtacccttcatctgtttggctcttgccccctgccagacccagcagcaattccatgcccc

SEQ ID NO: 103581 - DNA, 1005 bp, Homo sapiens
acaggtgcctgccaccacacccggctaatttctgtatttttagtagagacagggtttcaccatgttggccaggctggtctcgaactcctgacctcaggtcctcaggtgatcctcccacctcggcctcccaaagagctgggattacaggcgtgagccaccacgcccagctaagttgctatcatttttaaggtcatgctttggcaccgcaatgactccagacaagagtctcctttgtctcttggctgctggagggaaggggatagaggttggcgcatgtcccttggtgcatgttccagagatcctgttgctgtgggtgctcacagcaccctccctaccctccactcctcatttctcctgtttgggatccactgagctagatgcttctccctctccctgggctaaagcttatttgcagcaccctcagtacctactagcagagaggcattcaagctgaaatcctgcatctatatcaattactcgattacctatttcaaatctgaatccaaaaactactctgttaactctgtgtatgagtccagttctcttaaatgttatatgtgcatcaaaatgaaacacacatttgtctagacttcagcaggaaaatatgagcttgattgtgtttgtcatttttatacctacttctgaaccttcctgaagctgacacctgttactcagggcccaatttttccatatgaggaaagacaaaaaggattgtccatgagacactgctagtggccgggctgtgagtggccgggaccagtggctgctccctcagcctcctatggggtccccaggggctgtgggcatgaaacacaattcccttcccctgcactttgcagtcctaggcttgtttgtctccgctagccactgatgccttcagaagcccccattgtcaaatgcccagcttgaagctcgccacctccttccagggtgccttgaaaaagagcagaacagggcgctggggtccctgtcatggtgcacacagacaatgacatcgggcatgac

SEQ ID NO: 103582 - DNA, 2378 bp, Homo sapiens
ggatgagccaccgtgccaggccttcatggggctctttttgtaagcataagtagtcagtattgtatatgaattttctgccatgtggtagaaagagggtgcctgtctttgtactctgtgtgaacaggcacacctgtttacctgtcttggtttcaccggttttataggagttgcaacagaggatggcattttacacttacttttgtgcctttcctgttgtaattggtcctgtttgcctgagctgtttttgtgctactgttgtgtgtgaagatgtccgacacctaaacattttgcgggaagctttgcctgctttcctgagagtggtcctgtctagctcagctgtggctcccaagactccactttgcttctttctggtgggagcagccaggcacctggtttccctctcgaattcactttgagatgtgtgggctgtgctgtggccgcccctggcctggccgggcccgctgaccctctgcttctacctctgcccccaggcgcggggacctgccgtttgtcgtgccccgccgaatggcccggaaaggcgccggggatggctccgacgaagaggtagatggcaaagcggatggggctgaggccaaacctgccgaataagcctcttctcctgcagcctgagatggatggacagacagacaccacagcctccccttcccagaccccgcagcacgcctctccccaccttcttgggactgctgtgaacatgcctcctcctgccctccgccccgtccccccatcccgtttccctccaggtgttgttgagggcatttggcttcctctgctgcatccccttccagctccctcccctgctcagaatctgataccaaagagacagggcccgggcccaggcagagagcgaccagcaggctcctcagccctctcttgccaaaaagcacaagatgttgaggcgagcagggcaggcccccggggaggggccagagttttctatgaatctatttttcttcagactgaggccttttggtagtcggagcccccgcagtcgtcagcctccctgacgtctgccaccagcgcccccactcctcctcctttctttgctgtttgcaatcacacgtggtgacctcacacacctctgccccttgggcctcccactcccatggctctgggcggtccagaaggagcaggccctgggcctccacctctgtgcagggcacagaaggctggggtggggggaggagtggattcctccccaccctgtcccaggcagcgccactgtccgctgtctccctcctgattctaaaatgtctcaagtgcaatgccccctcccctcctttaccgaggacagcctgcctctgccacagcaaggctgtcggggtcaagctggaaaggccagcagccttccagtggcttctcccaacactcttggggaccaaatatatttaatggttaagggacttgtcccaagtctgacagccagagcgttagaggggccagcggccctcccaggcgatcttgtgtctactctaggactgggcccgagggtggtttacctgcaccgttgactcagtatagtttaaaaatctgccacctgcacaggtatttttgaaagcaaaataaggttttcttttttcccctttcttgtaataaatgataaaattccgagtctttctcactgcctttgtttagaagagagtagctcgtcctcactggtctacactggttgccgaatttacttgtattcctaactgttttgtatatgctgcattgagacttacggcaagaaggcattttttttttttaaaggaaacaaactctcaaatcatgaagtgatataaaagctgcatatgcctacaaagctctgaattcaggtcccagttgctgtcacaaaggagtgagtgaaactcccaccctacccccttttttatataataaaagtgccttagcatgtgttgcagctgtcaccactacagtaagctggtttacagatgttttccactgagcatcacaataaagagaaccatgtgctacgagccgtgtctgtagcatttgtctgcggccagggggccctggacaggactaggcctggcttctgcagccaatgccggctctgcatcgtcgggaaccagattggctgaggcgtaggctgagctagctgtgggcggttgtgcagaaaagctaagatggaaaggtgggctaggccagatccaaggaggctaagagcatcttagaaaccttggttcaaggccgagcacggtggctcacgcctgtaatcccagcactttgggaggctgaggcagggggatcacctgaggtcaggagttcaagaccagcctggccaacatctctactaaaaatacaaaaaaaattagccgggcgtggtggtgtgtgcctgtaatcccagctactca

SEQ ID NO: 103583 - DNA, 3628 bp, Homo sapiens
atttcggatttatctgcaaaaggaaaaaaaggctatttgacaaaggtctttagtgttaaaagaagtaacaggagaataacaaaaggaaaggtgtttcctgcctgtggtggggatggaccggcaggctgggcactggttttgagtggcaggtgcgcattaggggtggcaccatgggcactggcttccggcccacaggaggggacagaaagtagaaaatgaagctcagcttgggctcacgtccacggtgacgaacactgtcaaagtgtgcattacggggtgggatacacagatgattgtctttagttgcctttttgccctgtcaccacggttagttggttaaatacagcattgagtggagcaccagccatgagccctgttggcgaggtgacccatgagggttggggtggagggccaaggagctgggtggggtgccaagcctctgtccccaccccaggcccagatgaaggactgcatgcgcgagctggatgacacccgcgcctctcgtgaggagatcctggcccaggccaaagagaacgagaagaagctgaagagcatggaggccgagatgatccagttgcaggaggtgggtggggctgcaatggagagcggcaccgctgccctgcggccagcaggtggcagcgtggggctttcagctgaggacagggctggagtcctactgggctccaggaattggctggggatggctctcaggttacataaggattccctccagggttccgtttcatagcggggctccctcgtatgatcagagtgtgtgtgtgtgtgaaactggcatccctcacatgagatgaggctttgtggccaccaccacctcctgctgtgaatgctgcctggtgagaaggggtctgagcgtcccctcggccgccctgcccgtcgcacctgagcccgtcctgaagtgtttcccaggtctggagggtgccctgcagcgtgatgtgccggctgcgagtgcgtccagggtgtagccatctgcctgtggcctccagagctgactccaagctctggcttacccagaacagggaggggccgccctgagtgactctgtccacgtggtctccctggttaggccaggacacttcttacttatcgccataccctggcacctggcttgattcctagcacttaaatgtaagagttttataaacatatggtgtttaagctatatcttcaggggggcaccagccctgtgagctagagggtttctggaggaagggcttcgtggggaggtgggcctggggaagggcttgaggggagggtgcctggggctgggaaggatggtcttgtggggctgtggctgcctttaggtcacactctgggtctttgtggcaggaactggcagccgcggagcgtgccaagcgccaggcccagcaggagcgggatgagctggctgacgagatcgccaacagcagcggcaaagggtgagctgagtgagggggcagagttgggggggaccaggtgtgtccccagggtaggcccctcacttctcccgcccaccccgcagagccctggcgttagaggagaagcggcgtctggaggcccgcatcgcccagctggaggaggagctggaggaggagcagggcaacacggagctgatcaacgaccggctgaagaaggccaacctgcaggtgggtgccaggacttctcccactctgggctctggctggagccaccacggcagagctggccttggacccagccggcagaagcacaggccaagtgccagctgctccccaggcgcttaggggaaaatgtccaggcacctggacctgaaaggtccccctctggcttctgtgttgggtgttcagaagtttctaatcttcccttttctgggagacccaagactctggaccccaagggtttggtgggatcctgctgccaccttcctctggccctgctcatgccctccagccagggccccagccctccccaaggtcactggcccttcttctgcagatcgaccagatcaacaccgacctgaacctggagcgcagccacgcccagaagaacgagaatgctcggcagcagctggaacgccagaacaaggagcttaaggtcaagctgcaggagatggagggcactgtcaagtccaagtacaaggcctccatcaccgccctcgaggccaagattgcacagctggaggagcagctggacaacgagaccaagtacgtgcccctggccccgcccaaccccagctgtcctggaaaaaactctggcccccctgcagtcctgcccaaatctgggccacaaccagctctctgtctcctgagcctggggctgtttccctccctcctgatggggccctcatcccttccacaggttgggtggttgggggagcttgtggggtttgaacaggattctctgttccacctctaaagccaggagttttggtggctgtgtctgagagtgaatcagagcaggaggtacaggggggtcctgcccactaggacagttgtcctatgggctcagcaggactgagacttccttggagggaatggggtttacagtaggcccccagacctcttttccagttacatagatgctctttgaggtgtgtcgcttcccttacctgagcccatttcctcatctgtaaatggggctatttgcagtgcccgtcgtaagaagccgggtacacataggtgtctagcaaaggcctccctacgtgatccctagatgccagtgagccccggggaatgggtggtcctggttagggcttgttggccggaccctctgaaggagggtgttccctctgagccaccttgtctgtcatgcagggagcgccaggcagcctgcaaacaggtgcgtcggaccgagaagaagctgaaggatgtgctgctgcaggtggatgacgagcggaggaacgccgagcagtacaaggaccaggtgtgggcgctggtggggcagtgagaagggcagcggggctgggcagcagatggggtgacaggcagggcagtggggctgactggctgcacgcccagagcccctaaccggggccacgggccacacgtccatctccgcaggccgacaaggcatctacccgcctgaagcagctcaagcggcagctggaggaggccgaagaggaggcccagcgggccaacgcctcccgccggaaactgcagcgcgagctggaggacgccactgagacggccgatgccatgaaccgcgaagtcagctccctaaagaacaagctcaggtgagccgccctgcccacccgcccctttgcctcggcacttctctcaaaaggtagcttgttcctcaaccagagcccacaagcaaggcacgaatgtcaccaagaaaggactgcacaaagcaatccctgccccttctggctccttgcctttgaggctttagcttagtgttttgaacacacagtaaactctaggtagtttattcccagctgtcctaaaagtctattgtcttttgaattggaagttgcttgaggccacctggcccagtcctggcacatgttaggtgcctcagttaaatatctgcaaaacgaatgtgagcctcatgagcaatgcctacagaggttaaaaacgctcctttgcgtttctcagggagtgttaacactcaagaagtagtgaatgtttgaagcagaggatcttattctctg

SEQ ID NO: 103584 - DNA, 1022 bp, Homo sapiens
gctgccctgccctgctgggggccgtagctctgagcctcatggtgcccacctctttcccagctcctggcggaggagaagaccatctctgccaagtatgcagaggagcgcgaccgggctgaggcggaggcccgagagaaggagaccaaggctctgtcgctggcccgggccctggaggaagccatggagcagaaggcggagctggagcggctcaacaagcagttccgcacggagatggaggaccttatgagctccaaggatgatgtgggcaagagtgtgagtcctgggcctggcagccaggtcttgggaagggcccgagtggggtcatcacagagggtcggtgtgtgcacagactccgggtcgcgcagacccaggtacctgccagtccctttgctcctgacttgggctctctggggctcaggtccacgagctggagaagtccaagcgggccctagagcagcaggtggaggagatgaagacgcagctggaagagctggaggacgagctgcaggccaccgaagatgccaagctgcggttggaggtcaacctgcaggccatgaaggcccagttcgagcgggacctgcagggccgggacgagcagagcgaggagaagaagaagcagctggtcagacaggtgtgcatggcctcctgctaccccatgggtgcccaaggctgccttggcttcacgcaggcttctgttctctccttccacctggattgtgttagggccccttgaccacgcctcccctcccatattccttctttctagcctcctgtctcggggttcagtgactcactttcttagagttcttatggtcagtaatccccactggtttcccgaggccccatggatcctgcagaactggcctgaggctcctgagttcagagctagggcagggtctcccagtgggtccagcttcccaagttgttgatgttccttcccccaggtgcgggagatggaggcagagctggaggacgagaggaagcagcgctcgatggcagtggccgcccggaagaagctggag

SEQ ID NO: 103585 - DNA, 1195 bp, Homo sapiens
tagatcctatcttgggcctccatgtgccaggccagaaggcctgaaccacctcgggatgggctgggagtccattccacagtcagggtaggagtagcccgcgagcgtgcctgattgtgggtttatctccaagtgcaaggatggggctgggtgatggggaccccgtggacaccctacagggcactggccctgctctctgggagcagtctccgtagagcaagaggcttggtgtggatgtgggctgggagcccccacagcgggcctgggggtcagcctcccccgggcttcacacagtagacagatgcccctttgcagaagctccatttgtctcgcccctgtggagagggaagtgactgggggaggcggtttcataactgggcagatccctggtgccccttccacggtgtggcaggcaggctcccagctgccccagggacgggtgtgccacctgagcaggtgccatctcgggcatctgcttactccttgctcctgcccaggtggccgacatgaaaaagaagatggaggacagtgtggggtgcctggaaactgctgaggaggtgaagaggaagctccagaaggacctggagggcctgagccagcggcacgaggagaaggtggccgcctacgacaagctggagaagaccaagacgcggctgcagcaggagctggacgacctgctggtggacctggaccaccagcgccagagcgcgtgcaacctggagaagaagcagaagaagtttgaccaggtgtgtggccgttggccccatcctttgcatttcctctccttcaagcactgagtccaaagcaaagggcccatcagagaaagcctgggctccctcagggtctcgccggggaggggccgtgcggggccagtgcttagaggaccctcaggctctggcttgttgagggtcccagggagaaggccagcggaagagggcgtcttcatgcgatgggttgaggagtgacttttcctttctgattttttacatttttcagattttctctaatgaactggtttgactgtctttttttttttttttttttttttaatttttttattgatcattcttgggtgtttctcgcagagggggatttggcagggtcataggacaatagtggagggaaggtcagcagataaacaagtgaacaaaggtctccggttttcctaggcagaggaccctttggccttccgcagtgt

SEQ ID NO: 103586 - DNA, 1050 bp, Homo sapiens
agatgaggtggggcaggagcagtgggggtgggtccatggtcctttgtgtctccccgcccggtgcaggtggagctggacaacgtgaccgggcttctcagccagtccgacagcaagtccagcaagctcaccaaggacttctccgcgctggagtcccagctgcaggacactcaggtaggggtggcgccaggttcccagaaggtggacccctccagaaaggcctctgtgtccacgcaacattagcttcagagcccatcggattgcccatcctctccttcatctgcttcatcctgtgggtgggtctctgcgtcctcccagctccctccaggtctttacgtggccatcccctaaatcagcaggaccagctcctccctctcctcaagggtgtggggttcctgggttttggacaccaccctcctaagcacccgcacccctctcaacccgcgagtaggagctgctgcaggaggagaaccggcagaagctgagcctgagcaccaagctcaagcaggtggaggacgagaagaattccttccgggagcagctggaggaggaggaggaggccaagcacaacctggagaagcagatcgccaccctccatgcccaggtttggaggcctgggggaccggccggactctgcaggctggggagctgctggccgggcactggcctgggcactgcaggacagccctgcccgctgggccggcccattgctgctctccccctgggaagccaaccgtgctctcccacatcagtgctctcaaggaaaggaatccagggatctgtggacttagatgggggacaccactattttcactattttacacctttattttcaccagtctttagctgaaattcagcattgcttccattatggatgtaggcagcaagccatggtggtggcagtccctgtgccgtcatcatctgtagaaatggccagttaccctgtcagggttgtggccgagctccttggcctcatgggtcccaggcctgcgctgtttgttatctgatgtgctatctagcagcacgtggcttcctgagccatggttttttaga

SEQ ID NO: 103587 - DNA, 1644 bp, Homo sapiens
gaacctacgttgacctgtcataaccatctaaagtccgtagcacattcgtatttttactgagttgcagttgtcctgtggtgtagcgttttatttccttttcttcccatttaacacatcatttgacttttaaaaatatttgaagcagtgaatcttactttggaaattgaaacgattcctctatgaggttttctgcttctcagaggggtgttgcccttcaatctggttgtctcagatgttgtttctgctgagagccatcctaagtgccatgattgtgaccacaggaggcagctttggctgctgcagctctctcaggcctgtcctgcaaactctgctccttggaggtgaaactctccttatactgatgttgctggtcgctttggcagagtggaagaggaagctgcccagaagaacatggccctcaagaagatccgggagctggaatctcagatctctgaactccaggaagacctggagtctgagcgtgcttccaggaataaagctgagaagcagaaacgggaccttggggaagagctagaggctctgaaaacagagttggaggacacgctggattccacagctgcccagcaggagctcaggtgtgccctgggaccaagtccctcgggatggggagggcagccaggggggccttggcttggagacatggaccccgggcctctgcacacacacacacacacacaccgtggccctcttaggcaccagcaggcatggaagctgctggttcctcagcggtttctctctacagagtagaaagtctgttgaaggacctggctcaaagttgggggtgaggcaaggctgggctttaaagctgaaaggctacagaagctctcacagggcgtatttgagcctgggctatgggatagatggctaggaggggccggtgggtagaaaagctgcctggagtgcctgtgccctggccaggcctctctttggtcagggaagagccccagggacagcctcgctccagcatccccggcctccactctgaggggatttctctgtccaggtcaaaacgtgagcaggaggtgaacatcctgaagaagaccctggaggaggaggccaagacccacgaggcccagatccaggagatgaggcagaagcactcacaggccgtggaggagctggcggagcagctggagcagacgaagcgggtgcggagcctccctgagaccgcagggggagggcagggttccccgtgctgggcccacagaatccaaaccagtcctgcagagcagttgcagggttctacccaactgcctggttctgaggccaggctccccttctaaggggctttgtgactcgtgcctcagtttccctgttcataagggaggattatggtatgtctgtctcgtgattatttgagggtgaaaacattacatcgttactttgaacatcagacttcagacaggctttattggaagtctaactgcaaacaattatagttccccttattgcgttacaaatattgctaacatctgcaacaccaatgccatgccctagaacctggcctctacccagggcagaaggctgggcaggtattattttagagatggggaagctgtgagatgtcctaagcagtgaagacaggaaccaagtgtcacccaccagctaagagagaagaggaca

SEQ ID NO: 103588 - DNA, 1025 bp, Homo sapiens
tggcgcctcacagcatcctaatgaagtaggctgtctccttttgcttattattcagatgaggtatagaaagtagctttcccaagtgacatcacagagttataaagctagacatagagccctgaccgtgcgattccaactgtggaattcacacaaggcagttccattatataagttcagattcacacacaattgaacatgttttttagagatacagacatggtacagccttcaagggaaccaagggaattacaaacaccagctttaggagagtacttaattcctggcagggaaggacaaggggtgagttggagagagacatgccaggggctagcagtttgcagtgatgtcctcttcctgcatccaggagttgggtgcgagtgtctgtgtgtttgtgatgctttaagcctgacacacgtttcataacgagtgctcagtattttgtataagtaattgacacggagacagaacccatggcactgagggctatgtgggctccccctgcattgcagagcgcctccgcagggaggagaagcagcgacaggagctggagaagacccgccggaagctggagggagactccacagacctcagcgaccagatcgccgagctccaggcccagatcgcggagctcaagatgcagctggccaagaaagaggaggagctccaggccgccctggccaggtgaggaccccgcctgcccgcctgaggccaggtggcctgggccagcccttcctgcttgctgctggccctagttctcggcactagtgagctgtgagcattctttccactgttgtcttaaaagagccatttatttcatagcaaaacagttcttgtgcactcagggcatggtgaggggcctcatttgtcttttgtttgtttataatttgaaaaaaagtcatccacagctctatcacccacctacaatagtcctttcctaatttcttgctataggcacacttaaaaaaaaaaaaaaaaaaaaaaaagacttgaccaggcacgttggctcacgtctgtgatcccagcac

SEQ ID NO: 103589 - DNA, 1039 bp, Homo sapiens
tgcttgtgccgagctgtggccgctgggcaggggtgttgcaggggccacacagaacagaaagcaaggagagcagcccggggcaccgcggggctgaagagggggaggggccgtggcccacctggcaggtgagagaggggcacggagaaggtggcctggtggcgcaggtgagcgccgtgtggcagcctcttgaaggagtggagccatctgtccctgctgacactagctgtcacctggaatcctttctcacccaagcccacaggggaaggggaagggcttgggcacccacattttttggttctaaggaagcgtacctcgctgtttcaggggagctcgtgacctttcaaaattatcctttgatctaggaaaatcctaatgaacttgatcaagcgtctaaagccctctccattcagccccagatttccgggcgagtcatgctttgaggctagcaagtgttctgtgctcaaccaacactaaatgccagcctactcccctctccccaggaaaagaaactgctggaagacagaatagctgagttcaccaccaacctcacagaagaggaggagaaatctaagagcctcgccaagctcaagaacaagcatgaggcaatgatcactgacttggaaggtgagggggtgacgagcaggaggtgatgggcaggggctggcgggcaagggctggcggtcaggggccggcctgtctgaccggaacaccgaggccttctcagctcacgggtgagcctgggtcacactacagcactggctgctgccctttagacctgaggtcaccaggtcgaggggagccgtgtctggtgcctgcgggaacctgagcctccaggcccctgttgctctgtggctagatgcccccactgcatgaagcgtgtttagagagctttggcattgctctgttgtgtgccgtgggttttggaagcttctgagacttcctaggaggctccgggtttgacccacaggactcactagctctgtcactgactagctggctcatcttgcagctatgacttaagctccatgagctttagttt

SEQ ID NO: 103590 - DNA, 3470 bp, Homo sapiens
tctgacgttctcccaccaaacaaaagctcagatagggaacagcacgaagggtgggaagctgaagtccagagtcacccagggccagtcagcttaatcaccaagggtcacgctcagtccccacactgagtaggatctgtggttacttcacacgtgccttcacccccatgggcacctcagtggaggggtagtctggtgacctaggtccttcaccgactgtaagattagtgcctcatggagtcacacagcctgtaagtgggagaaacttatctcaaccccaaggccagaccccttccctgaatttctttcttgaggtgccccaggcaagggtagacccccagaaaagcttgaggacaagaccaggactgttaggtcgggtctgctgtccactgctccgcgctgaccatgttcctcaccacacagagcatttgccaagcggcagcagcagcttaccgccatgaaggtcctccagcggaactgcgctgcctacctgaagctgcggaactggcagtggtggcggctcttcaccaaggtgcgtgctagaagggcctcctgagtagctgggactacgggtgcacaccaccatacatacctggctaattgtttgtattttttgtagaggtgtggtctcaccatgtcgcccaggttggtcacaaactcttgggctccagcaatcctcctacctcagcctcccaaagtgctggaattacaggcatgagccactgtgcccggccctttttgatttttagtagagacaaggtctcactatcttgcccaggctgaccttcctggcctttaaaaaaaaaatctctttatttttaaacttgtccgggctgcttttgtgtataatacataatttatggtaatggcgaaaaaccaactcacaaaaagcctaaagaattaaataaaaattcacacataaacccttagcctaaaccaacagcagcagctattttagtgtttaatttctcgctctttttctcactgcctataaaacctcagctatgtaaacagtatacattcttccatagctgagtttgactcatataaacagttgtagttcgtacgttccatttatgattccttcataagcatcgtttttttagaggtagtgtgctgttccctagggaacacatcattatctgggtactttttcagagatgggtccttcctcattttcttgctgtgataaacaatgccgaggtgaacatcttcacgcacacgcagggatagtttccctggaatgtagttagcgggtcagaagcccgtggtacagagcgccaggaaggatgtgcctgcttgcagcccccaccacagcgtgtcttcttgcccctcactttcatgtttccagaggtgagggagaggcctcacacctgttggcagaggcgggcatcttccagccgagcatgtctctacctctatctcctctcccaggtcaagccgctgctgcaggtgagccggcaggaggaggagatgatggccaaggaggaggagctggtgaaggtcagagagaagcagctggctgcggagaacaggctcacggagatggagacgctgcagtctcaggtgggtgtcagtgcaggctcagtccaggtcgcacgacctgcctggtgctgccacctgctggccatcggtaggcacggcatgctggaagtttctattactataggagttttctacaactgagtttcctattactgtaaacagtgaccagtctctctgcagaccccattgggtgttaagtgatgtagggaggccacttaatagagtggaacgttcacaagtgttgggttcaaacctcagctctaccacatgacttgagcccatttcctgggaccttgctctggagctcatggggtagtgaaaaatcaaggacacgatgtctggaaggtacctggaagcttcagagctctccagatgaaagctacttttgtctgcatgttcctttccctctgggatcccgagccatggcgtccgtccttgaggatggagtggcttgagggtgttgcgaggagcttgtgttttccacttgttgtttgcagctcatggcagagaaattgcagctgcaggagcagctccaggcagaaaccgagctgtgtgccgaggctgaggagctccgggcccgcctgaccgccaagaagcaggaattagaagagatctgccatgacctagaggccagggtggaggaggaggaggagcgctgccagcacctgcaggcggagaagaagaagatgcagcagaacatccaggttcctgcccgctgcacccggggaggggtggcgccggaggggcagggcggggcggaggagcaggaaccaggagctgggagaacatggaattagggtccaaggaggctgctcctcacgcaatctgcttggggctctcagtgagaggtgttccctttgggctggtagtttgtgacatgtgcatctgagatctccatgagcactgcctgggccagcatcaaggccaatttgatttccctgccattagccctggccctggctagccgaaggggcacagggccagcacctctgcgtcctgcctgtttcatgggtgggagcttgctgcaggaaacccttcagaacattgcaccgatgttctggccctgtgtcccagtttgaaatctggaatcctacaaatggggcttgggccctgcctcggctgtggccctgggctggcggaccttgccgtccccacctcagccatggccctgggctcacagaccttgctattttctccttggcgtttggatctggccttcggaccttgctgccttcaccttggccatgcctctgggcctgctgtccttaccgtgtctctggcccccggcaggagcttgaggagcagctggaggaggaggagagcgcccggcagaagctgcagctggagaaggtgaccaccgaggcgaagctgaaaaagctggaggaggagcagatcatcctggaggaccagaactgcaagctggccaaggtgaggcccgtggctgtcgcctgccgctgctccaggggcgccgtggatgggagagtgtggtcacccttgcagggcctggctccccgctgctgctgcttcctgtctcttctgcctgcagcatgagggcttctgcttaactgcaagtgctccctggaggtcccatgggccttagttgagggatttcctcataagcaaaggggccctggggaagggtttgtcctttcccctctggaaagctcttctttgccagccgtgagacccgagcctgtgtaaaggtggccatctgtgcagcattgcaagtgttggtcactgtggggttggggacaccttggtggctctgtgttgagatacggggtactcttcctccactgtccctgggcggcagctattcctcttgagaatgagttgggtccctgtcggtgtctgcccagggagcagatagcagccggggaaccagttagaggagaaggcaggagaaggcagcctccccacctttcggg

SEQ ID NO: 103591 - DNA, 3218 bp, Homo sapiens
atttacaccattaaccaaggaatgtttcccgagcctcctttctccactctcacctttgggaaacgcacacgctcatcagtgcagaagcttccaggaaggcttttgctgtgggattatttgtaatgctgaataattaggaataccctaaagcccaccaaggggcctgcacgatggcatcaactgtggtgcgtctttccgtgggctgtgctgtggccgctaaaaggacaaggatgttggcctgggtgggagggtctgagcctggggaaaggaaactggcatcacctacctcatgataaacagcaacatgcattcgcctgcatgctgaggggagcacccctgggatgcagcagcgtgcattcgcttgcatactgaggggagcacctctgggctgcagtttgtgttgggaagagggaggcctaggtccctgatgctctctgggtattgttctgggaccttttgcaatgaagatgtcatgctgtattacttgttctgttaagtatatattttagcagagcacaggggctcatgcctgtaatcccaacacttggggaggccaaggcaagaagacagtttgagcccagacgtttgagaccagcttgggcaacatagtgagaccctatctctatcttttttttttttttttgagacggagtcttgttctgttgcccaggctagagtacagtggcacgatctcggctcactgcaacctccgtctcccaggttcaagcgatcctcctgcctcagcccccctaggggctgagattacagccctgtagctgggattacaggcacgtgccaccacgcccggctaatttttgtatttttaatagagatggggttttgccatgttggccaggctggtctcgaactcctgacctcaggtgatccacccgccttggcctcccaaagtgctgggattacaggcatgagccaccgcacccagcccctatctctatttaaaatgagaaaaaaggaatctatttctgggagtctctctgaaccctctagtttaggaggctgcccaattaaaaaaatatatttaaaaacagaatatatttccaaaaagatgaaactgacacatactcagagaaaatgtgaacattctaaaaagacaaagaaaaaacaaaaattacttgtcttatgactaaaaagaaatagtaacattttgttgtccttccaggattgtttttctttgttcatattacctaaaaattttaaaaaagctgaaacccagcacggtactgtgtggccaccatgccatgtctagagccaggctcccgttgttggccatgccttgctttgaggctttggctctgcacgagacgccgcagagaacgtcttgatgcctcgctccccttatcctcaccacttccttcttaggggtggaaatgctggatcaaagggtcttcacgttttctgacttttccatgcatggggttagcctgtgctccggagaccctgtgagcacacatgtccccagcgcagcttgtgactcctgcctctctgaccccgccaggtggattacaaagctgacgagtggctgatgaagaacatggatcccctgaatgacaacatcgccacactgctccaccagtcctctgacaagtttgtctcggagctgtggaaggatggtacgccctttgcccttcgccccctgcctcctcttggctgcggctggtcatcttcccacctccacagtgggccgagctgccaaacaaggggtacacatgtgccccctgacataggccaggtggtctctgccctctgtagctcccatgagagagggctcctcggaccgaaacaggaggccactgccttgcgcacacaccgtggccgggtcctcctgggcggagcgctttccgtgtgtgggaaagtcaagggcagccccgagcctcgaagcccagggtcccagccccgcgccatgttgcattcccgcctctactccttggtaggctggttgctttgagtggttctttttaattctttctgttggtttctccttttcctttgcctgggttttgctttaacctctctgttgcagagatgcagagcactcagagagcctatttctatcatcgctttcctattctccacctagaaccaggtgactggccgcccgagtggtgtctcttgtgtgtgtggtgcgtccaaagctgtgcaagaaatgcttctgcctaggttttctcgcgcccccccttgccttggcttttcctgcctgcttacacccccgttccctgatctgcccctgggcttctgggcaggttccccgcactgtgcctatcgccggcctgtagtagcaaactgggcaaatgaggggctgtgtctggaatttggagacgtcacattcaaatcttaaaacactgtaatcccagcaatctgggaggctgaggcgggaggattgcttgaggccaggagtttgagaccattctgggcaacatagggagaccctcatctctacaaaaaaattaaaaaaaaaaaaatcagctgggtgtgatggtgcatgcctgtagtcccagctgctcaggaggctgaggcgggaggatcacttgagcacaggtcaaggctgcagtgagctgtgattgcaccactgtactccagcctgggtgacagggtgagaccctgcctcaaaaaaaaaaaaaaatcttaaaacagcaaaaattgtttaaaaatttgtatcctccttagagcttcatgcctaaagacagcgtcttaaactgcttgaatggctgcgagtgtcttagcatgaggttcaggtatgcacactgctgtgtctgtgcacctgaaagctgaagtggcatctgtgtgttcattcaacagttgctcggcaaggtctgctccatgggggtggggccaggacacactcagctaaaagggccagttatgatgaggccacattaacctttctctggacaacctgagtggcttttgcaagttaccacgcccaggaaacctgtggtagccaggaatattgaccctgtggtgggtacataaggtcaaagatgactccctttttttttttttttgagacagagttttgttcttgtcacccaggctggagtgccatggtgcaatctcggctcactgcaacctccgcctcctgggttcaagtgattctcctgcctcagcctcccaagtagctaggattacaggcacccgccaccacgcccagctaacttttgtatttttagtagagatggggtttcaccatgttagcctgg

SEQ ID NO: 103592 - DNA, 1056 bp, Homo sapiens
ggtaatgattgctcattcaccccgtggctttcttcctctctgctcccaagtcaagcagagggacttattctcttgggtctaattagaactttctctcttgggtctaattaggactttttgtccctctcttattctctgaaaaatcttagctgcccaaaaggtgtcccatctcttgggtatcaatgtgaccgatttcaccagaggaatcctcaccccgcgcatcaaggtgggacgggattacgtccagaaggcgcagactaaagagcaggtatgtcctctggggccagggcagctggctgcctcctgggtgaatgtccctgcagcagcacagttgaggctgttgtgggccatcctggggtgtccgtgtcaggcactttcacatgattccatgatgcagtcctcacagcaacccggagagaggtggcataacgccatctagagcactggagaagcttcatggcacactcaaggcttcacgcccaggaagtgccatcctgagactgcattgtgcctctttacattgagatggtattttggctgattggtcatcaaggatataggcatgtcctgtctggtataaaagcaggaacttgatgccactgtagctgaactccttctggtgccagggtggcggctcccgccatcctcgagcctgtgccaagcggctgtttctctaccacctgctgccttgggcttgccacgtgtgctgagagacgagcagcagcgcttgctccttcctgccagactgatgtgcctgcctgcccctggagtggaggtcccgcccagtgcggaccgctttctgcctctctccggggtttctagtttcttttatggtgctggccatgggggtttttagggtgccaaacccatctctcaaaaatacttggaagctcattttgttagtctttctcccattcactgtacactgacagctcacggctgtttctgtgcagaagcattgcatgaaagacaagactgttgttttcaaaagacatcgcgtattattcctgccacctgttcgtttccctgaccattaaggagaaacctccattttct

SEQ ID NO: 103593 - DNA, 1068 bp, Homo sapiens
ttgccagaattggaccgtagacatcatttgggaaatgaaaacttttggccttgggtttaacggggagaagtgagagtgactcctgttctctgcgccatcctaaggacttggtcttctgtttctgaccatgccagagaaaagctagggtgggttgcacatgtagctgcaaatcacaggacctggcgctctcctgggccaggagacgggagtgtcagagtctcagacactgaggaaagctgaacgtcactggctactctgcggtttccagggtgcgtcagggctcagggtctgtcccagtctctccaacctttgaggtcacagcgctgatggagcctccactttcagcacctcgctgaggcgcccttgccctccaccccttacagccgatctcctgttggagccgtacaacaaataccgcttcctgtccaatggacacgtcaccatccccgggcagcaggacaaggacatgttccaggagaccatggaggccatgaggattatgggcatcccagaagaggagcaaatgggtacagggctggccctcctatggtcgagtgtggggcagaggaaggctggtacccacggcctcggggcatcagggtagccgatgggcctggggagcctgctagaggccaggggaaggggaaggccttcagtgtatgggaaaatgattcctcagatttgaggttcaaggttatttgttcctggtggtaccacaggcattcagaaagggtgcaaaggacatgttcttaactgcccaggactcgggtccactgcacagcccttgccatttgctgaaagtagaatattcacgtcctgtctcggggagtgtggaagaagctggggatagatgggtgctttgtgctggtgaagcccagcatgaatggcagtgcggacaggccatgtcggccaggagggggtgagccctctagggtggctgggcccaccgcacaccgttagacgcagacctggcgcccctgtggccccagggagttggggggtgtccctgcttggcttgtctggcttgaggatccctagatgagtggcccccacccccgggaatcacca

SEQ ID NO: 103594 - DNA, 1052 bp, Homo sapiens
ggcacctctgatctcttgctatcctttcttacttagggcaaattcattcgcatcaactttgatgtcaatggctacattgttggagccaacattgagacttgtatccttgtggttcgttgggataagagtcctggatccggaggggaggcatgacctctgtagagaagaagctgcctcctgattccagcactttcccctttatgggcccatcctgacaccttctctgtggagctaggggactgtcaggatcggctagtgcaaacccaacacagagcttagggctttccttatttacaggcaggataacctgtgctttgaatggcatggagctgttgaaagccgtctagtgtggctcccagaggtaggcgtttgggggatgccactctcctgcgtgccaccgtttagcctttgcttgtgggaatgttcttgttcccattacctgtaagaatgagacaaggctctcgaaggtgtgagctcctcttggacatgccatgccccttgaaggtgagaacccaggtagtttgcttttgctgtgttttgccattttgtgccattcttccttcctggtgaagttcagttcctttggacgagaataagaggacaatggaaggctggccaggcacagtggctcacgcctgtaatcccaacactttgggaagctaaggtgggtggatcacctgaggtcaggagttcaagaccagcctggccaacatggcaaaactctgtctctactaaaaattagctgggtgtggtggtgggcgcctgtaatcccagctacttgggaggctgaggcaggagaatcgcttgaatccaggaggtggaggctgcagtgagccgagatcatgccactgcactccaacctgggtgacagagcgagactctgtctccaaaaaaaaaaaaatgaggaaagtggagggcttgccttctccccagcttgtgttgctccttaatatttgcaaagatcttttggagaaatctcgtgctatccgccaagccaaggaagaacggaccttccacatcttctattatctcctgtctggggctggagagca

SEQ ID NO: 103595 - DNA, 1032 bp, Homo sapiens
ttcttttcttctgtctccctctctgtctctctctctctccatccctctctccctccctacccccgattttccattctttttaggaggcctattttaaaaacagagctgtgaggttaggagttctctagctgtgcttttccatctctgaatttgcagtaaaatccatttcccaagtatttattgactgcctagtatgtgactggttcttgggagggtgacattggagttcctgtcctgaaagacaggagacaggacacggagagcagtgaaatagatcatatgccttacatctggggttcctgttgtagaggggaaggcagcactcagcaaagacagcatgctggggttgggggtgacagtgggagccacgttgtcaaaacgcagactttggtaggcaccccgtccctgccctgagcccactagagtgagggagtaggttgccccaggcttccagtcatagctcaggctgtcagcgtgaaagaccattggccggtttggttgatttccttgcctgaagctgtgctgtgattttccacaggctgccggagcacagaacacccttgaattggtttgggagccagcgctctctcacttgcagtgaccgagttgaccctcccaacaccagcagaggggttgttccagacctcaccttgctgcggggaggccaggtttggcctgggccgcaggttggcaaagcagagcttggtccaaggggctttccaggcagatgcccggatcctgaacggtgacctttgactctccctgctctgttatttgtgtacgagctggggcccactggcagaaacaccacccagtgaagcccttcagaaaccgatgggtaaccccaaacctcatacagtaccgcatcatttcatgttacgcagatttcattgaaaaattaaaatctcttctgtgcccaattagatgtcagtagagaaaaagccataggttagtcatcactgttgtcagcagggaacacagctctggaatctgaagtggctgctcccgacttggccccgcggccccactttc

SEQ ID NO: 103596 - DNA, 2473 bp, Homo sapiens
tgggggctgaacagcgtgggtggacaatctgagctcctgggcggcaggagcagctgcccaatggcactctcccccgaagatgctcctcctagccaggtgtgagggtagactgcgagatccccacaaagacagcatctgtgacactgtgctccctgtctgggaaacgggcagctctttgggagcaaggtggggaggcttttgcatctggcgggagttaatctgatgtcttctttgtttcagaccgagaagatcaatccatcttgtgcacgtaagtatttctccgtctgggtagtggttcgtttcaccccagtctgttctcattcttgaggtctcctactgaaaccacaactggggcttgcagagtcccccattcccaattcaaggcccctcctccacttctccaagggataggacttcagtttgtgtgtttgctactcagtggtcccactgcatggatgagctcaatttcaatcatccttcctcaaggagccagtgggaaggagggtggagcttatggcagaaaggaaaagcaagatctctccacaatccagctgggaaccagctcctccgtaacttctgggtggaaggcattccttcttgctctggatggtggcttttctttacctgaattgaagtagacactggggcctctcagcctctgaacttaacaaggagatccataaaccccattgccaagagagttaatggcacagaacattcctttaagtgacgtttcaaaggaacatgtacaagtgcctttgacccctaagtccacagctgcctaaaactgatttttaaaacacttggatgtgaagtcacttgccctgacaagtgaccaggacaggcagtggatttcagtttacttctgtctggcccctggagagccatgggaagtgaactgcctgaggattccagagcgtttatgtggcagtcccgttttctgccacacgttgggtccttcacgggcacccaacagaatgcgaggcagtggagcgtgcagtgggaagggacagaggtcaaggacttggccatgcctaagcccgggacttccttgcctctcttggtagtggtgaatctggagctggcaagacggagaacaccaagaaggtcatccagtatctggcgtacgtggcgtcctcgcacaagagcaagaaggaccaggtgagtgctgcagcccttgtccctgtggccgcctgcttggccttggtgggatgatggaggaagagcacttagtggtcccggcttcagctttacaagaggatgctttggggaatgaagcagaggctgggcccatttccattgaggcagtggcgtggcctgtcctgggagtggtccagcggtagcaagcccattccatccttggcctcctagccttctgagttgctatggaaactggcgaggtcctggagtttgcatggcagccctcttggcttttgcagctcgttgctgtgtgtcctccccttctgaggctggaaggcagattccaagacttggtcctcaagttgatggaggcttgaaaggtctcaggcagacctgtatttgattccatttcttttccctgctgttgaaatgcctctgggtggacagccacccacccccaccaccccagcgaagacagaaagggcaattggaaagtcatctcacctccatttttttcctctcccttttgatggattatggttgaacccagcagtgtcctcgctaggtgagctgcacgtttactgcacgttctgcactgggaatgcgtgttctgcccatcgtgtgcccttgaattctgtattttgttctaagcagcttttcaccccacacttgtcactttctgcagctagaactcttcttttaggctcagctcactgactgtcttgggaggaggggctgggtgtggcacacagtgacctcctgtgcactctgaaatgacagctcctgcagaatggggacgggcctcacacctagttgttctcagaaactccagtcatgcccagatttccccacagcgcaccatagctgtcatgtcccatgcggaacctgaccccggcacggtggatggggactccgctctcacggagccctccacgctctgtggtccagaccagatgcagatggccggctgccctcacctgccaccgccgtgccagtcagaagcagtgccggggagttctcacgttggagtttttcagaggttggggtgatcagacttaagcatggctgtgggatgctctctctcaagcacacactcttaacctcccctgtgaaagctaagtgccagtggtgttccttgaagccatcaggggagcttggccgctcccggtggctccaccttactggcgtgccgtgtgcggccttcgtaagtaaggaggggtgtgagtctgcatgcaggtctggggtgtggcctgcagaatggcctaatgagtacagtcttctggaaccgaaccaaaagtaacttttcatgtgccaagcttctcaagacgtttgg

SEQ ID NO: 103597 - DNA, 1883 bp, Homo sapiens
agctgatgcgagctggctgctttgtgctgctcctccaggaaggaaagcccggccccagcatgaggctgctgaactacccatggtcctgcctgtcagtctcatttctagaacttcttctttctagaagaggaatctgcagttaacgggcccttttcaaggattcagcgttaggcttacttttttttttttttgtaaatccaacccaacaggcccaccatgctttgctctgggcccactgagcgggagataaaaaggaagtggcctcttagaacctgaaattttgggtgggggtgtttggaagctttgcccagtgttttttgtttctgctccccatcccctgaaataaaccaacaacaaaaactcacatcaaatccctaatcactaagccacttcgtgcttttggcctcccgtgacgagttctcttgctgcctggtgagtgtcacctaccagcccgtttttcctgttctctccagctctggcttagagacttcagttgaactgtgtcccagtttgtcagggctgaacaacagtgtgttcagagaaaggagttgctttcttttacatacctgatttctggaatgaagttatcagttgagaaccaaagtaattccctacaactaaagaaagataaatgaactgaaaagctgcaggtataaaagttgggattctgcacgtggcttctgtcaaatttgtttagtcttgaccaaggctgtcagccccgtgtggaccttgatcataaactccataaactcttgagaccccaggttttcttttggcaaacagacagtactgatgggggctcaggatgtcattcccacctggctttgggattcttcctgaagatcttgtctcttccacatgagctggtccacagatacaacagggcacaggtctaagctgaaaggagaggaagcgtgagccgtgctccaggagtgaatcctagcctaacagtcaccgacatgcctttccttctaccgaccgctcctccgaggcaacgtgttcatgcgctgttaactgttcacctcctaccattgatgtccctggtgctctcaagcacgtttgactcatcaaaaggagtttcacaaagctggttgctgtctttgcaggcctgtttgtgctccaacagggagctgagtttgtcatgagcagtgcctggctgtgtctgccatgctccctgtgtgtgtcccagctccttccctcttattccctgttgatccagccctctgcagaagtcaacaggggcccctcctgctttgtctttccttttcgcaagggaaatgttaggtaggagcaaggcggaaccggactgggagtgtcccggtggcatgtgctgtgggtggtcagcactcgtatgtggttttgaatttccctccagtctgacaaacctgttggagctgccttggcaacaaccccagaaggagaagtttccccctcctggccccacccacagaaacagcagtgctgtttctggcagatttgcctgtgtgctgggaacttacctgtgttttcctaatgcattttggccaagagaaggcttgtttggggcctcgcttagtctgacataatgaaagttaagagcaataccttgaggtttttttttttttttttttttttttttttaattatccagagtgtctggagggggagggctacccattctctgcctcctataagtggggacttgggtctcagcaggttcaaaccaggttccacctgggagatcacaggggctatggggcagaggcactgggccgagtcgaactggcttctggtgtggatgctgctgagcaggcatgtcccttggtctgggcctaccgtggtggcctggagggcacactcgcccatgaccacattgtgtgcctgggagcgacggaaggggcttc

SEQ ID NO: 103598 - DNA, 3669 bp, Homo sapiens
caactactcaggaggctgaggcatgagaattgcttgaacctgggcggcggaggttgcagtgagctgagatcgtgtcattggactccagcctgggcaacagagcgagacttggtctcaattaaaaaaaaaaaaaagaaaagaaagttccttctttttgtatatagctgacctgcaaagcaaatactaataggtttcttgctcttggagcagggaggaagttagtaacagaagttgtccatgttatgacaagctggttcactagtaaaagaaaaatatccagaggaacctttggttcttgccctgggtcatgtgtcacccgtggagcctcggggtctgcaggctgttaaaatctgctcctgtcttttggagtgaagtcttagtgcatgctgcccccctggctttgagggaaacagatttgttctctgccacttacatcttaaaaggcacagccggaaagttccttttgtgctttttctttaaacaagaactagacaaagatttccttcctgagctggctgtgccttatgacatactagcatttattctgccaaacggggcagttggtggctctgtctggggacttgtaggagaggagctctttgacccttcctggggacctccatctgcctttatctgttcagtgtactggtttgcctgtacagtcctgatttatgcctgttgttccacagttattattaatagcactctctttcactttcagaagcatcccagtttggaggataaattatatgtcactcacctattgtcagactaagccagggattctcactcttggcactagtgatatttgaggctggatgattctctgttgggggtgggggatcttcctgagcactgtaggatttttagcagcatcgtggcctctattcacttggtgccagctacaccttccctctccagttgtgacaaccaaaaatattctcagacattgccatcaagtttccgtggggggcaagattattcccagttaagaactactggactaagcattgcagattagttttactttgagtgtcatctccgatcgatcagtagtggctgcctggagccctgtgctggcaaggatttgagactcgatgcaggaattctgagatggattagtgctgtctgccgtgggcacgggtggggcatcacagcatgtagtgccttggattaggccgtggaggtaggtgacagaaggtgccagaatgccaggaggttttgacattatcctgttactggatgccctggcggtccaggtggagagacgaggcatgtttatagacagagatttgtggccctagctacaaaacaagacatttggtgcctacacctgcgccagcacgactgagccaatgtcaggtgtcctgggagttttgtcaggtgtggcgaggtcggatcttgcagaaaggcggtggtgtgtgtcagtcagtaagtagttacagggcatcccagacgtgcccagcgtggccttgggtgacatggtcggttcaccctcctgcccctggctttcccatgttgttaattcgttgtcatggccgttcctgggtcttcctgccttggggattggactgttgctcggaactctgtgatggcaccaaaggctttgaactggccaaggccaggagagtgagagagcgtaaacgttgtgttgctggcccttgccaggcagcgggggatgggtgggactgtgtcccggggcaggcacaatggtctgctgtaaagttcaggtggaagcagctgtggtctgcaaaaggtctgcctcgcctaggaaatggtgcttctggatcccgggccagaccctctggggtctcccctatggggaaaggtgtgtatgtctctacaggagaactcactggttgaggaatttgacatgagcccagttatctccccagtgagtagaaaaagccccttctatgtgaattaggtagaatgccaggtttggttcactttcagtgactttatggtattaatattttaatgagttcccagcattttgggggaagcagatctgctttcattctaggcctaaacttgtctgagagcaatttaaccctttgctctgtgccagtctcccttcccacccgatccctggttcccaagggaagctgcaccagaggtggttggtcacccagcagccgctcagagtgccagtgagtgtgcacatgcccctcggtgtctgacctttttctgtaaacaatgaggggtagaatttttgtgtatcttcacgtctgagcatggctcttcgaattcatacgtaaagaggcaggcacagataatgttaactggcttgtcgaaaagcccgcagagagccagccccagaaagcagtctcctgatttcctgtcctggtgcctgttaccctggcacaggcccgtggggcattggtgcccctcattttctctggctggtcttgaaggaattcttatctccagctcagtggttggggggcactaggggaggagaggccctctctttccttctctccacattctccctgccccgctagttgtgtctcctgtggaactgtctgctttccaatgtctttctgaggaaaagtgccatgtttggcagaggctcaggaaaaagcttcaaggggcagaaaagctctgtttgaatcgactcaccgggacaggcagctgaggaaggagcgccatggaagccacagatgggatgactctgctgaagcaggaatgcacccagccgggaggccgccagccctgccagccgtcagcacacaaaggcaccgctgtctgctggggaggttgggagcaggccctgtgtgcctaaatgtgcctgtggaggcagcgtgggctctccaagatggggcgtgttctgtgtctgcacctgctggtctctctgtgctggctgagctgagcacctactgtgtgtgtgccgggcactctgcagagagtgtacagacagcaggctggggcctgcctggaggaggtgactgtttcgtgctcagagacaggcaaatcagcttcaagatgagagccagagactagcacagaggaggggcgccccaccgagcctcgagagcttctggggtgggtacgggcctttgatagatgacacagcacttctatagggcaccaaaaaggggctgctgggcctgtctcagccttagacttgggaatagtgccacgtattgcctttgagcaagaggaagtgtgtcgtggaggagagactgtgggttttggactagacagagcaggaatctgcctctttagcttcctaactgcaacctggctggagcaagtcaactcactctaattgagcctttgtcctcttgtcctcctcttgggcttcatgacactcctgggcagggccatggtaagaagtaagacgccgtgtgtgtgatgcctgcgataagtacctgttagagctggcagtaggagtccaaacacttcttgactgaactgccccgccttccacggaggcttcaaatcgctcattccttccgtccacactcctgctcgcttaatgaaggtgatggccaaatgcatcttccaggcagccatttgaatctccccaaaaacactctcccgagagtccaggtgcaggaagtgagttgtcacagccgcccctgcagcgaccgcgccacacactggaacgcgatagcagacgcggtcctggcttatctggtctggtccacgcagagctgaggc

SEQ ID NO: 103599 - DNA, 1061 bp, Homo sapiens
tggcaaatccctattctttttttaaaaacatgactgaagcattagggcctccaaggagaatatctgggctagatttgcatcagagccctggtagtgctttatttgactgcagtgtttacacgtttctttttctctcctagatacagacagggcccatgttgcctttatattctcagagcttagccaagtacctggcatatgtaatcctgactcaaacccaattttcaggcagggccgtgttctcctatcttgtatggatagtggtttgttatgtcccattacatatggatccttttttctttaaactttgcagtctatctagacagtggtggtaatgcatcttgttgggttaaccactttgtccctggtttagtggtttacagtggcagcttgcagcctgtcctccaccacccacgctgtgctgtgaaggaggcattttactgttgagcttgatgcattatgtaggatgctcaagtttggccgagtctttggcttatgttcacgtctatcaaaatatcttgaggaagtcaggccttcagttctaaagtagaatgtctgtttcaaaatgctaactagaacagcctggtggaaaaacattctgtgggattccagaaaggtctgattctttgtctctagaggttatgagtcagtttgctcccagctctcttaattggcctagtgcaaaaagtgtactccggagtcatcttgagatctgagctactgagtaagggcctgttctcacacttggatcctggattgggatggttatctagcaactgggcatttttgcttttaggcaagacattaagactgagtaatgtgtactgatgaggcaggagacagtcttcagatctggacttcagactgtcttcagttaacctgtgggactccttctccaagagattcattcaatttttatttgttcaacaacaacaaaaatttggtggtggcctgaaagctccatacattgaaagtaattgggggacaaaaaaaaggatgcagagaaccagagctttcctttttcttggccataccgaatggccttcataggaacttagggg

SEQ ID NO: 103600 - DNA, 1089 bp, Homo sapiens
ttagtagagatgggttttcaccaggttggccaggctggtcttgaactcctgacctcaggtgatatgcctaccttggcctcccaaagtgctgggattacaggcatgagccactgtcctgggcccaacttgttttttcagtgatgcacatctttatcccaaaagtgtggagcaagaaagttgtgcagcctggttatatagagttttactgtgtcttaatcctatacagtttgcaaagagaagaggtgtgagcatgagtgatcttgtgtggctgacgtagttgtatgtaatgtgttgtccttctcctccccgcttaggtcctggctataagtcaccatggcacagcaagctgccgataagtatctctatgtggataaaaacttcatcaacaatccgctggcccaggccgactgggctgccaagaagctggtatgggtgccttccgacaagagtggctttgagccagccagcctcaaggaggaggtgggcgaagaggccatcgtggagctggtggagaatgggaagaaggtgaaggtgaacaaggatgacatccagaagatgaacccgcccaagttctccaaggtggaggacatggcagagctcacgtgcctcaacgaagcctcggtgctgcacaacctcaaggagcgttactactcagggctcatctacgtaagtggctgccgtggcaccccgcaggctgggtctgagggctccgaggtggggggggggggcgggtcttcccatcaccctcacgtgcctgggccctggctctctggttgagaagggggcttgaaggagtgctggggtgacatccttgaactttgacatctgaacatcctagtgggatgttcttatagcattattcttttccctttgcagccaaaagcaaaacaggaagcctgttttagaacatacgtagggagaagaatatggccctgtctgagggatggccacccactggccttcgttctcaagttttggtggaaatatgaaggttcaggtcaatgttgtagattccttcttttttaatttaatttaatttaatttaatttttttttttttttgagacggagtcttgctctgttgcccccg

SEQ ID NO: 103601 - DNA, 1394 bp, Homo sapiens
agttcctctctggttttcttatctgctaagcatcaacacaggcttgggttggaatactgctaatggaaacaagttccagcttcttctgtaagcaaacaacattcctgaggtggaaagggaaggggggcccacccgcagtcttcagctcctacctcctgggcactggcagctgggaggagccccccactccttgttagcctggggagagtgagggcctaggtcgaggctgctgtaggttattagccctgggtgacagaggagccactttattgacccaccctgtagataactgctctgacagccctggtgtgtattgcagagagtggccttgtgcatacctgtgagcagataggacattttgcaggtgggaaagccgaggcctgggtggtgcctgcaggattgcacagctggtcagcacctcgctggactcaaatccagctcttctgccacaggctttgtgcccatctcaccagaccagcatttcccagaccagcatggagagaggtttttcctgcaggatattcctgggatggagttaagcagatttcttttttctttttctttcttttttttttttttgagatggagtctcacactgttgcccaggctagagtgcagtggtgcgatctcggctcactgcaagctccccctcccaggttcacgccattctcctgcctcagcctccagagtagctgggactacaggtgcccgccaccatgcccggctaattttttgtatttttagtagagacggggtttcaccgtgttagccaggatggtctcgatctcctgacctcgtgatccgcccgcctcggcctctcaaagtgctgggattacaggtgtgagccactgtgcccggcctaagttaagcagatttctttttgcaggctgcttcctacaacattttgtgcatattgtgattgcaagagggccatagggagacggcattccatccttactcggccacgaaaccctcttccctctgcaaattgctgtctttatagtcactgtccctgagaactgtcctctatggatggatataacctgcagaaagagtcactagactcctggtaactgattttcagagggcccaggtgtcattcctaggaagaatggggattaaatagctcagaatcacaagatagaggagttgggagggaaattcctatcatgccattctccactgggagcttgagctacaactcttctgatgttaggtggtggtggtggtggtggtggtggtggtggtggtggtggtggtgtttgtcctcattctaaagctaggaaattggggtgctaacagcttcaaggtcacaggaattgtgagcaggggacctgggactccaatccaggtctgtctggccccaaagccataaactccattgtggtacatta

SEQ ID NO: 103602 - DNA, 1086 bp, Homo sapiens
ttagttctgtggactctctggctagaactttaaacctatgttagacagaaagaaatagatagtggccaccagtacgatgctgaagatcagtctggcaaaatccctcctgccattgactagctgtgtgtcctggaggcttgatgtcctcaaagtggggacgctaggctgagggcgctttctggttgtgaggcctgggtgtgctgacctgtgcagtatcatacaccttggaggaccagcgtggtacagaggggctgcagaggggtgggtctcttcccttttaatacaggtcacaggctttaatgacccttaggttgaaattagagcccccccacccccacccccttgccttacttctggcttttacacaagaatctgaagaatgtgatgctctatcgcggacggggcaggcttcgcaggctcttccgggctttgcagggcagcctttgttgtgctgcaggacctggggcattccgaattggttgtggttgggagtcagagacaactccaggcttattaaattcctggctgtttagggcgatatagacagctgggaggggtaagggtggggagataacactcctccacctcccagcactgttatcttagagaaattgggttaaaagtgagtctgctggaggggattggtagcagacaggaggacagatactggtgctttggccctgggctactggaaagcttgcgggtccacctctgcgcttctccttcctgatcacggagcaactgctgttgaccaggtcctatgtgacgccttgccagatgctctgtgtgcattcgctgtctcattgcacccctagaggcagtggagcagagtggttagggatggaagacctggagccccaagtgagacctgcagggtacagacaccggcagctagtgcctgtgtgtccttcagcaagtaagccttctggccttgtttccccatctgcaaaacgggataccactagaatctacctcacaagagtgctgtgtgctaaagtgagattcctggtgaaaagcactcagaataaagtgcaagtggccgttatttaattaccaacagggtcctgggaggtgggccttttcatt

SEQ ID NO: 103603 - DNA, 1058 bp, Homo sapiens
tgggctggtcttgaactcctgatttcaggtgatccacttgcctcgacctcccaaagtgctagaattacaggtgtgagccaccgcgcccagccagttcttctgtttttaaagtaaaaaaaaaaaaaataaggtgggggtgtgtgtggtgtttattgcacaagcattattgcaacaaagctggcaagaagcagatttgccctgcacctcatccaccgttttgcatttttctgggttttctgtccatatacacatgtattttacaaaattgtaagcagaatggagactgtgtgtgttctgagttactactataatgcaaagttcctatgtttcattggtcgccagaattcatattttaatgaccctcttatgtccactgaggagagggaccatttttcatgttgccagaaagttccacgagttttattgagtcttggaaattcattcagcaaatgtatccagtacatctattctagatctaggccagaaactgcccgctggtcaggatgcagatgaacaagaggtcccaggccctgtcctggagggggctcgcagcgtagacctaggaacatgccacttcactctggtgtggttgtgattgaaggggctgaggaggtgggggctgcttggatgcccaattccagtcaattccagccgatggaaaacaggtaaaaccactttgtcagtagtggtgagaaggcttagaaacaagggagctgggagatctgtccgggcttttggaggaagctcttcaacctgttcaccccgcctccgccgttgtgtcacttccaaggcccctggccagaaaacccactgggaggaagtgagggagagaagaagtctccaagggaccatgacaacagggaggcttgggaaatagcccccggcccttctgagggagaccctaccgagggtggcagtggagcaggggcagctgagggcaggggcagggggaggatagtggggtggagtggtcttccaaagtcggaaggccattggcaggagacttgggctctgctgaggcccctgccttttccaggatggtgtgagaatggtagcaa

SEQ ID NO: 103604 - DNA, 1039 bp, Homo sapiens
gattataggcgtgagccaccactgcacctacacctggccatgctagggcttttacatggattatctcatttaattcttccctggtttccataaggtaggaacttatcctcattttgcagatggggagactgtgcagggattcaaacttgggtgctccagctcctgactctgtggccttggagacgccctgcactccaggacttgtgtttcctcacttggcggtgagtggttgggctggtccttgaggcctccaccctcaccagtggctgagcattcattcaatgggcagagagaacgttgggctgcagcagaatgggatctcccgtacagcagttggcaacccacagcggggttgccaggtcagcattgatgccttggctactgacttcacctttaaccccactggccatttttcaaatgaatgtggttggtcctaagggagagcaggtggaaagaccctggccccagcgtgaatccaggcactgctgtgcctgtctgagtagtgccctctggggaaccagctagccaggcaacctgccatcatgttgcctagtgagctcttgacatcagccatcttgaaaccattgggttcctttcgtccttcatctgtccacccatcagattcatagtcattcagcagtgactcctactaggaggaactgattctaggtataaggcactggctgggtgctaggaatatggagggaaaagaaacataggcccttgtttctgggagctgatggtctcccaccagataccgatgctggaaacccagggagaaggcaggggggagtctgagaaggcttcctggaggaggcagccttcgagattgtaaagtagagacatggtgtggcaagtccagggagcaggggtgggacctcgttcagttgcccagacgcaggcagagctttgttcaggggtgattcaggttggtgaaggccctgtgagtcacctggggctggtgaaacgtttcctctcctccttaggccacgacccagcctctgcataggccaagacggcccgtgaaggcttgtttcct

SEQ ID NO: 103605 - DNA, 1198 bp, Homo sapiens
cagagtgctgggattacaggcgtgagccaccatgcccggcctccactttagttttacaagggcccaaagcaggaacaaacctccagtcctgtggcctacaggatgacagcctaagccctcctatcccccacttgaccttcaatgcccatagggaacctgccccagcccatttctcatctgctgttctggtcatcttcccaaaagaccaaccctttccttgcctccatatttctacactttgacactttgggtcaagtggaaaaagtctggtggaagaactagttctaaatatcagcttagtcacttacttgctgtgtgactatgggcaagccacttgacctctctgagtctcactttgctcagctggaaaatgagaaaagatatgcctaagtcttagcacttgtctgatgattaatatgcataagctgaaggaatgaagggggggtatttattgtgcccctgccgcgtgccagacccggtgagagacactggcgacgctgtggtgaacccggcagtcacagtggctgcttttctggggactgttcttgaagtggagggtgtgatctattgcagcaggaggttgagtaactgagcctttgtaactgtgagcaggattcctcctgagctgaagatgagtgccttaagccaggtgtgagggtggggaaataccctaatttgacagacgaggaaaggaaacttcccgcactccgctttaagtggtggggccaggattcaaacccaggggctgctttgatgggccaccctggtttcctcttgcatccgcactgctgagcagagagcccggcacctagcgggatatcaaagacacagaggccgccagcagtgaaagctgtgttgaaaagaagctagaggaagctggtgaaaaccagaggttaggaggtggggacagggaaggccgtgaagggaggggccttttattgaccagccagccctcggccaggtccctgcctcagacgtgcatgttggcaggaagaacctggctgggcatctctgtgactgtggttgaatgaaggagcacctgagccttcctttttttcttttttctttttttttctgagatggaattgtgctcttgttgcccaggctggagtgcaatggcgcgatcccggctcactgcaacctccccctcccacgttcaagcagttctcctgcctcagcctcctgagtagctgggatt

SEQ ID NO: 103606 - DNA, 1075 bp, Homo sapiens
ggcagagaggccagacccccactgggttcaaatttggcaccacttttcagacatgaccttgggcaagtcgatttctctgaactgtttttttcacttatgatatggaaataatacttgcctcacaagagtggaattcgatgaggtaatgtgtttagaaagtgcgtggcaaacggtgccttttaaggagcggcagtggggtccggtggaaagggccagggctcgggagtcgaggcgccccagcattgtgctctggccccaccctgggctcactgggtgtctttgaaagagttactcaacctccgatctgctctgctcccactgtgtcaaatgagctgacaccacttgccttgttgcctgttgtgagatgaagatcacacacacgccaccttctatcagatgacaggaggcagcgagggtggttcctgggggtgggtgtggaaggctgcctggccttgaatcccagctcagccactcaggggctttgtgacctggggaaggctcctcaacctctcggggcaggtctcaggtggaatctgaagggcaacgccttcccgcggggctgtgctgagctgagaccctcaaaacagtgccaggtacctgggaggtgcctcctgagtctgggcaggtcctgctcatcttaaccagggcttttggcctttgcaggatgttcactccaccagcttccgtctccactgacgccagttgctggttttgtcccctccatgtgcttgtgacagaccccagggtctggggtccttcagaggccacgggcccctctcctccctcggtctcggcagccttcccaaggcagtccttgggtgggcccctggagaatgcagacagttctaatagaacagggtgagcctctgagaacagagcaataccagccccatggcatccctggggccacggagtagggtgtcaggatccccctgccgccaagcacctgattcacaggaagctggggcctcatccaggcaaccgagccctaatgacagcttggccctaggagcaaggcagacggaaggaaggctttcttgactggcaagcctggctcccttggcacactcctcta

SEQ ID NO: 103607 - DNA, 1358 bp, Homo sapiens
tgtgacccggccaaggcccccttgctagtgagtgcaaagccaggactcgaactgtcccccagcttctgtctcctcctgggccaggcttcccctgagctcctccctgcccccagccctggcctgcagctgcaagggttattttcatctctcctgtcattccagcaaaaccactgggccagtgagtcagtcttgtggttaagggaggaagggtactgttgggagcccgcaatggaagacgtttcttcagcgggtggcccccgggccctgcagtacccctgcaccgagagaagagccatgttcctctaggcctgcccatggctttgggaagtcagtgccctggataagccaccagccttccccacaaaggctcaggagtggcagttgagaagtattcactcccaattcacttggacccccttgtcctctccacccaggtgtcagcggtgcccactgtgctggccatgaagaatggggacgtggtggacaagtttgtgggcatcaaggatgaggatcagttggaggccttcctgaagaagctgattggctgacaagcagggatgagtcctggttcccttgcccgcgtgggaccccaatagaactcagcccttccatgccagcccttcctgctgcctccctcctgtctggctcctggggcccatgcttagagcccaggctccagccctgagtgcttccgagctggcggactgcccaggggccatcagaggatggtggtgctgctgctgatccggggaccgctgtcttccctcccatacgcctttcatccctccttctagggcctatggcagttctcccaggatgtgtggcgagagcctgggccagcccacagcgttcctagtcaggcagccacaccttggtcctcatcttggtcccttccaatctgaaacctcgtgcctggctcgtctgccacctacatttctctttccagctgctgttttgtaaaaagaaaaagaaaaaagaagcccaaactagtgagagtaatatctaattatctcattttttgtaggtctgtgataaagaacttagtcatcccttccacctcctactgtgaagaacagaccctgggtcccacactgaaatcccctctagtcacccattcccaccccccagggagctgcctcccaggcagggggtgcagaaaatgattgatgggctggggaaccctggagagcctcgactccggaagtctcaaggtgcctcctcctctccttagctggcccgttggttttctgagcagggggctgaactgtgaacaagtcagacaaataaagcaagggtctgcaccatctgcaatgtcacatctgtgtgggctcagagcacttgtcaccctttcccagggg

SEQ ID NO: 103608 - DNA, 1033 bp, Homo sapiens
gaggtagaggttgcggtgagcctaaattgtgccactgcatgacagcctgggcaatagagcgagactgtctccaacaaataataatacaaaataaaaagcagccacagtagatctcagtccatgtgagtcttagggaaacgccagcctcacgttgttagcttcagcactgccttccgaaaccacaagggaaaagcctagttcctcttcctcatggcagcctttcaaatatctgcaggtggctcttgaacagtctgaccacagcccagcataggaggctgtcgggaaagccgagcacgagtgaacgagggaagtgtttgggctgtgtgggatccgtgctgtgtcggcccgaggaggggaagcccagcctcacagctctgacatggccccctctctcctccccacagaacaggaggtgaggttccgccctgcacactggcccctgcctcggcccacggccatccatcacatcgtggaagacttcttaacagactggactgccccgatcgggcacatcctacctctgaggcgcttcctggagaactgtttggacaccgatttgcgaagcttctatgcaggtaacttaagctcccagaaagacaaagggtctgagctccaggttgaagaaaggtcacagagacccaagacccgtggagtttcaggacccatatctggaaatccaaaccccagactactgttcccgacaatgccgtgggttaaattacaactcacctaaaaataatggataatatgtcttcttttttttttttttgagatggagtctcgctctgttgcccaggctggagtgtagtggcgcaatctcagctcactacaacctccgcctcccgggttcaagcgattctcctgcctcagcctcccaagaagctgggactacaggcacatgccaccatgcccaactaatttttttattttttagtagagatggggtttcaccatattggccaggctggtctcgaactgacctcgtgatccgcctgcctcagcctgctgaagtgttgggattacaagtgtgagc

SEQ ID NO: 103609 - DNA, 1028 bp, Homo sapiens
cagtgccagtaataagtgccactgtaataagtgcctcctggctgggtgcagtggctcgcgcttgtaatcccagcactttgggaggccaaggcagacagatcacctaaggtcaggacatcgagaccaggctggctaacgtggtgaaacctggtctctactaaaaatacaaaaattagctgggcatggtggcaggagcctataatcccagctactcgggaggctcaggcaggataatagtttgaacccaggaggcagaggttgcagtgagccgagatcacgccattgtactctaacctgggcgacaagagcgaaactccatctcaaaactaactaaataaataagtgcctcttacatagcagctattttcatgaacagccctttccactgacaggtccctcagacttaactcgggaaatgcattcggcaagaagtacccgctgattcgagctagctacgaatccaaaggaagccggggtctgtttatcctgggtactgccagccactcggtggactaccggaaatctgctgggggcttcatccacggattccgatacacaggtgagcccagctgagaaggcagaactgtccccagacggaaccactctcagcatcccagggtttataaatctactcctatgtccagaagcattaggggattgcttgtcagtagctcattgtcataaattgtcttggggaagtgacaacaggtttttgtggtctgacgacatgtttaggaaagtatcagataaagtgtaaaagtccacgcctgtagtcctagctacttgggaggctgaggcaggaggatcccttgagtccaggaagtcaaggttgcagtgagccatgatgataccactgcactccagcctgggtgacagagcgagacttggtctcaaaaataaaataaaattaagtgtaggccaggtgcaatggctcacgcctgtaatcctagcactttgggaggccaaggcaggtggattgcttcaggccaggagttcaagaccagcctgggcaacacggcgaaaccctg

SEQ ID NO: 103610 - DNA, 1048 bp, Homo sapiens
tagctgggattacaggcaagcaccaccacacccggctaatttttttatatttttggtggagatgagatttcacgacgttggccaggctggtctcgaactcctgacctcaggagatccacccacctcagcctccccaaatgctgggattacaggtatgagccaccgcacccggccttcaattctatttttgaaaccactctgtgatcaaagcattcttctgcaagccggcaggatccaagtccccagctgccctcccctggatggcgatcctcaccaatggaaggagcaggactttggaatcaagcctatctgtgtttagactctggctctgctgcttttaggagctctcaagccatgggcctgcagggcctgtgcctcctcacctgtaaagcaggccacataccacctccaggttgcttggaggagtcagaaagatggtgcacagatacacttagtacagggcctggtacagaattactgctcagtggatagatgtatctgtcagaggactcagaaaggggaaagtagaatgtcaggtttcatttcatcaccagcagtcatacctggtctgactgctatgtgcaaagttaggtgaattctccatttctcatactgtcatcttctcctctctcacagggcaaatttaacccccagtacagtgctagggaaaatactgtgagctcagggagaggcaagggcagagcctctcaagtgcactgggatgagggcgtaaacagatgaatgaatgaaaaatgaatgaatgaatgtcctattttcttttaggggccggcggttggagccaggcaggtgggtgggtgggtccagggagtggttttcacttagtggtcttatagctaagagactaagccatctttcctctgtccccgcctgcagcgtcctctttgtagccactggtttatcagtccccaaccaggttgacttccctggctccgaatatgcagagggttacgagtccgtgtccgtggaccctgaggactttgtaggccagaatgtgctgatcctgggtcgtgggaactcggcctttgag

SEQ ID NO: 103611 - DNA, 1050 bp, Homo sapiens
ctctcagatcaagacctcctggctacacctgcacttgagccaatattctccacttggctcactgttacacgtcctctgtgaagcccttccttaccacgcaacacatagtaaacacttggctctgctgtttatatgacacttctaaagtgtgtgtgtgtgtgtgtgtgtccgtgtgtgtccatccatcattccctgtctaggcgagcttttagaagagaggaattgtaagtcgttgagtgactgctgtgcggcaggctgtgcaagggaagggactatgtctttgtctcttaaatggtaagatttagtgcgtacctacccactttctaagcaagcagactagggagttccttctctgccagaggaggtcccagcaccttgggcatttggagcttgcttctgtttctctaacggggctctcctgcagcactgtaatggcgttgactggcgtcagaagctggactctcagcgaggggctgtcattgccacggagctgaagaacaacagctacaagttggcccggtggacctgctgtgctttgctggctggatctgagtacctcaagcttgggtgagattcctgtgcaggagctggcagctgatcttgtgaaaggaagggtctgggtagggaggttgaccctcccctccccgtgtactggacaattgactggcagagataaatccaggggtggggtagagatggaggggtcagttaggagacaaatgccaaacagcaggcatgctgaatggagtcctgaactagggcaatggtgtcaatgaaatccagaactgagaactcagaagacgatgttttccctttcccttgaaaatagcagtggactgccgggcgcggtggctcatgcctgtaatcctagcactttgggaggcccaggctggcagatcacgaggtcaggagatcaagaccatcctggctaacacgatgaaaccctgtctcaactaaaaatacaaaaaattagccgggcgtagtggcgggcgcctgtagccccagctactcagggggctgaggcaggagaatggtgtgaacccgggaggc

SEQ ID NO: 103612 - DNA, 1048 bp, Homo sapiens
gatagtggaggaggaaacacagtgaacaataaataataaattgatttacatcaaatggtgaatatatgccatggcaaaaaaatgaagtagagatgagcatggttactaagtcattgttctaattcatcaggtgctaacagttgggaggggtcaagtaggcacaaaacaggcagcgagctcagagccccatcaagggccccaggaacctggccagggctgcaactaagcagaggtgctgggtctgactgattggccttggccttgtcaacaaagttagctctgtcttgtgacacctttgtttttgcaggggaaggaaagatacaacttccccaacccaaacccgtttgtggaggacgacatggataagaatgaaatcgcctctgttgcgtaccggtaggtcacctctctggtgggtattgtggccagactggagcacgggccccactctatagaatccccagtgaccacatgagtttcttttttgctgcagttaccgcaggtggaagcttggagatgatattgaccttattgtccgttgtgagcacgatggcgtcatgactggagccaacggggaagtgtccttcatcaacatcaagacactcaatgagtgggattccagggtgagccgccatctccatcaccctcctggtgacaccatgtctctattccctacagtgcctgtttacgcaggctaggttgtataaactgtttcttatcccctttcgttacttatagagctacctggatgtttttttttgtcttgtgagttttttcctctgcttagttccttgctgagaaagagcatgactgtgtgtgtagaactatgttaagtgttaagaacttttctgcttattttttacgcaggaaccagttaactcccttcttccagtactttcttcatctctgttccattgtggcctcctgttgacttctgctccctgagcatctgattttttcctctccttattatctgggttggcagttttcctgtaagtctggccgctcttctttttgacctcttctttcattgactgagccactgccttca

SEQ ID NO: 103613 - DNA, 1741 bp, Homo sapiens
taaactgtatatttctgtttcctggcatcctgagcaaaagagcaataagattaagttataaaactcttgtcaggaaaagaaacacagcaattcttcaggaggaatctttgcttctcctgacatttcaaatagcttcttacctcaaaggacaagtaggtggaatttaggtagtgggaaaccagagcaccagacgagaagtcagcctacccaggtgcttctataactagtcatctcctgtcttagcctcggtcaccctacctttaaaatgggggcgttgggctagatgagttgtgcttgctgtgttctatgccaggtgttaagtggacaggaactgagcaagcactgaggattcgtctctcctgctctggccagagattgctttccacctcttttagacttttggataagacttctggatgtatggcttaaaagaaaaaactgggggttatctctcttactttgcatgtctttgcctgctcttcccacagtgagtgttgtggggccctagaatactacgacaaagcctttgaccgcatcaccacgaggagtgagaagccactgcggagcatcaagcgcatcttccacactgtcaccaccacagacgaccctgtcatccgcaaggtgtgcgcctccttctgcccctctcccccttgttaggaatgctgtcggcttctacagctgaagctgcagaaagaacagaagacatgggaataacgtatgtattataggtaaaagcactttgccaggtagaccggaaatgtggatgttaagcacagctggacttgaagcccagttctgccgcgcttcctggcttagtctctggagccttagttctctcatctgcaacaaggggtagatgtacatagcactaccactggggcaaaggtgaaagcatctgaagcacttggctggaatctagcaggtgcttagggtgctgcagtgccactgccacccgaaacttgctggctcactggctgcagtgtttttggtcaatgaggtggggcctccttattaaggatttatgtggtcagcaaaggagttctttcccatccatgtgagtgggcagtgagacctgggagtgtctttccatcttctctctttgatcctctttgcagctggcaaaaactcaggggaatgtgtttgccactgatgccatcctggccacgctgatgagctgtacccgctcagtgtattcctgggatattgtcgtccagagagttgggtccaaactcttctttgacaagagagacaactctgactttggtaagaagcgtgcctggggagcaactcaaaggcattgagtatttttgttggtacagaacaagtctctggtactagagaatggatagaaagtggtctgtcttcccaagggaattgacagcagcagtgtctgaatctcccacactctttagaggttaggagaagagactgtcactgcagtacctgcttgaggcctcagcttttggagtcctcacagcaccctaatagcaagcttccaaatgttgcttttttgttgtttttttttttttttaattgagacagagagtctcactctgtcacccaggctggagtgcagtggcgcagtcttggctcactgcagcgtctgcctcccacattcaagtgattcttctgcctcagcctcccgaatagctgggattacaggcatgtgccattacgcctggctactttctatatttttagtagagacggtttcaccatgttggcgaggctggtctcgaac

SEQ ID NO: 103614 - DNA, 1075 bp, Homo sapiens
tcagctcactgcaacctccgcctcccagattcaagctgttctcctgcctcagcctcccgagtagctgggattacaggcatgcatcaccatgcctggctaatttttgtatttttagtagagatggggtttcaccatgttggacaggctggtctcgaactcctgacctcaggtgatctgcccgccttggcctcccaaagggccactgagcccctccgttttatgtggttgttgtttgagacaggatctcgtgtcactcaggctggagtgcagtagtgcaatcatagctcactgcagcctcaaactcctgggctcaagcaatcatcctgccccagcttcccaaagtgctgggactacaggcatgagccactgcaccaggccagctcttcatatttttagcctgtcttttatttatgttttgtatggactataacttttttttcctctaatggttttcaactgcagaaaccccgagactcttcagttgaagttcgtagtgattgggaagtgaaagaggaaatggattttcctcagttgatgaagatgcgctacttggaagtatcagagccacaggacatgtaagcagcatcttttactactttctacactgctcttatgtgtgtggaccagctggtgatgggtattttcttaagccctagtatttccaaaaaggctttgaagccacttactcaaaacacatttcataaggttaacagaggtatttgaaaaaaatcaagaccggccaggtgcagtgggtcacctgaggtcaggagttcaagaccagcctggccaacatggtgaaacccagtctctactaaaaatacaaaaacttagccgggtgtggtggcacacacctgtaatcccagctactcaggaggctgaggcacgagaatcacttaaaccctggaggtggaggttgcagtgagctgagatcttgccattgcactccagcctgggcaacaagagcgaaactccatctcaaaaaaaaaaaaatcaagaccaaggggaaaagcagaagttcactgactgcaaacttctttttaacttcctggtatcctgaggaaagaagaaatgagtt

SEQ ID NO: 103615 - DNA, 1065 bp, Homo sapiens
tcaggctggttcatggcagatagcatgggcaggaaactaactccttgtgctggtcatgcgcactaaagggaaacacaggcaggcaagaagaggctctggagcttacctgggctcagttctgctgtgggtcaactctaggaagccccctgtatgctggtcctttgagcctcctggtgttgtgtggtccagcggccactacaccccagattggaactatcagtgaacagtcactatagatgaagtaaaatcatctggtcagtatttggaggcagtgtaccttttctaacacctccagtatgcaccgtctgggtctcttcctttctctaagcccatttttcgtagtttaaaggagttagtggtgatggtaaggtttagctgaagagaatggcagcgtgtgccttttgaagaagccactggtttaaaggtctgcactgagatcatatgtctgtctttccagagaacgcattcgactgcagaaaaagttccagaaacaatttggggttaggcagaaatgggatcagaaatcacaggtaatgtatttataccagaattctgccttggaatttggttctgtttatttggttgtctttattaatagcttagatgagatatacttcacataccgtacaatttagtggtttttaatatatttgaagagttctgtaactggtcaatttcagaccattttcatcaccctcaaaagaatcccttaccctttagcagtcaccctgtcttgatctgttttccgttgctagaacagaatacctgagagtgggtaagttataaagcggtttctttagctcatggttctggggactgggaagtcccagatcaggagccacatctggtgagggcctcatgctgcttgatagcatggcagaaaaagcagaagcgggagcagggtgcaacagagaaaagggctaaactttgggtagttagcccattcctgagagaagggcatgaggcatttattccttttaacgacctaatctcttaaaggccctacctcccgacactgccgcagtagcaaccagattgccaaatgaattccaggaggcacaccca

SEQ ID NO: 103616 - DNA, 1417 bp, Homo sapiens
agactactaagtcttagggaagttgagtttgtatgaattggtgaaggtatatctcagaaccaaaacaaggttactatatttgaaaaaacattaggacattttatcaaatctgacaccattaaatttttttaaacacttatgtaacacagaaaaagaaaaactaccaatcaatacaacaccctgtcaaacacaaggtgcagcctcattttaaagatgttacagtaaaaagagagtgtcgtggaattaatgaaatatgaaaaatcagttttgtttgcattcttctcagttttaagtacatattcacagtataattaacaaaaacagtagtagtcgctcaacagttgagggttccattttgcgtgttgctttttgagttctatcatttatgtctttgcttacttcatatggagggtgttttgtactctgaggccttcgttcatgccgctactcacatgatttatatttttcagattttggaagatggcaaagttcatgacacccgtgatccaggacaacccctcaggctggggtccctgtgcggttcccgagcagtttcgggatatgccctaccagccgttcagcaaaggagatcggctaggaaaggtacatgcctgtcagcaggagtctgaatctttgcagctgtggctgctactctcgagtccctgtttagattttattgtctcaaaatcttaactcctgaatttcttatagggatgccagctgagaaaggttatctctgggtgtagtcatagaagagctgggcacttacagaggtgttgtgaacaaattctgagactcttccacgctgtcctctcgcgctcagggatttctggttctgcagaaacttgcctggttgacctgtgcattctctgtcttttcttgttcttcgtaggttgcagactggacaggagccacataccaagataagaggtacacaagtaagtgtttctgcaactgaatgccccaatcagggccttgggaaagttgttctttattctaatgaccttcttctgaaagctttttagaatgggaagaaactgccaacaataattcataacttttagggatgtattctgggctttaacaataaccacatttttggaaatagccctcaaaacttagaccattcattaaagaggtctagcctattaaaatggggttttgggcccttttaaaaacctgttgaaaacattagctgggcgtggtggcgtgcacctgtaatcccagctactcgggtggctgaggcaggacaatcacttgaacccagaagttagaggttgcagtgagcagagatcatgctattgtactccagcctggtgacagagccagatcctgtctccaaaaaaaaaaaaaaaaaaaaaagtaaaacccctggttttaagatcctggtaccataaaaaggctttttctctctgcc

SEQ ID NO: 103617 - DNA, 1008 bp, Homo sapiens
tgcaacctccgcctcctgagtagctggtattacaggtgcccgccaccacgcccagctaatttttgtatttttagtagagactgggtttcaccatgttgaccaggctggtctcgaactgctgacctcgtgatccgcccacctcggcctctcaaagtgctgggattacaggcgtgagccaccgcgcccggcctccaagaaatacttgtgtagtgaattttcctctaggaactcgccttctaagcattttcagaaggttacaacggaagataaatgcataggtttttttatagaagtgtcgggcagccatctgctatacagcgccggttttttaattcccaagagggctatagcattatgcagagtgcagactctggggtcagactgctttggttcacgtttttcatccactagcatttcaactttgggcaatttcttcatttctctgtgctttggttttcttatctggagagtgcggataacattggctcctacctcacaggattgttggcaggactgtatgaatgaatgagtggtaaacagtaagaacagtgcctggcagtattcatgaacatttaacatggcaactttgggcctgaggtctgtggggacctccttggccctctggcagttcttctgcctggctttatgtccgcttgcactgcacacaggatttgcgttgatggcagaaaattgaaacaatgagaaaggaaaattgaatttcaggatatacttaaagatctttttttctcagcactctatatacataaatgcacttttgcaagtctgaatacttgtgtggcattatacaaagtgcttagaacaaggatcttgtttattttgcagatggaaaagactaaggtggctggacgtggtggctcacgcctgtaatcccagcactttgggaggtcgaggcgggaggatcatttgaggtcaggagttcaagactagcctggacaacatggtgaaaccctgtctccactaaaaacacagaaaatagccaggcggcgc

SEQ ID NO: 103618 - DNA, 1048 bp, Homo sapiens
tctaagctgggtaaacagggaaatgaggtcctgaagggcaagtgaggcagtgcaaaggcgggggtggggggtggagcggggagggcagtcaatgcttttgagcctggggttggggtggggtcaaagcattgttgaaatgggggtgcatgggagtgagctgcaacggtggcacgtggtagccagagagtgggatgcaaaagacagagagtggagggggtgtggatattggaaatgccaagggcaagggtaagaccccgaatgaggtggcttggggcaggcagaggtagggatgatcttcaagtatgcactggaaaggtcacacaaattaatagataaggcaaaactacaacattcgctgttgttttctatatacatcgagtatatattaagaaactgcctacccggttaaaatttgaagtgcaaatgattcatcaaattattctaataagccccaaatcaccgattggtttttagaaatgagtggtgtgatcttttgatgatgaggctgttatgagctaaatgatggcttgactggaccatgctttgacacaggaaaccacaccagatgctccccaagcttccctgttagagtaagggtcattccacctcggcgagtgcagaatcttctcctaagttgtcctctacggttcgactagaggacctctctgtgcccagcagccccaggaggtcagggccgggaatgggaaggtagtgggaggctgtgagaggggtagaggctctcatcggcagggcagtggtgtgcgcccagcccagcccagtcccaccagtcaggaccagtagggagactcttcttctcttgcccccatccttggggcgggccttggagtttatagaacctgagaacagagctgagtccttaacccagccttggggagcgaggagaggagatggagccttggtcccagcccttctcttctctctgccccgcccaatgcaggagccaccccttcccccagccagcttccctgacatagtaagactgatcggtacaacagtatttcaatatttaacaaccagtgaggcagca

SEQ ID NO: 103619 - DNA, 1026 bp, Homo sapiens
cagatgagaaagcggggccacctcctaccacaatccccaggaggaatggggcttccatgggacaaggaaagttactgagagaagttgcagctgatccagacagctcagcgaagaccaaggtcagggaggctgagttggttgcaccagttgttgcatatgtgtgggagaggtaggggttcttggggagaccgccaaggcctctgccaccctcgcttaggaagagtgggcacggggaagacccccaaggctactccccacctccctactccccgtggctctggtcagcagtggctgctttagttgccattgggaaggcaaacactgtttgcattcctgtcatttaaaacaatgtggtgttgtgacactctggaatctgaagataaatgtttaataaaaggattcaatttgatatgatgtcggaacttaattagatccacaatgcacagagggcttggcaagcccttcaattaggagctacttaagggtgttgtgtgtggggatctgcagcgctgtcaagggactgcgggggctgggatggtgcctcccagccttgagagctgccctctatagattcgggctcaagggcactgctttttggcatttctggtagaggtgatggagggtcccggcccattctgtgcttggaactctgcatatgctaggattgtggctgcagcatgtgaccacagaatgatgcaaatgaacctgacctatttgagactcagggctatgaccccaggtcaggtgcagactcttcagaggcaaatgttggacaggggaactgcctttaagcccacttggcccagagtccaagggcaatgaagctcaaggctgccaggaactggtaaacagctgtgtttgtgatcctggccaggactgacatcaggcaggcaggtactgatatagctacatcaatagtcaaatatgagttgataaaatgcctgctgtccaagcaccccgaaatgccccttctgcccactgctttggtccctccagcccctccactgggatctcttgagcctcccc

SEQ ID NO: 103620 - DNA, 1102 bp, Homo sapiens
aagcgttcaagtttattaacaggtaatgctaatactgagaggtagcatggctgaatgactttggcaaatttcttaaactttctatgcctcagttttctcacctgtaaaatggaaataataataataaaaaataatactgaccccaaaacaagttgctgtgaggatcaaatgagttactaagtgcttaaaacagcgcctggtgaataagccctatataagtggttttttttgtttgtttttgtttttgtttttttaaagttggttatattccttaaggcaaaatttcttggtaatggggtcatctctaggatgacgaacctggcagagttacttcatgccataggataagtgcagtcccattggatgctgtgatgacagatgacatagaaaacagtatgttactttcatccttctatcaaattcacataacaagaccaaagcctgcaccacatccaattctctgttgcatctcagaattctaagtccttcattaacgttctaaaatgttgaattctgtgtgctatgcagtttttaaacaacatctgttcatcaaccccagaggtgacagcgagtcagtgttgggggttgttcaaagcatacccacacctcttggctccctcacaggaatgttagggggtctaattaattactgtttgcaaagcaaccgagaaattctccagggaaagttgctgtagaaatgcaagtttcttccagcactttgggaggctgagacgggcggatcacgagatcaggagatcgagaccatcctgactaacacagtgaaaccccatctctactaaaaatacaaaaaattagccaggcgttgtggcgtgtgcctgtagtcccagctacttgggaggctgaggcaggagaatggcatgaaccccagaggcggagcttgcagtgagctgagatcgcgccactgcactccagcctgggcgacagagcaagactctgtctcaaaaaaaaaaaaaaaaaaaaaaaaaaaaaagaaatgctagtttctgtattattattacatgtgcttgtaattgttttcaaagtttacttattgggcagggagagggagaatatattttcttccttgacggcaatggataat

SEQ ID NO: 103621 - DNA, 1107 bp, Homo sapiens
cacacacccatacacacacgcacagaatgagaaatggagaggcatattttgacattcttccattcatctctctgcctattcattcattcaaaaatgcttattgatcgcctactcgatgagacgcactgttctagccactggggctccagcagtgaacaggatgagcaaggtccttgtttctctaaagcttacgctcattccactcgagagcgtccctgggtgccaggcccagcacagggttaatcacactaaggatgcattataatgcaaagaggatggacaccacctacacccctttccgggctagggatctaaatgccagggagatcaacctgtccaagacctcacactgggttgtggacctggaatctgaagctagatttgaggccgactgtctttctactcactgctcaaagccgactaacaaacccgagctgagagcggtggtgcagttggggaggaagcatctagctgaagtgtgctcaaataaggcatcgtctaattcgattatgcttgctagactgcaatgtaataaaacagagttttcatataagcatcatctcctaatgtttacagaacaaggaagcaaaattaagagaggaatttccagggagaaaagcatgtgttttaggctgatgtaaagagaatagacccagaaaacattgatttttgagtttacaactcagctctgacgagggggtgcctggtggattgggagggtaggaccccatgaagggccaggctggtgcccagaggaagctggcgagagtgggagggcctgctagaaggacctcaggatggaggagagaggctgacagggagaggcttgttaacaggaaagagggctggtgaaggcaggccacagaagacttgggcagcctgtaggatttatttcccacacctccttgctcctctccaagcctccagcttctcttcccagtgtctgcctttcacatgcagccagaatgacttttctagcaaagtagagcctgatgacgagtgtgtgggccctggagtcaagctgcctgggttcgaagcctgctctgttccttcctatgttgtgtgaccctgggcagtttacttaacccttctagacgtccctttcct

SEQ ID NO: 103622 - DNA, 1112 bp, Homo sapiens
gcagcggtcttgcacatgacctcacgtgcagggagctgttattccaccatatgcagagtctcatttggaactgatgtttacattcttacccgagatctcttctcagtatagcagtagctgctcagacataacaggaaagcagatcagccagccaaccctgggaaaaggtgtatctcaactagtaagaaatacaagtgctttgtgtgcggtgatcatgaccctcgacgtttgcatgcaatattctgggttcagatgttgttggaacattgtttcatgtggctctcacaaccagtcctgtgaaccagaagttggccccacagctcccattccagtgttgaggagctcaagtgacttgtccaaggtcccatgattagcgaagggtggagccaggattaggactcatggcctctaattcccatcggtaccacccatcctcaccttgctgcagccccagggtgactccaggccacaaagtgcctgccagttaaaagagcagaagacctcattacaaaaagcaagtgattttcagcgtcttcagtacacttttcctggcaaaaactgcaattacttttgcaccaacctaatgtatcatgattttagctgtccagcactgaggaacctgcttcctgtgtttgggagttttaaagtcccatcctccttgaggccaagatgcagccatgtgacccaggctgcaccaatcagacccctcacatgagactccactaggaagggcatgaagtgatgatctgccctctaggaacaggtgtggccctgaacatccatctcagagccagcaggggcccgagtgttggttgccctgcccctcgccagggttgctagctggggagatcaccaggcctggcacagtcatggtcgtaacttggacctcaccttgtggcctttagacctgattctgtggccctcagaattgagtcatgggctggttaatgttctggaggtcatcttctgctccagcttgactttggctctaggcacttctgctattgcatctaggaaccttgaccagtgctgccgtccgagcttataaaactcccccaaagcagcatgcttccttagggaaagtacagcagtaaaggcaggcactctgacct

SEQ ID NO: 103623 - DNA, 1048 bp, Homo sapiens
ttgaccagcagaggagagggagataaagccagtaggtgagagatgagcttggaggaggtgactgctattgcagatagaattggtggagaggcccctgggaagaagaatccttgggtcacagacaggtattctgcgatggagatggagcatagcatttggaaagagatttcagaatgatgaacacagcctcagacttcttgcttcccacaaatgcagagacccttccaccccccacgccccacacaaaaaagtattcaggtggaagctgtcaacccaggttgggtcagttggacaggtgactctgcctgtcagtgccagtcacacttctttaccttcaagacttcaaagtaaattccagtttggaagtgacagcttttccccatagggcgtgtttcagtggaagagcgtcagttccgtttccagggccccaaagccctctgtaagttctgttaccttctgggtcagttcctgtggataaaaggcttagccgtgcagaagtgtgctctggctgttgtgaggtttgcagatcagtctcatggacctgtgccctgcccgcggcctcagaacaagttcccgtgagaggcaagtacatctctcaaaactcattgaagtttttggtttctagactaatgttctgcagcgggagattctcaagtcagatgagaactaaggcgttctttttcttcttttctgatctcacaggagacccagcagtgggcaagaccgccctggcacagatcttccgcagtgatggagcccatttccagaaaagctacaccctggtgagctggggtgtcaagacctggccacagcttatagagaagtgctcggttcaccatgatgagtgacttcgaagttccttgagggaagccttaagacagctgatgaaaggctgctcagagggccacgtggagatcgttttttccactagcccagggtgagaggttggctacagagcagaatggccacaagcaacttggccaccacgtgtagcagctcacatcagggcagggaggtggagaggactagttggtcccctctgacttct

SEQ ID NO: 103624 - DNA, 1032 bp, Homo sapiens
cgagtactgtaacttctaggagccagatccccgccccaggaagcgcccctacttggagtcctcggaaactcttgccccacccgcttctgcgctgggcccccgggccggctgggaggggcggggccggctttccagagggaatctgcaaacttatcccgctgcacgccccagcctcgctggcttgctgtaaacaaggaacccgggggagtgcggagggagaaagagcttctcccaggcctcaccctactgcacacaccgacttccttcctcacgcctgtctctctttcctggttcccacccgtgccaggtgacacgcagagctgaagccatggttcatcaggtgctctaccgggcgctggtctccaccaagtggctggcggagtccatcaggactggcaagctggggcccggcctgcgggtgctggacgcgtcctggtactcaccaggcacccgagaggcccgcaaggagtacctcgagcgccacgtacccggcgcctctttctttgacatagaagagtgccgggacacggcgtcgccctacgagatgatgctgcccagcgaggctggcttcgccgagtatgtgggccgcctgggcatcagcaaccacacgcacgtggtggtgtatgatggtgaacacctgggcagcttctatgctccccgggtctggtggatgttccgtgtgtttggccaccgcaccgtatcagtgctcaatggtggcttccggaactggctgaaggagggccacccggtgacatccgagccctcacgcccagaaccggccgtcttcaaagccacactggaccgctccctgctcaagacctacgagcaggtgctggagaaccttgaatctaagaggttccagctggtggattcaaggtctcaagggcggttcctgggcaccgagccggagccggatgcagtaggtaggtgtcccagtgctgggtggtccctggggagtattgccccatggaaggatagggagtaaggatgactgggaccctctccagggtccgtcccatgccttcaatcctc

SEQ ID NO: 103625 - DNA, 2160 bp, Homo sapiens
ccatcccatgccacctgccgttacccaggcccaggctgggagcagtgaaatgagagcatccccagggtgcagccggcgtggactcagaggctacatgaagggggccgcttagtggccactgggcactgtggcatggactaggggtcagggcacagtgtggcactctctgtgtgacttaggacagggcttgtcctctcccagcacctttgctgcactctctgaagtgagaggggaggatcacatactctttgtagtgccttggagcctggaacttctgggatcccaaatggccgtttattccccagggacaggtgcatgtccccagctggcctgagccaggatgaggaagccaccgctgtaaatcctgcccctttcccaggccccctccttggctgctctgcaggataggggcagcctggtggctgccagtcctgtgtgtccgcctggcctgttgaggcagcctcctgagagcaccctggcagcatccactgtaccactgtggggagagggctgagcgggggtcctgccatcctggacccagtgctgtgggaagtcccaagggccttcgcagagccacagagcaggcgtgaaccaggctgggaagaaggcaggctgctcctcctggggcccaaccccacacagtggaggcttacctctggcttcctgtctatctgtctgcctccctgtcctgctgtgacgcaccctgcctgcccacccacccccaccactgccagggctgacgctgccctgcaagggtgcagagcgagactgctccttctgcctctttgggccaaagcccctggacctggggtgtcagagactggctggcatcccagatctgggtggtgtctgccctggggcttccttggccacatttctactgaggagcagtctttccaaacaaggccttcccaggcacccctcagggataccccagtcccacaccctccctgttctgcttcatcccctccctccagcctcgctctatgtaacagcagccaggctgaccccggagcatgcccacagcatcccatcctcagctgctttccccaggccctccccaagctgcccaggggaccggagaagatgcccccagcttctgtggctggagccctcccctctcctgaggtccctttcaccttgcctgagaccgggtctttggggatagccagcaggccctggcccctctgttagtgtctccactctttcttccctgggtccgccggctggttcacagagcacggaggagcagctggaggagcagcagcagcaggaggaggaggtggaggaggtggaggtggaacaggtgcaggtggaggcagatgcacaggagaaaggtgcagccaacccccaggaggatgattgctaagcaaagccggagcctcccgcccactccttgctggagccagctgcagaaccgggggccccggggctgctgggggggcaccagggttagctcagccacttgcctggcgcctcacccgcataaccatcccttctctcactttctctttgcagcccagtcatctcaggatcccgctaaccttttctccctcccaccactgcctcctcctccgcttcccgctggaggtcctgcctcatcttcatccacctcttcttcctcctggatctcatctgcaccctgcctcttccctctctgcccctgtccgggttttctctctgcctgctcacgcctccatcccgggtctgccctggtcccagcctcccgtgccctccacccaggccccctggccctgcatcccagagcgtcctgcctgccgcctcctgcgccccttctggtacctcctgcctcccagcctggggaggaggggcgcagctgcacctcctctgtgcccactaaccctgccgggcacctctgagactgggccctggctgcaggccctgccccccctcctctcctcccggcctcctcctcacgtttcctccttgcaggttcccgtccgcaccctctcagacctgaggctgagcttgcagtgagggcttctcctcggcccctcgcccgcccccagagctgccatccctggtttgtagcttggcggtgctggagggaggggtggagcgaggagggtgctcatctcttgatccttggacttgagccgagctttcggctgattatctccacccaccaaagtttctcat

SEQ ID NO: 103626 - DNA, 1948 bp, Homo sapiens
ggcttaaggattgcagagtggcagaaaaagccctggccatgtgcccacaagccccctatcccactcttttctgcctgctctgtgaccttgggcaagtcactgtccctctctgggccacaattgcctctaaaattgggacagacagctgctccctgtggcttctttcgcctggggcatcagtgcctctcccagccctgagcaacccccatcccacccccttcagagtcttggcagaatctggcctctgtaggtggccgccaccgagcccaagacggggcatggggctcctggatgggttagttggggagcccttgctgctccccccaactcagttctgaatccaccttctttgggcctcagccccaccccctcctccagaaggaagcctgtgactcaactgcctctctctctctccctctcccccacccgtcaatctcctctccgcccccttgccctgcatcaccccctccttaccggccccacctccgcccctcccatcctcctgcccttcccctcttttttttctagctgttacaagccagaggcacccggatgtgaggccccagatcacctccagggacttggggttcccatctgaaatcctttatttttgtaccatggggtgggccccgggcctgagaaggaagaagcaccctctccccggcctcctctgtctgcacccgtggggctgtgacttactcctgcctccaggggcggggcggggcccccctgggacctcttaaggcccaaggtgggccccaggacctctgggcagagtggactgctcatggcagatgtgtggcaatgtctggctgtgtctctccggcacctgcgtcccctctcccgggctcccctgctgcatggtggatgtgctccttcctggcccggtcacattgcctccttgagccttagtccagggggtcactcctcccaccccacctacctcacagggttgttgtgagggtgcacagaggagcaaagtccctgaaggccctcaggcagtatataggggccgcccaccttcagctgccctgggatgggaaggacccagcccgacccctgggcataacactgtgtttgcaaatggagattcaggtattggggatgcaggttgtggggagctggcctggcagagtaggggtagttggcttggccttctctttggtgatcccacccccagccatttgcattgctggcccagcgcctggcctggggggcggggagaggcagcagaaggggctgggcaggggcggtggaggactcaggaactgcccggggagagtgggtatggcggctgagccaggggccctcctgtgtttgacttcccgggatgggtccttgcttctcagctgtgtccgaccccaccatgtaataaaacccaaaggaacagcccagcctggctgttgccctctttctctgggccacttttggggacggggctaaactaaaggtgtggtagtctggtccaaaggaacgcggctttgtcccaaaagcccagggacgctgccctgttgtcattttcctgtgtgtgttgcagggagggcttggggaactggctatatcctttgccctggggccggataccagagcacctgccctacctggccgggagccagaaaacagaactctagggagagccctgggctgcctctgccacatcctaaacctctcagcgcgccccctccacttctactctgacacctgggccaccgccatccctccctattgctgccacccctctgcccaaaatcctaggaaatataaacaccccgccctctcccttctctgaccctgctggacccagcccagaccccagaccctccacccaccctggccagttccttcaactcctcagtcctccccgctgctcgaggaaatcctgccgggcagtgagcccctaaggcgcaggccttccacaggctggggcgggggcaccctcttgccagct

SEQ ID NO: 103627 - DNA, 1070 bp, Homo sapiens
atgatgcatggatgatggatggatgaatggatggatggatagatggatgatgtatggatggatgatggacagatggatgatcgatgggtggatgacggatgggtggaaggatgatggatggatagatggatgatggatggatgatggatggatggatggatgatggacggatggacgatgggtggatggatggatgatggatggatggatggatggatagacggatgatggatggatggatgatggacggatggatgatggatgggtggatgggtgggtgggtagatgggtgggtggatggatggatggatggatggatggatggaacagtggccatatagaccagtagtcagccaaaccaataaatgggtagattgacagtttgatgatagggagattgatggttgcacaggtcagtagatgcatagataaatgggtagctgtatgaatcaatggacagacggtgattggagaccagaagatggatggatggatggatggatggatggatggatggatggatggatgaatggacagacatacagatgtaaatacagaggggttggtgggtgttgagaggagaagctagaaacttttgctgaagcatgtagcaggcctagactgcctttggtgtccctccagacactcggctaggcctgccctaccttcctggcactgctcttcgtcgctgccgttgagacaatcaggctgcccatcacagaccttgggcagtgagatgcatgtgctgtcctctttgcactggaatgtggctctgcaaactgtgtggggacacagagaggggacaggtgggaggaagccagaggagccagccggggcttggcgatgcctgtagaaggtgtgctgtattgcacgttaccaatcacaaatctctttctctgctactttatttttatgtctcgctcttgtcacgaaggctggagtgcgatggcatgatctcactgcaacctcccaggtccaagcgattctcctgcctcagactcccgagtagctgagattaattacaggctcctgctaccacgcccagctaattattgtatttttagtagaga

SEQ ID NO: 103628 - DNA, 1032 bp, Homo sapiens
ggatcaccatcaacttcacctcccagatctccctcaccgggcccggtgtgcgggtgcactatggcttgtacaaccagtcggaccgtgagtatgggcagccgggggaaccccctgcagtgactcgctgcctcttggccatccctggaaccaccaagggggctgtgggcagctgcttatgaggctgaacaaaaggagagagagagtgtgtgtgtgtgtgtatgtgcttgcacaaatttatgcagctttgtgtgcccacgtgtgcaaggcagccacaagggtttgcaggaatacacactcatacatatccacgtgtgtgttgtgtattctgtgtgtgtgtctggatatgtatgtctgcttggactgtgtacacaggtgcccaggaccacgtctgtgggtgcctgtccatgcgcgtgtgagtgaacaggtgcatgcgtgtctttgtgcgccttcgcggctacgcatggcctaatggcgccctgcctgcctccacggtcccctgtggttttgcagcctgccctggagagttcctctgttctgtgaatggactctgtgtccctgcctgtgatggggtcaaggactgccccaacggcctggatgagagaaactgcggtgagtaacccgcccgcgcatccctcctctccctgcccatcccttctccttcctcacctttcctgctctgagctgagtggagaccccacttctacatgcagcttccattatgagcacccaggaagtggggttctctcactgtgccggggtggcaaaatgagacagaccagcaatgcagcctccccgagaccacctcgtgggacagtggcagggagaagtggggagccaggtctcctgacttccagctcagggccatcacccccagcccctgtcccagccagccttccaggaaggaacagaatgggtgagggagatgtccccctcctctgccctgtcaaaggtttaaatatgtgggaagagggaagcgagatgttcatggtggggggatgatcctgccacggtgctgggggaggtacctcatat

SEQ ID NO: 103629 - DNA, 1097 bp, Homo sapiens
agagccccagtccccccgtcggcacatggacctgataatgcagtggccaatggtgtagtaagggttaaatgagaaaatgtctgggctggccctggtaggtgctatttaccgcccttttctgactggtcaatgccgtaggggaggtgaaggccaaatctaagggtcttcagaggagggagaagggccttctgggtgagggaagaagggaaggcttccaggaagaggtggtatttgagctgggacagtccactatacactgggccatctaagggagatgatattactcctaatagcacagtgggtgtacatcctgtgatattattcataatatcatctaagggagatgatattactcctaatattatgaggggatctcaggggtagtggaggccgcagtgtgggtgggggtgggacacaggtgttctagaagtggcgaggcctggcttctggaggtctttccgggctattattattattaacagcaccatcagcagccactcccttgtattgaggactgactctgagccagctctgtgctccatcaagaggatcacaacacctgggggagaaggtggcattagtcttgtttctagatctcaggcaactgaggcactgagattaagccagtctgaggtcagccaggttcaaggtcactcagctgctgggtttggctccaaggtctgcaagccttgctactacccaagcctgccctgccttgccctggctgggaggggcgccccaggcaattcatactggacaagagcgggctcattgtcctggggcatgtccacagaactgtgtgtgtacacatgaccagggtcatccgtgtgcctggggtgcccccacccaggcttctgcccacctctaaattacctttgtgtgaattagaaaaagccctctccctccaactcctgcaggtgcagcttgagggcatgcaggctggggaggggagtgcaggctggggaggggagtgcaggctggggaggggagtacaggctggatttccacacccacttgccccttggacaagcatccagggcagcggcattaatggggtatacgcggccagttgaagtccatgcctgggactctgttcc

SEQ ID NO: 103630 - DNA, 1025 bp, Homo sapiens
tcattttcacagcggccaaggtacatgaggatgtagcttatcgcccttttaagggactctcccacgttcgactctaagcggaagtacccgctcagggctccggaagtggcctcagagcccctcagcaacatgcccgcagagaattcttccggaggcggtcacagacatctccgtgacgcagaacgagttagagcgtcccttggggtttccatggtgctgcccttagcctgcagtatctccacttcctctcccgcctgagcgccgggaacggaaaagcaggcggccggtcccagctgcgacgtagacgccgcgtgggggtggggttgggcgagtaggtgacgctctaggcgagctcgttggcctctctatggtgccgagcgcgcccgttcggacgttgcccctttaatcggcagagggcggtgcccaggaggtcccgcgagagctgcggggggcgggggggcggtgccgaggctgggggccggtggcggatggagcccgcgatggagccggagactctggaggcgcgaatcagtgagtgtccgggaggggcgcgggccggaccggaaccggaaccgggggcacgaggcgggccccttcccggcgggggcggggtacgggtcgccccctcctcacgccccgcccccggcccgggaggggcggtgtcctcagtcggcccctcagaccctggagcgatggaggaccccggccccggcgcggtccagcggtgggagcgggcgccgcccacctgtcggatccctgggccatgacccctgggacggcgagtgagctgcgccgggaacccccgggacggagagagcagcctccaacccccaaggctcacattgcttcacggagtagcggcccggggaaggagcacgcgagcggttccccggggttgcatctcacacccgggagggagggaccctactattttcaggccccgaatcctccactctctggccctgcatggcgttcctggagcccgcaagtagtcacatttgctcattaccccgtcctggaaggga

SEQ ID NO: 103631 - DNA, 1032 bp, Homo sapiens
ttagccactcatccgcccacgtcggcctctcaaagtgttgggattacaggcgtgagccaccgcgcccggcctagtgaggtaaatgatgttattgtcagcactatagagtggcagggtggagtcttaccctgttgtgaaacacctccctccctctctaggtgttctccccaactgcctgctagggagggtactcccctcaggtagaattaagagggctgagggtcaggggccatgggccaaggaggtcagtcagatctccttggatctggaggccctggctttcagccagaggcagggggagaaagatgatgtctcatgatgccagcgcttcctcttcactggcgtctgacccaggagcagtccagaatcagcttctctgacctcactccaactcacgtgtctttgacactttaagggacttcctgttttagggtcttctggctgggtgtcattgaatgggcagtgattctctaactttagactgatgttccccagcctttgtttggggactcggaggcagagtagacagttacccttacccctgggttggggagggtcatattcctggtatccccaggaggtcaacaggggcttcatttttctgagggactagagggtcttgtggagctcctgggacagagatctagatccagagagaacattcgtccttccgatctcagctcagctctgagagccctcccagagagcagctcccgagggctccagagccctccgaaagccctcccagagagcagcccccacctcccaggctgtctgcacttctccttgctatgctttgctctgtaacattttgcaacagtctgcagtacacggggtttgttaatctgagtattcattgtttctcttgctgggcagtgaacttgaggagggcagggattttgtctgttcactgctggagccccagcacccagaatacttaaatctgagttggatgaatggcggccagccactgggattccagggctttgggccccctgccataacatatggcccagggcaggcgccacatgc

SEQ ID NO: 103632 - DNA, 1024 bp, Homo sapiens
tgagtgtcagtttcttcacagttgaaggaacttcccacggtgaggcgggaatgaccgtgctgcctgccttatgcagcttaggcaggaaagtgcatgtgagcctcctcacacatgaccagttcagcacatgtgagctcttaccgtcactggtgacgggtcttttacagtctgttagatgatgtcaccacctccaccatgaagctgctctgatttgccacagcagaacgtcctttgccaccttgagttcccagggaactgtgtctgcccgtctctcatggcatattgtaattgtctctatggcaagccaagccaaggacgtgacacatcagagttcttaggccagcccaggagctgagctcataccttttgaaggtccctgcctgcagtctctgtctggccctgccctgccacaatctcaggccataactgatctggagagggagctgggcctttgcatatgcctgcagaaaccttagagggctgaagtctcggcggcgggctggggtggtgaccctcccctagggcgaccagggccccttggaggagggctgcagtcccagcggcctggggtcgtggccctagggtgaccgggactccgtggcgactctggctctgtgttgttcctcccacccaggcctccactcgccacccggctgctggcccacaagatccagtccccacaggagtgggaggcgatccaggccttgacggtgagaaggggagaggccaccatccgtcccccgccatgtgacgacaccaagggaggccaagactgaggttcttggggtccataaggctcttcagagcccaagagagttgtgctaagatggcccaggatggaggtccgggcctgccccaagggtcccaccacagccagcgggctggcctcccaccccagcatccatacacgtaggcctgttgctgagggaaggccctctagggtcatctggtccaggggttctttgcttcagctgcacatcggctgcctctccaggaagcgtgttcaacacatggaatcagggct

SEQ ID NO: 103633 - DNA, 1030 bp, Homo sapiens
tggggtgaacttggctgacagtattccagggcaggcagaggtcaggctggctggtgacctgctgcctccttcccatcggcagctagttctagggccatccacagggatccccagccctccatagtaccagtgagcctcactggcatgtgccagggccaagagggccttcagcgtcgcctccagtccagccctgtcctcgtattcttggggacactgtggctcagccagcacagtgcctagcccacagtcacccagcaggcgtccctcgagtgggccagtggcaggcacagagctgctctccccttgcctggatgcgtgaggaaaggaacctcttctccctgcagcccagccctgcaggctctctgctgccagatgacgagtgaagatgaaagtcctgatgtctattgtctgtgtgcacagagctttggagtggcctggccaggaagaggggaagcgtgtgtggggtcagcacaaggggttgccgggatcttggttactggttctgctctgctgctggttccctctgaaaatgtgggtttctcccctccgtgctgagcctcagaaaggggtagggagccccatgccagcacacatggcccctcggctctctggcctctgcagggtcagcccagctccttcacctctctcctgctttcccctcaggcctcagtgaccccacacccccttcaggcccaagcctggatggtaccggatggaacagcttccaggtaggaggggaccacaaactagtctggcctgtcccagtcccagggtcagggcagctgggacaagtggcctggagaaactaaaaggatggatgggctctactcaagagcccagggccagggggtggcccaggggcctggagacacccacccagggtacagggcctccccttacctccagctgtatcttccccaagtctcagccttggggctgcagcccagcctttgggattgggattgagatgggcaatccctcttcctttcccttgagggtgacagaggtccctggattgtagaacccccaa

SEQ ID NO: 103634 - DNA, 1057 bp, Homo sapiens
gcagggccagagcggggcagacatggacaagcgggtggtgagtggggggtcccgggaaggaggggcctgagcaggagacttccatccaatggggaagcaaggtcggggctggggtttccttgccagtctgagtgtctggcaccaagggcatggagactgctctgttccaaggcccctctggcactgcactcaagaggccctataccttccccatcacctttaccccacttccctgtgcaccagttcccataagccaaggccaggcttctgacagcacctgaacttctctgtccaatcagtgcgcaagagcaggctgtcaatggggcggcctcagagggtttcctgaaggaggtagcaattgagctggcttttgagggatacacgtttattaatcaagaggcagcgtttattggctgataaccgccagcttgttactaacatatgagtgcactgtctcatggaacactggcacaaccctaggggcaggcattgctttacacatgaggaactggaggctcagagataaagtcacttgtccaaggtcacatagctagtaagtggcagaactgaggtttgaaccctggtctctgatcccagagcaggcattccccgtaactccagatggggtgggagtgtggggccatgttttggaatcagttgacaattcagtgtggccaaggcaaggaaattgggagccatagagcgtttgaactcagcggtggctaggtcagccatatataccctgggacaggggaaagagctcccgctcccattctccctccacctgtgtgacctggggcaagctccctgccctccctgcatcttagtttcccagtctgcagtaggacttggtcattccttcctgcccagtcaagtggcttctgggaagaggaaagggcacgccagatggagaggggctccatccatgctctcagggaaatgtcacccccaccacgccttgtcatcttgtttccactctcatctgggactgtggccctcctgggttccctcctcccctgccccaaggggctggcctggtgctcaggcagggtggagg

SEQ ID NO: 103635 - DNA, 1032 bp, Homo sapiens
aaatcctagaatcccatgtggtctgctgtatggaggggacacttggctctggacatgcaacagggcaggtgaccagctcaccttgggatcatctccaggctcagtcaggcaaccaagaattcaggcagcagtcaaggcctaggaggcagcccgggtagtcacagccatacgaccatggccaacaaggtggagacgctgaaggaggaggaggaggagctgaagaggaaagtggagcaatgcagggtgagggccatgggggtcccctggatatgtaggggtggcaggggtgggtcctggcccatctcacaggcaaggaagctgaagttcagagaggtgacatgacttgcctaaggccacgtggctaggagccagcagagctccgccattccctcgtagcctcttctgtctgtaccccatgcataacttgggaaggcagagacttggtctgttccctgagtctccatgtgtttgtttgctgagcgagcgagtgaatgaataaatgaagagtgaatgaaagaatgactgaatggtgaataacaggtcactgtgcaaggccaggcgcggtggcttacgcctgtaatcccagcacttggggaggccgaggcaggcgaatcatgaggtcaggagttcaagaccagcctggccaacatggtgaaaccctgtctctactaaaaatacaaaaacttagctgggcgtagtggcgggcgcctgtaatcccagctactcaggaggctgaggcaggagaatcgcttgagcccaggaggcggaggttgcagtgagccaagattgcaccactgcactccagcccgggcaacagtgtgagactccgtctcaaacgaaacaaaacaaaaaacaaggcactgtgctaagtctatggagacacagagatggggacgagaagccagaaaagtttgagggagttcccaggggctggccccaagcaccaaccttggcagagagaggagcctggctgggaccttccacctgcagttgtgtggcctgggggaggtcaccaacccttccaagcctcct

SEQ ID NO: 103636 - DNA, 1089 bp, Homo sapiens
tatctctaaaagaagaggaaagaaactgagactaagagaagggaagtgagctgcccaagaacagatatagtgagcccctccacctcctgtgtccccacacacctgcctccatcctgcctctgggaattggtgtttcagccctcacaagtagggacagtcctcgcaggcttcccctccaaccctccaaccgcaccccaatgatgggtggggcagaattctgccagcaactctctggcagagtgatagagcgcgggaacctgaatttggcctttgtgacaccgacctccagggcagtcttcactgctgtcatcttgcgagttcagccctgcaggggaggcagaagcaaaaggaggctcctccattgtggagggtttgcgttagacaagagcaggtggcagcagaggctaattggcagtggtcagtgtgtgtggacaggttaatagcccagtcagtatactggggccgtggacagatctctgtcactccgtctctgttggccactgacccggacagtcattgatattaaatcctgggggtacaggatggtattgagtggagagaagtagacacaggattatggtggggtggtgagcagggcctagtgccaggggcacctaggaagacttcctggaggaggcatgatgcagggcagtgataatacaccaggagatgtaaacccagtgttatggcatggcagagagggattctgtagtccttggcctctcctggctgtgctgcacacctgcttggtatgtgggcgggctcacctcagcctcagtttccctataagtctgtgttgagggctctctggtcagggctgtcagcggcagcagctcctgcctgccttaggctatgctatgaaaagtttttcccaggaggcctcaaggctcaggttaaggctgtgggttaagaggttccccagggctcaggaaggctggttgtcaaggagctagggagaaaccaggccctgcccacacctgccttgcaggcgtctgtggaatccagacccctttggtctcagtagccacctggctgtgcccacccatcctgctgtcactcccatagcctagagggggaggcagaggctta

SEQ ID NO: 103637 - DNA, 1048 bp, Homo sapiens
gactcccaaagtcctgggattacaggcatgagccacggtgcccagccagcttttctttttttttttaattttttaaatatatatgtatatttaagtagagatgggatctccctgttgcccaggctggtcttgaactcctgggctcaagcaatcctcccacctgtgcttcccaaagtgctgggattacaggcatgggccactgtacccagccataaagtgactcttaatagtaccttcctttaacaaccagctcataaaattcctgcataggaaacaatctgtactcccaggtcagagctgggttggacccacccgaatgcaaatccttttgctgccacttatgaagctgtacaaccctgggcaaattacttaatgtccctgagccttggcattctcatctgtaaaatgggcttccagaaacacccagcacaggccaggcagtttagaatgtgcttagtaaatggtgattatcatcatttgttcagggacattagcatgaaggccgaatgttctggcacaaagacacgtctgtgggacaggcacagtggacttattgtgtgaggcaggatggtactgggctggaagacaggactgtcctttagttctaaacagtcctcctattgttggacactcgggagtgttccacagtttggcttatcggttactgtagccacagacgtcttccagcctgcagctttttgtctccagctggaattctcttcttgtgatcactttcccgggggacgcggactgggtcagaggtgcgaacatttctgtgccccgctgtgttccaaaggggctgtgccagtttctaacgccagccgcgtgaattcctgcagcagtaaccacaactgctatttgttaagtgctgttccatttacaaagcacttgcccctgtgttgcccagcgcccgtttggaggtaggcattacttggattccgctttctcaggagtccggagaaacttggggtggttgagtggtttgtccaaaggtccacggctgtcagggtgaaatcgcgaacctcaggcaggactgaccgagccaggc

SEQ ID NO: 103638 - DNA, 1031 bp, Homo sapiens
ggtggacggaacttcggtgcgacgctaaagtgtgcgcccgggaggatgagtacgctacacccggaagtgtcttcagggagaggaagccggcggcctcactgctatgggccgcaacaagaagaagaagcgagatggtgacgaccggcggccgaggctcgttcttagcttcgacgaggagaagaggcggtgagtggcaaagccggaccggactcccctcgagctgttcttcgcggccaaggccaggtctggggccgagcacgctcccgccgggggctcttccggtcccgccccctggcgtggctagagaacccctctcggccttccagcccgcgttcccgcttctcccttctcggccgccaccttctcccttcttgacctccccacctcgcctagtgtctgtgcgccgccagatagccggaagctcgggtctcagagcagtggcttcgaccaccctagcccagcccagtccatcggtccggcacacagcaggcgcccagccgtggttgataaatgatgagccaatgaaatgagagtggcttaagttcattcattcgctccctagacatttattgggctcctttggtgtgccaggtcccgtatcaggaagcagaacctctgagcctcagcgtctggccagataaataaatggcacatggtagcgggtcagcgaaaagcccagtgctggaccgtgggacaaaatgggaacagagcagctagcactgtggagatgagaaggggctgagattagaccgagggaaggaggtagggaaatgctgggcatcatcaggaaactcctagcgtgcatcaacaggccctacaggcgagtttagggtcaggtgtcctggggacatgggtgttggtccagtgcagggtttccgaaggtctggatggtggtggccctgaaaaccctgttgagagagtaatgaggtttgtaggtgtggaaggggttacctcatgtactgtgtgtggcccccccccccacccgccccacagcctggccctgttgcctgaacctgagatccctggagagt

SEQ ID NO: 103639 - DNA, 1031 bp, Homo sapiens
aaagagaagcccactcacgagcccccctgagaactggggaggccccgcagagtcctcacaatcctggcactctgggacacccactgctgtgggctggggggcagagggagcgtgtccatacccgcgtggctctgagaggcgacccgagcttgactggagggatctgcttggccttctccgggcaccaggagagggggtctgggcccgtgtccccagcctggactgggagggcctcttggagctcctgcaggccaggctgccccgcaaggacccagctggacacagggatgacctggccagggctttagggccagagctgggtcccccaggcacaaacgatgtccctgagcaggagtcacacagccagccagaaggctgggccgaggccaccccagtcaatggacacagccccgcactgcagtcccagagcccggtccagctgcccagccctgcctgcacctccacccagtggccaaagatcaaagtgacaagaggaccagcgaccgcaactctggcaggcctggagcagacgggccccctggggagcaggagcactgcgaagggccccagcttgccagagctgcaggtaaggaggtttccaccctcccaagggtagccagaaagtcagccccactcagccaagtctccttggaaaagcctccccttggagtagcctaagctcctgcatccccctccaggctcagacctcagcctccctgctgaccacaacccatcccgatcaccaaactggcccaacaatgatgatgagcaacacagttttaagcgtttatgggccaagccctgatctgaatgtttgacgtgtgcttttcccatttagtctccttagcaaccaggtgagaaatacactatttacagataaggaaactgatgcgcagggtgaagccacttgctggtggggcatgggcaaaacccaggtctgctcagtgcagaccacactgaggcctcaagcaagatgctctggccagggcctattcccctcctggctccaccatacctggtttatgttgtgt

SEQ ID NO: 103640 - DNA, 1101 bp, Homo sapiens
tggaggcaggggagtcgtcccaggttatacagtcagtggctagctggactgggactagaacccagggcccaggaaccacccagcgctctctctgcacctccacctggcacccatgctgcccccgtccctgccccgatttcttgcgtggcttcgaacggcagtgctgtaacttcgagcagtccagtcttcccatctgtggaatgggcggggacaggggacactggtcgctaaaggcgctgccagccctcccagggactctgacaactttgctcttcctctttctgggttatttcttcatatcctggagccagagtagtgaacgaggcggaaacagcaatgccggggtgcccctctagtctccatgaaacgggcccggcccatcaacgtggaaaatatctcaacctacccccacccctaggcagccttgactggtcagaactgataaccacctcattcatgcattctttcacacacacttagtgagcaccttctgtatacccaggtgtgggtcacaggtgagtcggagcgccatcaaagagttcagtctagtgagatggttgcatgcctgtggtcaggactgtgatggggaatgtggtagcagggtcgggggcacccctacccccaaagccctcctggacctgtgctttgatgcttcaagttccacttccaaagagtctgcagattccagagcgaggaccctgggctctctcctaccttcccagtaacccatgtgtggctttggacaagtgcctctgcttcacaggggccttggtttccccaacgaggatgactccaaagagggagcatttgggggctctgctaggaatgtgtgtagaagtccacaactcattccctttgcttaagctggggtcacaaacctaacgccctgaaggccaggcaggtaacaatggtgagaaggtgggggggcaccgagggcacttgtgtgactcctcggttccagatagctgttgccatggggaagacgggcccagagtttccacatctttcgatatttcaagaaacactggagatatgtatttatatgtgaaatctctaacctaatgtgaaatactctgaaaacactatgtgggcagaaacata

SEQ ID NO: 103641 - DNA, 1035 bp, Homo sapiens
ggaggatcactaggtttctccttgtacagacacgttcagtcctgtcggaagctgcgggaggggaggaccgccccgtcatttgccacatcaggcagccaggactcagagaggggatgtgacttaggaaggtcacagtgactccacttcccaggcagccctagaggttccagcctgacagcttgtcattcctgccccaatctcccagccctggcccagggactttcgcctgggactgcccagtggtgccagctctgtgggcccaggaagcctggctcctccgggctaggtgggggtaggggagatggcccaaaaagcacagaaatttagaccagggggtagatatttcctcagcaagtttttcctgagccttgctgtggtcaagccccctgcaaggccctggggccacaggaggtcccagactgaggggaagtggagccaggtgtggtcaccaatcttcattcttagcttgggatcgccctgggcagcctccgtctcaggtggaagacggggtgggcagaatacagagcagcgggacaaacgcagccccaggggttctcggccgtgagcagagcctgtgtctctcccttagacaggtatacagggaggggctgggatgccaacctactgggtcccccgactgtggctgtggaaggttctggatcttcagctgtcccaagccccggttggtccacttcctatacctgagaaggggctccgtgggtggagagtgggtcgggagaggtggccaggcagggtggctgtggtttccagctgccactgtcaccgcccactccactgagccatgccacccgttctctgcaggcaaccagacaccttggcctggtgaggcctcgatgtaggggctgataggtaggctcagagccatggcaaccggtggccacctcctccctgccggcgccaggagcggagactgcagagggaccgggacttagatgagagaggtctccccagcaggaagggagggtctggtggttggcacccactagatgagcatggtcagaaaaatatcaggat

SEQ ID NO: 103642 - DNA, 1127 bp, Homo sapiens
agaaggaaagggagggtgtggttacggaggggaaaccaatccatttcacagatgctacccctgaggctcagagaggaaatggaggggccaggtctcaaattggcattttccgcctccccacccctcctgtgtgcagcatagtgagtttggcagccacacaggacacctgtacaatcacacacactggctctttcattccatcctccttgcagcctccctccccctcgctcaccaccacctctacttcgcagtggaagaaacattggtttgtgctgacagattcaagtctcaaatattacagagactccactgctgaggaggtgaggccatgggtgtactgatgaacccccggaagggcctggggtggcctggctgggttcactggggtgggtcacaccagggcccacacggaccatagtgggccctcttgctccaggcagatgagctggatggtgagatcgacctgcgttcctgcacggatgtcactgagtacgcggtgcagcgcaactatggcttccagatccacgtgaggctgtgtgcagcttgggggctggtggtgggcagcatggctggaggtccctgggggaggttttggtgttgaacatggctcaccatggagactggatcccttcactcatttacccagaggccctatcttcagagccagagctgtgatgccaacacttagcatatctgggggagacgctggagccagcagggctcttcccaggccaatggaagggaggttttgtaccccctgcccaccccagactcaagaccttagatgcatcctgggaaggaagggccaccctccctggggtccatagtggggagggagtcatgcggctggccatgtggcaacctacccatgcggtggccttgcagaccaaggatgctgtctataccttgtcggccatgacctcaggcatccggcggaactggatcgaggctctgagaaagaccgtacgtccaacttcagccccagatgtcaccaagtacgtactaagctggactggggccttgagggaggcacttacccttgcgtccccgagtgggtttctaggtactcacctgagggctgcacctttctgggccctcgtttctctgtcaacaacatgggaagagag

SEQ ID NO: 103643 - DNA, 1073 bp, Homo sapiens
gcagcagagtgagaccctgtcccttgaaaaacaaaaacaagaacgggggcgagggaagccgggcatcctggtgggtccctgggctgtcaagaggtggagctgggatgttcctggggtctgttaaccaggaagctcaggtcgggctgcttccttccctggggtctgtctccagcccctggcacagggcctggcacacaggtgtcgctccaaaagtgctcattgtgggactgcaggggtgaggacccacctgacgtggctctgctggtgccctaggctctcggactctaacaaggagaacgcgctgcacagctacagcacccagaagggccccctgaaggcaggggagcagcgggcgggctctgaggtcatcagccggggtggccctcggaaggcggacgggcagcgtcaggccttggactacgtggagctctcgccgctgacccaggcttccccgcagcgggcccgcaccccagcccgcactcctgaccgcctggccaagcaggaggagctggagcgggacctggcccagcgctccgaggagcggcgcaagtggtttgaggccacagacagcaggaccccagaggtgcctgctggtgaggggccgcgccggggcctgggtgcccccctgactgaggaccagcaaaaccggcttagtgaggagatcgagaagaagtggcaggagctggagaagctgcccctgcgggagaataagcgggtgcccctcactgccctgctcaaccaaagccgcggagagcgccgagggcccccaagtgacggccacgaggcactggagaaggaggtaggcaccacggctggctctctaggaggccccttgccccagcgcccctccagtccctgcattcatgccctggcatttgtcttgcactcctacagtgatggggagctcacccctgatctgctgtgagtgtgcaccccacactcctgcgaactagaatcttcttccttagaccttagtagtttggtttggttttgttttgttttttcctagttctgcccttagcagccatagagaagagaagtgggaagagaagggagagacctgccaggctcac

SEQ ID NO: 103644 - DNA, 1035 bp, Homo sapiens
ccgggagcaggcagccagcagccctgtcctcaccgcggtccgcccgccgccgctaaatacccggatgcgccgcccaagcgccagacgcggagctgggaaaagggaggcagaggaggcggaggcagaggcagaggcagaggcagagcccgagcccggtgccgagaccaagcgacagaccggcggggctgggcctcgcaaagccggctcggcgagctctcccgacacccgagccggggaggaaaagcagcgactcctcgctcgcatccccgggagccgcactccagactggcccggtagtcaggggctcaggagcagatcccgaggcaggctttgctcagcctccgacgagggctggccctttggaaggcgccttcaacagccggaccagacaggccaccatgaccgagaattccacgtccgcccctgcggccaagcccaagcgggccaaggcctccaagaagtccacagaccaccccaagtattcagacatgatcgtggctgccatccaggccgagaagaaccgcgctggctcctcgcgccagtccattcagaagtatatcaagagccactacaaggtgggtgagaacgctgactcgcagatcaagttgtccatcaagcgcctggtcaccaccggtgtcctcaagcagaccaaaggggtgggggcctcggggtccttccggctagccaagagcgacgaacccaagaagtcagtggccttcaagaagaccaagaaggaaatcaagaaggtagccacgccaaagaaggcatccaagcccaagaaggctgcctccaaagccccaaccaagaaacccaaagccaccccggtcaagaaggccaagaagaagctggctgccacgcccaagaaagccaaaaaacccaagactgtcaaagccaagccggtcaaggcatccaagcccaaaaaggccaaaccagtgaaacccaaagcaaagtccagtgccaagagggccggcaagaagaagtgacaatgaagtcttttcttgcggacactccctcctgtctcctattttctgtaaa

SEQ ID NO: 103645 - DNA, 1041 bp, Homo sapiens
aggccaaggcaggaggattgcttgaggctaggagttcgagaccagcacggacaacataatgagaccccatctctacaaaaaataaaaaaatttaatcgggcatggtggcacgcacctgtagtcccagctactcaggaggttaagtgggaggattgcttgagcctgggaggttggggctacagtgaaccatgattgcaccactgtactccaacctgggcgacagagctagaccctgtctcaaaaaaaaaaaagtttaaacttcttgctcttcaagatgtgtagcactgacgctccttctgtagctgttgaatttggtgcctcctcaatggtgactccaggtctgtttcctttctggaccatttccccagggcctggcactgtcatctttccaggcctgcccttgccccacctgagctgctgtatccatctcctctccttcacctcaggaatccttaacttctgtgccaacaactacctgggcctgagcagccaccctgaggtgatccaggcaggtctgcaggctctggaggagtttggagctggcctcagctctgtccgctttatctgtggaacccaggtacacagtgagtggtggggggttgtggggactgaccccagctgcctgcttcccacagtcagcaaggctggtttagccagctcagctcagccacagccctgggcctactgttggcctcagagctgtgcagcagaaaggctgagtgcaggcctctgttttgctgaaaagctttggccaaggaactttatatatatattttttctttttgagacagagtcttgctctgtcacccaggctggagtgcagtggcacaatcttggctccctgtaaccttcgcctaccagactcaagggattctccatgcctcagcctcctgagtagctgcgattacaggcatgctaccacacccagctaattttttttttttttttttttttgagatggagtctcgctctgtcgctgaggctggagtgcggtggcatgatcttggctactgcaagctgcgcctcccaggttcacgccat

SEQ ID NO: 103646 - DNA, 1049 bp, Homo sapiens
atgtcgagccagcagctggatgagcatggtctgctctagccagcagctcatgttaagcgccacgggcagctgcggggtgacgtgtggcagtcggtgtgctgcacccggcggggccagaacagagggcccaggtccacccagaccgacgtgaggcggcacgaggcgagatccagacagcggcgcagaaagtgcgtcgccgcccctgtggctcccaggagccgccgctggcgttgccctgctgcgctggcagcgccgcgaccccctgggctagccgatcgcggtagggctccacgccgttggccaacccgcggctcagcgtgtcctgctgcaccagcccgggtccgccgccgcgcttcttccgcagtcatccagaaggtgtctgtaggaggcgcagcagccgctctgggtgcacgtgtttcggcttgggcgcctaccggtagtcgccggccgcccacgacaagctgtagggccacgcggggcgggagggccggccgtggaccagctgcaagtctgcgttctgcagaatcagaggctctgaggaccgccccaagggcgcaatgtccttgttctctgcgtcgcgcacggggttcagggccgcgggctaccagaagcggcagtaggagtggatggaggtggcaccgggcgcacccaaggtctaggctcacggccgcgctctttatggccgcctgttccttcctccttccctccacctccgctctcatatcagcttagccttgccgctgctgggagctcatcgccctaggccaagaaggaccttgtgggcagggggctcccaagggccaggagtgcgaagtcatgaatctcagatgctttccagcccgttccagggttcaggcatgcacattcgtccaggcttctgggagtctaagggtgcgttactttcacgcagtggttgcaggtctgtcaaagtttctaaaatcccaccaagctgagtctcgccattcagggatcataagagtctacaattcctttgcgcaattcaattctgaattcaattcagaattaattcaattctggccgggcgcggt

SEQ ID NO: 103647 - DNA, 1909 bp, Homo sapiens
tttccaacagtcttgcctctctcccctccaacgcacacttttctaggccctgagggtatgtctgagtacaagacagacgagattcctgacttcctagacttgggagaagggtgcaaaacagataataagtgaaaaataactttaagtcatggtaatatttttgaagaaacagggacaacgagattgggagtgacttgagatgtttgtatctctgagtattcaaaagggaattttacgcagacctgagtttagtttctggggtggtcttgccatttcgttctatcatatatgtgggtttgagcatactctgtatttgttgtatccaacctccaggagatccaaagcaggaccttgcttatgaacgtcagtatgaacagcaaacctatcaggtgatccctgaggtgatcaaaaacttcatccagtatttccacaaaactgtctcagatttgattgaccagaaagtgtatgagctacaggccagtcgtgtctccagtgatgtcattgaccagaaggtgtatgagatccaggacatctatgagaacaggtatgggctactggctgaaagggcctctttctgggtgggactggcctggtaatatagttcctacaaatgaggtgagcactctgtaaacagtactttcgggggggttggggggtgggggtctttgtgagtccttgaggctagggacattttattttgttagactttattttatttatgcatttgtttattttttgaaacggagtgtcactctgtcgcccaggctggagtgcagtggcaagatctcggctcactgcaacctccgcctcctgggttcaagtgattctccagcctcagcttcccgagtagctgggactacaggcatgtgccaccatgcctagttaatttttttgtatttttagtagagacagaatttcaccatgttggccaggcgtgtgttgaacccctgacctcaagtgatccacccgcctcagcctcccaaagcactgggattacaggtgggagccaccatgcctggcctaatttttgtatttttagtagagacggggtttcatcatgttggccaggctggtcttgaacttctgacctcaagtgatgtacccccgttggcctcccagagtgctaggattacaagcgtgagccaccatgcccggcctgttggactttatatcctcagaaatttatacaaagcctaaaataatatcactattaacaattataataataatgattagcatttgtttttattaccaggatagatccatcaatgttcagtgtgttgtttgtgtttttactcatttacccttcacagtaagcccatgaagtagcagtttttctcattttacagatgaggaaacagcacagaaataagtcatgtagctagtttaatggatgtgctgagatttgaacctgcagtgtctggcaccaaagcctaatttctaaactgtgctatgcagcccttcagtacatatcagagcaagctgaactccgcaggttttgaggggctgccgttgtgtaatgagcgttagagataagataggtcagtcaaagctgggatagtcaggagtgacttcaccaaggaaatagaatttaagcaagtcagaaggatgagggagagaaaacaaatagccaaaggcctattgatcaatgaataggatctctgacatgtgttttctttttttgttgttttgaaagagctgattgtagttgaaaagcagaggaaacctcagacattgcatggttttaggcctcacccctgccactctcgtgagcctaagttctacttggtgtggactccaaggtccttcccgcccctgcaagccacccattaggttgagctgagagatcagccaatgggaacagagtcacttatgaccaagaagaattgatctgggggttagttagtga

SEQ ID NO: 103648 - DNA, 1039 bp, Homo sapiens
agggcatcaggagaagaaaattaaacaacctgttgcaggtttgtcaagtagcagtgtttggattggataggcagcagtgtttaaattggatgctgtaggtctgttgtggccttggactgcagcagactgatttgcttctgtgtttagagacgtttggatgtgctccaggagatggaaacgctgtgttaaagaatggtggccaaaaaagtagttcttatagcagaaaacagcaagcagttaaatatggctatagttaatgatacagaggcaggagattatcctgaaaagcttgatgggtccctaactgatacaaaaacaatattttcttgtgttgagaaagattgaagtgtggagttgggttgaggacagttgtgggcttgaagggctttggcctcagctctgtttatttgacatcttcccctttctaagcctgggtcctcatctgtaaaatgttaggattggcattctccagtccttttggaattttagagatttttttcttgatttttagctggaccaagctgactgaaagattcttcaagaatacaccttggcccgaggctgaagccattgctccacaggttggcaatggtaggtgtgagctctttatatcttgtgcactgagtggaatccagtggctgagtcattagacaggaagctcaagagggtctgtgtctgttttgctcaccattttgtttccttggtgcttggtatgtagtaggtccttggcaaaataacttgtcgaaggctggatgatttaagagaggacagagatctctcatatatggtgaaatttagatctttgtactgacttgtttctatttccttctataatttgggggtcattacagtcactctggaataagctctctagcttcccacctttgactttcttagatgatgtcctttatatatgggtgaggtaggcaaatccaacttcattattttgcttgtggatattcagctaccctggcaccaatttatttatttatttattttattttattattattattttttttgagatggagtctcgttc

SEQ ID NO: 103649 - DNA, 1047 bp, Homo sapiens
gtgttgcccatgctggagtgtagtgtgataatggctgactgcaacctgtgcctgctgggctcaagcgatcctcccaccttagcctgccgagtagctgggaccatgggtgcgcaccaccacgcttgtctaattactcttgtgtgctggtttttttatgcacttggatggcagaagtctctaaatggtgaaaggaaatagatctgaatgagatcttaatctcatcgacagagattgaggttgatggagtcaaatgagaagtggattttctcattgcatgtattcttggggcatatgcatagcaatttagatgttgtttagtcttcagaattacctttattcctccccaccaaagagctaaagctgccaggataccccagttttatggttagtgaagcacccttctgccatctctttcagatgctgtcttcctgattttatacaaagaattatactacaggcacatatatgccaaagtcagtgtaagtatttaagtgtcgcagttttttttttgtttttgtttttttaactctgtgctgtttttgtccctagaacacagtcatttgtttatattggttcagtgtctgggcatgattggcatgtttttgagttttaagaagcggtggaaggaacagtttaacccagaaagctgttcagacacactaacgctatataacctatgcattcttttaaatttctctgtccccacaattctcctggactgggcaatcacccatgcactggttataggctgccagcctcataggatatttccaggtacctgctgctgcttctgcttggggttctttttcccttcagagcattgagcctctgtttctctgagatgtacataacactgtcactgtatgccaagcacaatgctaggcacttagcacacatcttcacatatctaattctactatcaatcgtgcaaagttggtacccgaggtgccaagaggttaccttttctcaaatttatccagctagtaagtgacaaaactccttgaatctagaccagcttgttataacaccagtattctacacattatc

SEQ ID NO: 103650 - DNA, 1040 bp, Homo sapiens
cccagagtgttgagattacaggcgtgagccactgcgcccagctatataatcttacttcattgtgactagtcaacaatcttttgcccacattttacagagattaaataccttgtgagaaccccacagttaataagaggtgggactgactccaaagttgtgtttcttctccatcacaaatacattgctcatggtatggttccccagctcagaaactatcagtggttctcagatgcaagcaacataaagaccagaccaggggtcagccaccttctctgtggagggtcagataataagtattttagtctcgagggccatgatggtttctgtcagatctgttcagctatgtctttgtggcagttatcaacaatatgtaatgagtgggcatggctgtgttccagtaaaacttctttatttacaaaacaggtggcggaatagatttgcaggccccctgacctagatgcttgtttggcgttggaagactgcaacattcctggcccgtagtctagtgatgcccggtgcagcattatcttctcttaactccctagccttcaagtgccacgatttaacttcttcgcctttgctagtgtggtttttttctgaaacacttttccttctctctgctttgccagatcatcatccctgctctgagggtcatttaaggtctgttgctgtagaacctaaccacgtgttgcagtattcagtgcgtcagctgctataggactttctatcttccctctcacttgcatatttacatagtaagaaagagaggacagataccaattctcttgtatttgttcacagctgtcacagtataccatgggtaaaacacattaaaattaaatatctgtatcttgatatctcttgttttctttacaggggggaccttccttggagcagaggtttgaatcctattacaactactgcaatctcttcaactacattcttagtgagtctgagatttggccaagagggtgtgtgtggttatgatgaggttcagcattggcctccagcttttttttttttttttttaaattagcagg

SEQ ID NO: 103651 - DNA, 1015 bp, Homo sapiens
gcgtaccacagtctagctgcatctgaatagatggtacaagagcccctgtggtgtttctggtggcccggtcaactgcattgtgaggcccagagacaggaagtgactttgggttgtgtttgactccagattggatgtttttaccacagactacctctaatcctagagatttttacttcactgtgtagtaagtaacattcagtaatgaacagaattcacagtttagtcaagatggctttgaaaaacagtgtacggaatggtttagaatgagaagtggtcatctcaccctcaccttgccccatccagagccagagcattgcctcgttttcagcattgtggacatggatgatcactttgggcttataccactactgcatgtttcttttcttcctcaacagtttcagtcattcagtcagtaccgctgtaagactgccaagaagtcagaggaggagattgactttcttcgttccaatcccaaaatctggaatgttcatagtgtcctcaatgtccttcattccctggtagacaaatccaacatcaaccgacagttggaggtatacacaagcggaggtgagtgcagcaggccgacagccgtggcctgcgaatttccagctgcttgccatctgttccaaatgaatagatcactgcaaggagagcagatgagtcaccatgtcttaggtggtggtctgttgactctttgtaggtgcttgagtacaaacagtagcagagtatttgtgctgggggctctggggcttgggagtccattggccaacagactgaaccagcacattgagatttgcgtttgtaaacacttctgtgtctccagtgcttttgtttagataagcacttctcacacgtgttggtgtcagagccactttaccctgttaaaatattgagaaccacaaaatgtatctattttaaaaaatttttttctttttttttcagtgaagagtggcatttttgcagatctctctgtctggctgagatagctggcttctcatttctgcttctgcattca

SEQ ID NO: 103652 - DNA, 1050 bp, Homo sapiens
acatagtgtttgcatcatgcaaaattcaactcagtgggaagggcaagtaacatcttagtgttgttattaggaaaatagctttgacctcatgtgctttctgaaaggaggagtcttcgtggttgtattttactgatgagaggggcctttgcatgtgttgggaccaaaaaaaaaataagcaaaatgaactgccatcctgtaagcaaatattggtaaatcgaagattagcataagattggttttgctgtttcttggtattcctttgaagttattccccagttgttgagggaagctttcaaggctggcagtaggtgagatgcctactgagtaacattcagaggtcaggtgtgcctgcctttacctgcctcctatcagtattcacggtgtctgtctctttcaggtgaccctgagagtgtggctggggagtatgggcggcactccctctacaaaatgcttggttacttcagcctggtcgggcttctccgcctgcactccctgttaggagattactaccaggccatcaaggtgctggagaacatcgaactgaacaagaaggtgatgcctattgcctctggcccctcttgccagagccagaatatctatttctagagaaccactctgatctcttaggacaaatttccaggagaggaaagaggactgttccctcaggccattgaaagttgagactaaaactgggcaaacagctgtggtaaaaagctagacctggacgattttggtagttaacaacagttttttattttgttttcaaaatggaatgatgatggcagcttgctctgtcaccaggctggagtgcagtggtgtgatctcagctcattgcaacctccgtctcctgggttcaagcgattcccctgcctcagcctcctgagtagctgggactacaggcatgcgccaccatgcccagctaattttttttttttttttttttttgtattttagtagagttggggtttcaccgtgttggccaagatggtctcgatctcctgacctcgtgatccgcctacctcggcctcccaaaatgctgggattacaggc

SEQ ID NO: 103653 - DNA, 1207 bp, Homo sapiens
gtcgtcatcaaggttgcatcaaaggttttgggtaactcgatcctaactgtgtaaaaggattgacctgctagtgatgtgtgggacaaactggagagactaagacagaggtgccagtaaggaatccagaagatggctaaggaggatctggagctaggatggaagttaggtagatctagagggaggattggaagagatgttggggaagttcaatggctggtatgaaacaactgggtaagtcaaagatctgtgcagagaatggtgaggccagttggcagtggggacctcaggaagtccgtctcatttgacccagtaccactctccaccccatccccagattaacaagcagaatgagcagatgcatgcgctgctggccattgccctcacgatgtaccccatgcgtattgatgagagcattcacctccagctgcgggagaaatatggggacaagatgttgcgcatgcagaaaggtgacccacaagtctatgaagaacttttcagttactcctgccccaagttcctgtcgcctgtagtgcccaactatgataatgtgcaccccaactaccacaaagagcccttcctgcagcagctgaaggtgttttctgatgaagtacagcagcaggcccagctttcaaccatccgcagcttcctgaagctctacaccaccatgcctgtggccaagctggctggcttcctggacctcacagagcaggagttccggatccagcttcttgtcttcaaacacaagatgaagaacctcgtgtggaccagcggtatctcagccctggatggtgaatttcagtcagcctcagaggttgacttctacattgataaggtatgcctgtcccctgggcttggggtcttgtattaagtgttcagtatctttcattcactattgtgggcacatgaagtatatcggggaacaaaaagattcctggccttgtggtgctgccacaaggtgccaggtgtggtggctcatgccagtaatactagtactttaggggaggctggggtgggaggatcactctagcccaggagttcaagaccagcctgggcaacgtagtgagaccttttctctattaaaaaaaaaaaaaaaaaaacacaagagataaacaatagatggttttgttttggttttttttttgagatggaatttcgctctcgttgcccaggctagaatgtgatggcacgatctcggctcaccgcaacc

SEQ ID NO: 103654 - DNA, 1047 bp, Homo sapiens
ctgtcagggtggtgggctagggctgtcttctaacaaggatcctgttcaaagcttctcattcttcccctaactgaactagtaaccttgaaacgtctggccagtctgaatcctttttctgtcagatggatagagcagtgttgtgtatgggtttgttgagtgtgaagggcagataaaagaataatccgcgtgaactgtgcagggccatatgaatgtcacggctttgcacacacatagtggacacccacatcagaaacttcctttcttggcttcagaggggcagctgggaatctgacctagtgatcatacacactgtaggaaaggggttggggaaatccccgtatgtaactttgcttttctttctcttctagcttaatcgaaccctgaagaagatgggacagagaccttgatgatattcacacacattcaggaacctgttttgatgtattataggcaggaagtgtttttgctaccgtgaaacctttacctagatcagccatcagcctgtcaactcagttaacaagttaaggaccgaagtgtttcaagtggatctcagtaaaggatctttggagccagatttgtcgtctcattattgtaggagagaatttgtgggttgtggcagtaatacatttcccatgtgtcctgatgctttcaggatacatcagttgttagtgtttaaattgagttatttttattttgtgcttttgagatggagtctcactctgtctcccaggctggagtgcagtagcgtgatctcagttcgttgcatcctccgctgcccaggttcaagcagttctgcctcagccttccaagtagctgggattacaggcgtgtgccaccacactcagctaatttttgtattctcagtagagatgggttttaccatgttggccaggctggtctcgaactcctggcctcaagtgattcgcctgccttggcctcccaaaatgtgctaggattacaggcatgagccaccacgccccgcctaaattcaaaatctttttgtttttttttagacggagtctcactctgtcgcccaggttggagtgt

SEQ ID NO: 103655 - DNA, 1522 bp, Homo sapiens
catatctgcgaggcctgccctttaccaagctgggactccaccagcttgggaggtggtattagtgcttttcctgatttgcacatgggacaatgaatgctggaaggactgctgatccccccaaccccatggtcacatgggaattcagccctcagaggcggcgtggcctgctcttgcctctgcccacccatctccggcagtcagggctgcagttttcagccatagaagggcaaggctgcatgcggatgcacccaggaggctgcccggcgggaagactgagctgtctctgctggtttcagcggcctggagtggggagggaggagggggataaataaagcctgcaggccagccagctgtcccgtgctggggcccccagacaggccctgccacctctcacctttcctagtttagaaaatccctcactgcttccccaatggaggctgccccaggagtggcccagtggggccaaccagctgttctatgccagcagctccggagtatgtacatttccactctggttcaaacttgttcttctattcacggccccattaagaaaaacattcatctgcaggctggaccgggttgggatgcagcaagttggtgtggctactccgagtgtgtgacacacctgcaggggcctgtgagcagtgggagggccagacatgtggattcccagggctggtggcttcctttctccaggcctcagtgtcctcatctataaaatgagatcaattcttgccaaacagagttgctgtgaaaagaaagtaaatgagacagaggagcccagcactgcgccctgggggaggtcacatgcgggtcttagttatgtctttgccacggactccaggggtggcttcctgcagagaggcaaaggatcttaagcttgaaagcctgggcttgagcctcaccccttcccagtgatttcctagcctctgcttggatgcctccagggcccgtgatctcatgccctgccctgccctggcagctccagctctagcagcgaatgtttgctgcctcagtttcccccttagtaatccacagactcccccccagcaaccctgctgaggttgatgctggctgggacaaggtcttctctgttcagctcctttctgactctgaccccgcccctatttcccagtcacctcccctcttgaccaaccctcctccctttgcctcttgcagagattttgattcgctttccaaggacaatgtcttcgagaataaccgtttggtaagttcccggacaggtggaagcccaagaggctctgtgtatgtgtgtgtgtgtgtgtgtgtgtttggtggggagggcaggggtcttgcacggtggctgcccttgtacaccggccctggctgcacctttccccaccctctgcttcccaccagcctcctcatgcatggagcaccaggcttcccctttctccaggccatcctgtggtgcttgggtgggattaatactgaggggagcccacagtcaccccatcccactgaagggagctgggcctaggctgaggggtcgccccctaac

SEQ ID NO: 103656 - DNA, 1064 bp, Homo sapiens
gaagcggggatcgagccagagaatgatgccgccagttaatattgcgacagtgcccaaacctcccatccagacacacagatacacacacacagtcctcattctgacccagcgcctgtggcagggaagtctcctcgggagggagtgttaacacagccatggtcacaacagtacccactgagtgatatgccaaaattgaaatttcaccctaagaccctctctgggtgctcccctctccacatagaagtgggctcccggaggcggtgaccactgctttacagccgcatccgcaccggtgccacgcagaaatactgcgcgatctgggctgctggagctggcagctagcgcctctcgctactatagaaacgcgcacacaccagtcagcgcatgcgcactttccccgctctgtcctgcctcccggaagtgatttcctctgggttacggcgcaggcgcaagataagctaggagccgcgcgagtcgtagtgtcgctgtttgcgggtctccgcgcgggaccggggcgcagcggggtcgctgaggcgagggtgtcatgtcagacaacgaggacaagtgagtgcgggagcggagtggcctttgcggcaaccttggaaggggcggatgaggcaaggcttgggtcggctgaggagcctggcgtctaggggcaatgtctgaggggactggggtcctgagggggccggcggagccgaggaagggaagggcgggcgacccaggagcacagccccggctggaggcacaggagggcccaggctcgagggtccagaggggatccgtagaaaaggtgtccttcagcaaatgttccagcgagccgggctctgtatcatgcagtgggaatattgaggtgaatgaacaatcgtccctgcctctccacgtgctcactttctagaaaaggggtcacaggcccataagtaagcaagcaagcaggtaacggtggtcgcgtgagcttccccagttctagacgtatgtagtataggagtactccagaggagggtctggggcagctccaccgggtggcattaaataaaagtctgggacggtcctttgcagtaatt

SEQ ID NO: 103657 - DNA, 1070 bp, Homo sapiens
gtagagacggggtttcatcatgttggtcaggctggccttgaactccacccgccttggcctcccaaagtgctgggattacaggcttaatcccagagccacaatacaaagccaccatgcccggcctctgaattttttttttttttaatttttcttatttattttgagacaggttcttgttctgtcacccatgctggagtacagtggtgcaatcttggctcactgcaacctccacctcctgggttcaagcaattcttgtgactcagccccccaagtagctggtattacagacatgtgccaccatgcccggctaatttttgtatttttagtagagatggggttttgccttgttggccaggctggtcttgaattcctggcctcaagtgatccgcccacttcaatctccgaaagtaccaggattacaagtgtgatccaccgtgcctggcccctctttgattcttttaagtgatgctctaagtaactgatctcttcttcctgtacagttttgatggcgacgactttgatgatgtggaggaggatgaagggctagatgacttggagaatgccgaagaggtcagtattcagcctcaggctcccacctctgcagcccaagctgccaaatcgtctgacaggtgatgattagctgaatgtgtctgccttctatttgtggtcaaggcccctgccataagcattcccagttagagtgagctgtgttccagtcttgcatagcagaacagccctgcagggtgggcctgaaagcttttgtccatgtggtccacagcctgtggcttctggggcagttagttcactgacaagttaaacggtgccttccttcatttggcaaacatgtgttgaatgtttattatatgccaggtgctttctgctgggtgggactgcttaaggagcaaagggaagaggtaagcagggctcagatgaggcagtattttgtagcctaaaggcaatgggaagctactgacaaactttgagccagggcacagtccaggttacattttagaaagtacattcctgcctcgagtaaggagtgaactggggaagggcaagagtgaaaggtg

SEQ ID NO: 103658 - DNA, 1024 bp, Homo sapiens
atctggctcaggacaaatgcttagtaagtaattgttaaatattcctgccttcaccttgacttttctagccacttggcccattggctcagctcccctatctgaaagatgggaagactattcctagcttcctgcttagggtaatttttttgtgccaggacctcttttacaggaccaacattctgataccaccccatctccaggccctctgctctcttctggatgaggcagttagctctggaatctcagacctccattaccaggtctgaggcttggtcaggttagctgactttccaagcctctgaaatgagaactgtaatccctgcctcataaggttattgtaaggattacatgagttgttaggaagcagttatgtggtcccctggcatgcagtaagcattaacggtggctgtagcgagaattgtgattgttgtcattatcactctccctgtaacccaaaagtgccacctgagtctttccctcttttttgtcttggtgtccaggaaggccaggagaatgtcgagatcctcccctctggggagcgaccgcaggccaaccagaagcgaatcaccacaccatacatgaccaagtacgagcgagcccgcgtgctgggcacccgagcgctccagattgcgtgagtgattgccccttcactgtcttctccatctgtcaggccacagtaagctcttgtaccgctgatctttcccagcctggcacctgaaaacagactctctgctctcacattccaaaagtggtgccgtccctgcgtaccaggcattgagctagtcccctgccctcagggagcttgtgatctaataggagaactaggacatgaacatctgagaagtcaagtaacaatatgggagaaaaacgataaaaaaaaaaaaacagaactagatggttgcgtgtcagattagtgcagcaaaaaaggtgaattcagagccaatgtgtaccagtgtagttttttttttttttttttgagatagagtctcgctgagtcacctaggctggagtgcaatggcacaat

SEQ ID NO: 103659 - DNA, 1072 bp, Homo sapiens
taaattacttaaggacacattcttgcacattccatgtgcataataggtgcggaatgagtgaatgcccttgaattatttatattttgaaagaaagcaggcacatgcagatcaggtattttgccacattctttaaagctttatattttgggaaagtttaaatacttattaagagaggatatagggaaagttaaatacttcatctctgcccttgggaaattttcaggcttttgggagtaatataaatcgaaatatttagtaataaaattagtaagctggtagctctcagactagctgattatcagaatcatctgggcagttttgcaaatgcaggctctcaggccgcttcactagagattctattccgggggtctggggaaggacccaggaacctgtattttttagcatgctctcctgttaattctggatttgttggtgtgaacctgagctggaatcatcaggggtggcttcctagaggagatgggcctagaattggcatccctttgcttggtggtagagtccccactgtgggccaagtgttatgctgggggctgggcctccgtggtgaatcacatgtggttctgggccactaggagctcatggtctaatgtggaaagtttccaaacaagtagttacagttcaatgagattggtgccaagaaaagtatatgcaaaatgagtccaggtactgaagagtcagcacacgatttccagggtggagacatctgaacctctcgcaggtttttagggagaggaagagcttgtaagagcacacaaaagggaaacaacatggcgcatctagggaaccagaaatagtttggtatggctggaatgtggagtaaatacaggaaagtagcacgggactgtgctaggaaggcaaacagggaccagactgcactctggcctgatagccaaggggagtcatgacagtgttgtaagcaggtgagccccctgactgctggcctcaggtgaagggtggggagggctgggcaggaagggcagggcctctactgaggtgttgtgtctatagagaatggaaatgatgccgggcatggtggctcatgcctttcatccca

SEQ ID NO: 103660 - DNA, 1622 bp, Homo sapiens
atttcacccatctatacaaaaaataaaaaaattagcatagctggtggtgtatgcctgtagtcccaagcaggagaattgcttgagcctgggaggtggaggttgcagtgagccacgatctccccattgcactccagtctgggcaatgggagtgaaaccttgtctccaaaaagtagagagagaaaatagaaattgaaatgaggtgcactgggcactgaggcaaggctctggggttggagcagttagaatggtgtgcctttgcacatgtctccctttccaccaggacattctgctgtggccgctggactccggagtctgtgataggcctctgccagggaagatctctggcagtgcccctacacaccactccctactgtgcctgcctacctagaagatgacgtttctaggtggggaccaggatgccgttccaccctcactgcctgttgggcccttctccctgggtttgtagtctccctaacacctgtccctatccctacaggatgtgtgcccctgtgatggtggagctggagggggagacagatcctctgctcattgccatgaaggaactcaagtaagtcactcaaatcatggttcacttctccaaatctctgggaggcatctgttgggctctctgttgcaccctttgctcccacttgcctggctggagaagttgatgcttattcctacagatccttaggaacagctcaccaggaagtaggaggaagagagaagaggaggcagggaaagtgggagggcactgatgagacatggacgtcttctggctgttggaatttccctgttcctgctgcaggaggccttaccaatattctgtcattcttccccctcttgtctgatataaaaactttctttttcttgtaattgctttcttacaaagtacactcatcagccccaagaggctgctcctaagacttctctttgcttgtgttttgcacacaatctgttccttctgcggcagagctggggtcaccagccctcatgtacttgtgacttctcccctgccacagggcccgaaagatccccatcatcattcgccgttacctgccagatgggagctatgaagactggggggtggacgagctcatcatcaccgactgagctggagtcatcttcctgcccttgccccatgcccaattttcattctcactttatatgtgtaaataataaaatattcaactttccaacccccttcccctctgcttatctgcaatgtcaccacctgttgcttccccgttaccgccatgctgcgtggagcatgcacctattccagtggccctgtgactgtcagctccttaagaagcaccaggggcccttagcccctttggatcccccacatccttccctccatctccctgttccccagagcaaaggctgctgcaggggagacacctcagctgccttccaagcagacagacaagtctttgtgcccagggagctggttgccacggaaacccccaatttcctttccagtggggactggctgcaggggcttctcccttctcaggagtatcacagagcaggtctcatcaagccacccattgtttcctaaggacctgcttcgagcctcttatcgtgggctcggatcccctttcaggagcagtgcccca

SEQ ID NO: 103661 - DNA, 1451 bp, Homo sapiens
aagtcagcagctggagcaaggaccgagcacctgcctacccctgcccccatggctctgtccccactcctcctcaggactctgcccacacgctgtcctctgtggcccacctctttggtgtgccacacccatgccttcttcctagcctctataagatatcctttccctcctatttggggctggtgatcccctgaggccttggggacatggtgctggggtggtggtgctcctgggttccaggtgttacattaagtcagagctggagttcccccttcctctgcctgaggttctaatgggtcctcttcctttctccaccctgcttacccaacctgaggtaagaccagtcacactggctcctccctcctagagggggtcagggggagggtgtatattgacatgaacagggatagagggtaaactggctccctgaatatgccagccttaacctccattccactgccagctccccttcaaagaggaggagctgggcttccctaacctctgcaggaggcagggcctccaggcctaggtgcagcctggccctgggatgggatgtggggagtgaatggtgaggatctgcattggtgggaggggtgtccgctgccctggagaagggttaattcagggagcagtggacttcacactcccatccaccctcctccaagcctgtggaatcctttaatcaagttgggtgctgaaatttcagctctgaaatgccgcctttgtgctggcatccaggcagccgccccagagtgcgggggtcactttctcggccccatttctctaaatggtctctttgttccctgctgggctgctcagtatcagatgtgattaaagggagatggggtttgggctggggaggaggggaattgggggttaacccttaggggatagagtgcaagggaaatgggacagaaggggtgtttttcctcctgtcttcctcttcccattctcctcttttggggagtcccctgctattcagctgtctgggcctggcttttgacttctcttgaataaaatgtcccggtcaccactattggttctgttttcttagggtttgggcatagtctcttgagtcatttccagaaacacctgacccttttttaacaagtggagctcctgccttcctgaggcctgtgcacacttggaacctttggtctaagggatgcacacaacccaggtcttctgacttccttggggtcatttcccctccttccacatcctcagtgatttcccactcactctcatgagatgtggggtcttggaggtgatagtgtcatcttccggatgtgccccctgctccccactgtgccagctccatatccctcatcccacggcgagcaggagtagtgaacagaccacaaatggacaaaagtcctgcctttcaatgaaggggaaagggtgggttgtaaagattataaacacataaggttagtactgattgatccatgaca

SEQ ID NO: 103662 - DNA, 1015 bp, Homo sapiens
tgtccagaggcagcaacacatgtttctgagacctccaggctgccagaggtcccagcaggcctggaagggggtatcagccctcaccgcccccttccttgtcatgtgcagggtcagggtcacactccagcctccctcatccatccctcattcattcaataaatactaatcgtgctccaggacttgtgctgaaccttggcaagagagtgggcagcaagaccacaaggtccccatgagctcccagggagctgacagacttggaaccacccctcaggcaagcccatgtgtccccagtcagtgccagagctgaagctaaaagtccaaggtgatcctccctgggtcagtagacacccaataatgtcagccgggtcacgctgggcctgtgagggctaggagggaaagaagagtgccctttccccatcctgtaggaactttcggtcccacacagcctcctgggctcatagacacccagagacccccctcccaggccagctgatcttctgctctacagaccagagtcacacactgcctgccccgctttcccccacccctgccgctccaggactggaatggcaggcggcatcccggcctctcctgaagcgagcatgcagcccctttgccatttcctagcgaagtggctgctagctagtctcaggaaaccaatactgtgaaagaactgatgtgcaggcagtgcacagccatggggtgatttgaaagtctcgggggcaagggtccccactgtgagttcagcttggccaagggtggcagctacctccctcagccccacttccatcctccgggttctggcactcctgatagtccgccttcctgccttaacccaggccagccgctgctccatcctctctcccctttatcctcctgtcctgctcctgagtagtccgtgcttctctccttccttgctgtaggaagagtcccatcctgcacattctcctattccagcccctttagccataggacaaatcagggcctggggctggggctcagagctctgttgtaa

SEQ ID NO: 103663 - DNA, 1048 bp, Homo sapiens
agcctgacatggtggctggcacacagtgggtgctcaagaaacactaagccaatgactgatcaccaaggcctcttcccagtgtgagctctctcagccttcctgaatttccccctccctccccaagttgcgttttcccttctgagccatctgtgtgcttgggaggcagagaccatgtccttcctgcgctagaggcctggctgctccatctccattcctatggcccctgccagccttcctccccagctgtcagcaggctttgtgttagaagtgtgggagctttgcctgctaggcacggaccctccgctggccatgaggagggcctagtcatttacaaaacacctttgaacccagctgacccgagctgccaaatccccctccctgggacccctgatctttcccttcctggttctcctctggggttgcctctcccctccccagcatggccctgggcctcctgtggcttgctgagcccactgacctcccctcttctttgaatcccgacagatgggcttgtcaagaggctagaggagctggagcggaccgctgagctatacaaaggtgggtggggggtggcctcgtcctggcactagctctaccccagggagcatgctctcagcagagtggcaacaggggtgctggcactaggaatgccagcctacaaaatactaggaccatgggcattaagagttcttaagaatatatacttcttctgaatttaaaaataactcaggggcctggtgcagtggctcacgcctgtaatcccagcactttgggaggctgaggtgggcggatcacttaaggtcaggagtttgagaccagcccggccaacatggtgaaacgccatctctactgaaaatacaaaaattagccaggcatgatggtgtgtgcctataatcagtactcgagaggctgaggcatgagaatcgcttgaaccagggaggcagaggttgcagtgagccaagatcacaccaccgcactctagtctgggcaatagagcaagaccctatctcaaaaaaaacaaaacctgatactcataaaaattcagaga

SEQ ID NO: 103664 - DNA, 2035 bp, Homo sapiens
aataaacacaaacctggatggcgcagtggtcgcagtggcttcagaccctccttgtctgcccctcccctccaccgtctattgacagcgcccttgctatgcaccatttatgcctcactgaagtgttgcagggctagcactgtggtcccctcacagctggtgatttgaggctcagagaaagatcttgcccaaggccacgccctgtgtggggacacagtgggttttaactcagatctgtcctgaaggcctgactttgccacctgcctccaaagctttctgctttgtggaaccttttgtatctcaccccccgcccccttcccccgcccccaatctgtgacctttctgtgcttccgacaggaaataaacctctgggggagagaagggcagacatggagccagggcgactgagcccccaagtaggggagggtggtgaggggtaagtgctgactccaggcgcgcctgtgctgcccgggtggtggggaaaggcgtgtggggagaggtgctcgggggctgtgggaagaggggcgtggggagaggccatggggagtgtctgcagagtggcagaaacagggtggccacttctcctgcttctcctggccagcctcggcctggtgtaatcagtcatagtggcccttgtcactctaacgtgttcctgtttggacgatgaatatggccatcctgagaatgcgagggggcaacagggtgtgcgaggtgggctgagtccaggatggaaaaagggtttctgcatcagctttgagcatgcattgctgggcagaaacccaaatgggaggcttggcaggggtgggacatggaggaggggctggctgtcaccaggagcccacctgggtccccgcagagccatcagacagaccacactgcctccctgaagggggcagccagagtggaggccaagagcacaggctggaactgacagcctgggttcgttcctgacctccctgggcctcaatttccctatctgaagtgtggcacctaccttattggcttgttaggagattaaatgaacatctggagagggcttagaacagggcttggcacagagcaagcactcttaaatcttaaataaagtcagacgggccgggagcggtggctcacgcctgtaatcccagcactttgggaggccaaggcgggcggatcacgaggtcaggagatcgagaccatcctggctaacacggtgaaacctcgtctccactaaaaatacaaaaaattagccaggcgtggtggcgggggcctgtagtcccagctgctggggaggctgagacaggagaatggtgtgaacctgggaggcagagcttgcagtgagccgagattgtgccactgcactccagcctgggcaacagagcgagactccatttcaaaaaaataaataaaaaataataataataaagtcaaacgcagtcactgctctagtggtgcaggggaagccacaggccatataagtagaagccggccaggcatctgtggggctccccagaccttcctggggcctagatggaaaatgagggccagcagggaccagtggggaggggtcactatgggccgggctggaaggtgaggggagtttgcggagggaaggcggcttcctctgcaggggcctgttcaccacgctcatgattcggagggaggcaaagaaaggaggggtgtgatgtatgggaggaggataaatgcatagagggaatacatcgcgtcttgccagattcgtgcacctggatccaagtgcaggaggtcagatgtcaaagtgtgagggagatcgtgggacgctccgtggggagaaggcaggtgctgggatcagcagatgacctggctgccagcacagtgtccacagcaaaagcccctggccctggacacccaagtttatcctctagtgggagagatgccctctgggaaggtgaggggacatggccacctcgtggaaggcagcagggcccatggtgttactgagcgcctggtcccaccctccccaggaccccaggggacggagtcgtatgctcagcctccagtgagcaaggaagtcagcggg

SEQ ID NO: 103665 - DNA, 1141 bp, Homo sapiens
tcccaagtctccgccggaccctcctttggatattcctcgtgtctccgattctgaggcatgtcctccattaacccttatgtgactccctgagtgcccccaccttccatcttttcatccccctgcgtccccaattcccatcccgagaccgcccgtgtctcatctcgaacttgtggaccccagggaccccagcttcgaccctgagtttctcccctgaaccccagtctcctccgtgtgtctccctcagtatccctaacttcccgagtcaatccatctcttctctttccccgaccctcagtgcctctttaggccccattggccgtcctaattttccttcctgtgctcctctaagtgctcacttgattccccacttcacgtccgtctccacctttcgtggtgcctctactcatttctcactccctgcttctcctgcctttcctccctgctttttttccttgcctttcctctctcgcgtgcctccagacctgcccccgacatgctccctccttcccctcagcctggccaccccagagtctcccacccctaatcctgtgtccacctcctgctcccacagatgacttggaagctggtgacagggagcatgtgaccagggtgatcatgggactgggtcggggcaagcctgtgggtgtgggacagggagggcacagggcaaggggacctgtggccgtatttttaatgggctacccacatgaccccaacgaatacctccccctagcttctgggtctttccctcacctgcctcttacccgcccaacaggatgtcaggcaggttcggtttggcaacgttgaggctgcacccttgggctgaatgcattgtttttgaatgcattgtttttgttagagtttctgcctggagtttggaacctgttttctgtccaagtctcagtttcctcatctgtgacaggggaactgtacctcctgccctcgtaagtctgccatgaggttcaaaatttgaatgagaaaatgtagaaggtaaagctttataaccagtatggccctgtacaaatacatgattttactgttgggtcataggcagaattgaaaggagtggaaagggaaagggctagaatgagaagacaaggagagaaggatgagcaggaggtcccttgtctttcagtgtatc

SEQ ID NO: 103666 - DNA, 1025 bp, Homo sapiens
gccacctgtgaggagagttggggcccagccgtcttcctggcctccttcctttcctcgtggcagaggcctgcatgtgggtgccagaggccagctctccccctccatcttgggggggcggagcagttgggcccaagctgcccgggagggtgggtgcagacacaggctgaggaccagccctggccctgccccgccatctgctttcaccaagctgtctctccaccgtggcttcccttctccctccaggccaaagtgctgctgattcccactcccttggttttcgcctgcccagcgttgctgtttgcgtggagggtggggggagctcagtggcagggaatcagcggtccgtggggtcgtggggacgggaacatgtgcccgaccgctccatcccctcctcctccttaggatgcataacctaccttgtcttttttttttttaattttctttccaggtagagtagctctttgtacataaagaatacttgaaaaattaattgtatgatgtatgagaagacagagtctcctagttttgtatcttgttgtatgactgccatgagttccaccagaaagccactctattttggtctctgtgacattttaaatgcgtgacagaagtgagcaaataaagtgaggaagaaatctatatatgagataatatagattgtattgaaatctctgcctgtgggtgaggtttttccttcctcctccctgccccctgctctggctttggggtgggtggagtggctgtgggtacaggcggcttaggaaaccctctccttcctgtgtgtaacctttcagtgatgggggttcggattgatagggaccaaggtcaaggcccaggccccccttggacaaagggtctccccaacctccagccagttcccaacccaggacggccgggccgcaggcggtcgatgctccttccctgtttggtcaaccaggtccatggggcccacatgctggcagccccgctcctgcaggcatctcccaggatttcctgggatccccctttcagacgagcttcctgcg

SEQ ID NO: 103667 - DNA, 1022 bp, Homo sapiens
ggctgcagtggcggaagtgctggcgccatagccacggtcaggctgtgccccacctccagcctcaccaccaggccaggaggcagctggcacagtgctcacgccgcctttatttattggaccagaaacactcacatgtcacttccagaggaacgggggacagccaggctcgcccatgggccttcaggaatatttatacatggcccagcctgcactgcccgggcgagggcagaggacactgggagcaaggcttatgcccctgctgcccgtcctgtgctgggggcatgctgggaccagccgcacccaggccccaatgcttgtgtgtggaccagcggctgcagccttctagcccctcctccccgcgagactctcaggctgaggtcggcaagccgtggctcccccacacaccgtgcaataccctgtctgacctgggctcttcccgcctgcatccctcccctgtccacctttgtccagtgctagattcacctcaccccgggcaggagtggggatgtgggcgctctgtggtcctcccctcctgacccaggcctctgtggcatgctgcaaggatcagagccagacaccaggagtcacaggccccacccaggaagggcattcagggcccctgggcaccgcttctgttgaagcaggggcttctgggcccctgggtatccccacctgtcgtggccacacctctgcctgcctcatgccccttccccctggcctaccaaggacagcccacagcccgcactgccggctcacttgggtccttcctcgatagctttgggcagagcccttgcttcctggctgcttcagggctcaggggctcccagccctccttcccaggctgatgctgggtcctctctctctttggggcttctccctcccgtttcaggggaaaggtctgagtctccacgtttcagaccagcttctgggggaaggcagtccggcagggagaccgggaggggtggccacacagtggggagctgggaggtggggggaatggtcccagactcctctcggggccc

SEQ ID NO: 103668 - DNA, 1059 bp, Homo sapiens
agaagatgctgcgcttcctggctgtgccatccccgcagcagtggccctgtggtgtggggagtgactacatccttttcatcagggagtctgtgctcagaggccaagtgtctgcccaagctgtccccagagttcaaactcagattttgagactctggagtccacgtgctctgggctcctgcaggtcacctccatccccagagtgacctctgctgaccagaaaccctggacccaggcccagagagtagggctaggaaccagatcgggggtggacatggaggatgggaggaggccctcacctgcgccggcttcccggtggctggttccttgagcagggccctagccttgccccgggcaccaaggtctccaggacctggccctgccatctcctcagccacctctctagtgcgcagccccttgcacctgtccaccctctgcctcggggccttggtgcaagctgccccctctgcctgtcgagcctctcatctccggcacccacctgatggtcctggctcgagaagcttccttgtgtgcatctcctgtctcccgcctccatcgtgccctgccacaccattcctcccttcctccctcccttcctccacatgctcatatcacatacggcattgcgctggctgcatctcctatatgttctgccccccgccccgcgcagacagcagtcccctgggagcaggacacgtagccaccccccatctcctccatctcctctatccttccatcccctccatcccttcgtccctccatcccctccgtccctccatccctccgtcctctccgtctccttcatcctctctgtccctccatccggtacagttccgtctgccagaggcagggcttgcttcatgccttctgtgctcctcctccacactcaacctccttttccccccaacaggccaccctgcagttctgtgtggtgaagccactcatggcggtcagcactgtggtcctccaggccttcggcaagtaccgggatggggactttgagtaagcagcgggtgctccccggggtgtgtgggaggagtgttggcgcaggctggtgccttg

SEQ ID NO: 103669 - DNA, 1023 bp, Homo sapiens
ccctctctgagctttagtttcctccactgtaaaatgagtgtaatgatactcctctctagagatggttgtgaggatcagatgaggtcatggatgtagagctttcagcccggcgtggtggagcccacggcctcctgttcagggaggcagagtctgaggggatcacgcccactcttcatgaccttgcgttagtctcctctggggctccgtaggggctctgtcatgtcagcccctccagcttcgccaagagtagtcacgaaagtacatgaaacccacagccaagtcacgatggccctggagggcggggcctgctgctcccttctgtgcagggcccaggccacagggcgggcacacccacaaagcctccacctgaacatgccaagtctccagttctgcttccagaccttccttccctagcatgttcctaaattcagaatctcaccactggacctgcagggaaagagttaaaactatcctgggttcagggtggggcattgagagccattgtttaccagttggtgcagccacccaggttccggccagctgtgactcactgccttgtttgatgattatattgtctacaaaattttgatttcatgattgttagctagtgtggccttgttagaaattattccccagccctgtgggctcagatgttctgttcttgttcctggcggtggcagggagagatataagaagaaagagaacaaaagaggcctcttcctttctttaccagggcgagagagcacaccccacagctttgtcctagaggcacagagacaggcctttgactcctcagggccagtgctcaatatccagaccttctggagagattccctacttaaagtagagattcccagatcaaccacccactaccctagcccataggagaagttctggaatggagccctggaacctggcacatgtctaaagctccctgggggttctgatgtccagcccagcctgggaactgctgactggtccagggtatggtcaggtgatgattctggggcctgctggcctggg

SEQ ID NO: 103670 - DNA, 1769 bp, Homo sapiens
gtgggaagattgattgagcctgggaggtcaaggctgcggtgagccgtgatcgcatctgtgtgctccagcctgggcaacagagtgagatcctgcatcaagaaaaaaaaaacaaaaaaaggaaatggtttcgtatattgagtatattgagctgcagtccttctgggatctgcccctgggagtcccatctgcccctgggaagaaggtggttgtcacgtctattaagagagtgacccctgatgtcttctcgtccccagcacagtccttgttttgtgttcatcctggtccttctctcctgatactgtgcatttgtctctagtttgagatgtggtgtctagaatggagcagaaagttccagatggggcatgggggtggggagcggacagcctactctcattccaacgatggaggagttcctcccagaggctggccccaaggccatcaactttccagtctccaaagacaaaaccctccagagaagacacagcctgattgtccaggccaggagagagaggccctccggtccctcacgctggttgctgccctctggacttggcctgagggctccttggtcatttatgagagggcttagcacagagcctggcacaccagctgtggtagatatttagggagatgtagagtcattgtgtgtctccgaggcctctccaggggtctggtactggagccgtggtgggaagggcggtgggcagtgagcttcccggtcaagcacctccctccagccccgtctcagcttctccgctcttcttacatccacgcacgcatcttttatttgtttccaggggatgtgttgagttttccattttaaacacctttgctaagatgttggaggtggtgtttcacatggctctgtactttccaggagggagactgatgtgtccagttggtcagtggggccaggcttgggccggttgcgtcacgtctgaggagattctgtctcatcttctccaagaattagggagtccattatcgactcactaatgattgtttaaagggaactgtcagcaaattggtactttacagactggctggccccagagcacctccaaaaggtcaagaatcttgaactgagagggatgatgacatttgatgattctgatcagttgtgtgcagagccggttacggagggacctcggccacgtaattcaaaagtgtgctgactgctgacatgtgttttgatgcaggaaaggacacgagcccagatgccaagcctttcttgggagaggactgcagggatgggctctcccgggagggagcttccagatagagagggcttatgggcctggggcccctgtggcttccctggagggttttgttgttcgagactggaaagctgatagtcttggggccagcctctgagaggagctcctccagtgttggaatgagagtggggtgtcccctcctgccctgcctgagcctgttgtcatggcaggctcccctggggagatggtccatgtacgtctgtccattccttccttcagtgttgatgacatgtttgtagctgccaggccctccggtagtcattggaggtaggactgcattctacctgcaaggagtttacagtctggaaaaagcagtaggtaacacaccgtggactcttgactgtgccctcagctcatctaaggctctgcacgttcacagcccctgaccccaccaagggaggagttatcccgcttacagatgaggagattcgggcatggagcgcttaagacacttgcctgaggccacacagctcctaagaggtgggaccacag

SEQ ID NO: 103671 - DNA, 1283 bp, Homo sapiens
agcttttacttttttcctctgcttcctaaaagtagcattcattctcctaacttcctggtgaggtagctgcctaactaaacagagcagcagtggtgctgcctctgtttaccagatgggaggaggaggcacaacctgaggacatccctgcagccactcggccaggaagtgtgtccacccgccatagcgtgagggctgcgtctgtcttgccataagttaagggacggggcaaggctgcaacccaggtggcagtgatttagctcagtgctgccacagtcacagccggagtgaggtagagggaaagggcacacactgatggcccagagctgccagtgcgtgaggtcccctggggagcttgtggaaactgcatttccatcctcatccttggccttcctgtgggcaggggtgtgggctcactgccacctgcacctgcaagactgccccacaggcactgctgcatgcactccacgagccttgtgcacgcccgctggtctgagtctcacaatggccttgggaggcaagtcctgtcatcccgcattttgcagagcagggctctgaggctcaggggtaggtcacgtgcatcgggtcacagatgagtcggtggcagagctggaagcccacctgccctcccgtccctgtggacaggagggtccccagctgaccccacacctctgcccccagatctacatgcacctgcgctgctacagctgccccaacgagcagcgctacatcgtgcgcatcctcttcatcgtgcccatctacgcctttgactcctggctcagcctcctcttcttcaccaacgaccagtactacgtgtacttcggcaccgtccgcgactgctatgagggtgaggatggggacggagtggggagggctggcggggggctggggggctgggagcccctgtccccacattcctccccgaggggcttcatgaggactgtcttgacacaccccttgctgctttacctactacagggtttctgtcccaaattgacaggtaacagcacatgcagctagagtctcacctcacaggtacctggaagcaagggccctccacctgggtctcgcttctcaatgctggcgtctcaggcaggtacctggaagcaaggaccctccacctgggtctcgcttctcaatgctggcgtctcaggcaggtacctggaagcaagggccctccacctgggtctcgcttctcaatgctggcgtctcaggcaggtacctggaagcaagggccctccccctgggtctcgcttcttagtgctggcgtctcagacaggtacctg

SEQ ID NO: 103672 - DNA, 1040 bp, Homo sapiens
gggtggcgtgtgaatgagagacaggtgtggagactgcactcactggcaggtaggctgtatgtgggggaggtgggggtccttgaatttgttttctgtctgatctgcagcctggaactgagccagggggccttgtctggggaaggacagagaggcagagagattgcagaggagaggggaatagcagcagccattaggaagccttgggcctttgcctatcactatagcactgctctccaaacttccttggatcacacagccctatcagtaaaaaagaaaccagaacaaaacctcttgaacatgcacccccaatatgtggatattggtgtaattataagtgtatgttacaataagtatacacgtatattactttactgtttcagtgtgtacgtaataaaacctacaccaaaaacagaaaccaaaggccaagctaaagatgtaataaagaaaatttttactttgttgacggtacagaaacctcctgggttcatacacggggtcattttttggaacgtgcgctttcgtgatcagtgagagagagtttggaaggtctggctggcttcacgttcggcttgtttagagactgggttttaatggctgctttccctgcaaaagatcctgtctgggacaggaagctgcacacggagcagacgcatccttggctttctttctaaatcgggttactcatttttccatcccgtccactgagtatgcaaaggatttgttgaaatttggccggtacatttccatcctccctgatgccaatcacgtttttgtaaacgaaatggaaggtattttattttaaaattcttaacaagcgagtccaaaacccactaaaatgctttggaaaatttttaatggactagaaaattctgttacgtagctttttaggagttcagctatgagaggattttttttttctttttaaagtcagtgacagacatattgttttggtgcatgccagtaataccagctacttgggaggctgaggcaggagaatcacttgaattctggaggtggaggttgccgtgagtcgagatcgc

SEQ ID NO: 103673 - DNA, 1001 bp, Homo sapiens
gtgaattgcctaagatcctgggggaggaagcacccaggttttctggttttgagtcctgggcccttcctgctgagtagctacccccaacacagacctgcccttggagagcttgcagccacactgggaaggccagtgtattggattgctgcttagacctggaaagcacgtgaataaagcttcaggttaaaaccatgggggttccaggaggcagcagtcggctctgcctgggggtgagctgaggagccggtgctctctggaacaagggtagttgggctgaggctcagtggacagtggaggttggcaggtgaagtgcaggaggtctttgcagggagtgggaccaccttgagcacacacagaggaatgagacaggcaggttactcaaggagcagaggtctcgtgaccacttcccagagcatgtggggtcctagcctcatctccaggaggagaaagtgcatctatacacagatttgtcaatggagtttaaataggatgtgggaaaatctagattttccaaaacagtacatatttgctttgagaagaaaggtagatgcaggatgcataggttagataattttaatagcagtaacctcagagcatgtaagtatgatttgatttactggagtgcctggccgtctcagtcagtgggagcacggcttgggctgggagatgaggttgacaagggttctttctctcaaatgcttcctttggtttgctaagaggtatctcctactcggccgggggcagaagacttttccttcttttcccagtttgcagtagttgggccagatttgtggaagtgggagaaaggcctgccctgcttctacatagagttggctgtcctgacttgatactcggtgtgccttccagagacccgcctccatctcctcaactccctggcttgatgcttaggtggtgatggctgttgggcacaggagttacataacagatctgtgatggacccaggagcagagccagctgagtgaatgtcatggagtgggagt

SEQ ID NO: 103674 - DNA, 1050 bp, Homo sapiens
gtagcttgctgcagcttctacctcctgggcccaggagatccttccaccttggccttctaaagcgctgagattataggtgtgaaccaccatgcctggtcagctggaacttttttttcttttaagacagagtcttaggctgggcgtggtggctcatgcctgtaatccaagctttgggaggctgaggtgggcaggtcgcctgaggtcaggaatttgagaccagcctggccaacacagtgaaacccagtctctactaaaaaaaatttgccaggcatggtggcacacacctataatcccagctacttgggaggctaaggcaggagaattgctttaatccgggaggcggaggttacagtgagctgagatagtgccactacactccagtctggtgggtgatagaacaagactccgtcttaaaaagaaatggtcactaggagcacgggaggaggagggagagagggaggtaatgcgctgagcagttctggtgacccagagagagaattgggagatgcaatttaaatctgtgcgcttattagccctgtggccttgggcaagatgcttaccaggttctaattcctgctgtttaaaaatagggggcaaatgattcactttccttcatctgtaagatgggagtaataacagtgtggctgtcacgtggctggcctgaccaatgtctgatggagctcagcacggtacctggcacacaggacatgcttttattatgaccttacaggcccattcatttatttgagaaggaggcatcgcaggcctgtgtgccaggctgtttgcggggagccgccctcaggagccgagtgcagctggggagagagaaatcagacacacaagcaattatgattgtcctgggggctcttagggaaccttaggccattgtcgcctgggcgggcacttgtctagtgaggtgatgtgtattaaggtggaggaagaagtgggctccaggtagaaggaagagcacatgcaaagcagaggtctgagttcatgtctatggagttgtttgatactaagtctcagcacttagtagacctgaaataaatg

SEQ ID NO: 103675 - DNA, 1038 bp, Homo sapiens
gtggaaacagccccggcaaggcagggtacagctttttattgttttgaaaacgagtcacagctctgggcctttagactggggatctggtgtgggagttctggaaggccaatagctgggcccctgggagagctctgtgtggggtctgcaccaggccctgcagccccgggtagtaagcactcaccgaagaccatgctgccctgcactgtgctggggcagccctctaaaaggtggttggcagagggagcccaatgtgtaacaaatatgtgcaagacagtgccctacttgtggtggaaacagagggccctaaaggggcccagaggacaataggaacaacagtccgtttattgagcacttactgtgtgccaggcacagttcaaagcgctttcatgaattactgtatttaattttcctaccacccagtgtggtgggggctgtcactgtctgcattttgtaggggaggcagcagagagtggaacagctgagttttgaaccagtaggtctgacctcagagcccatgctcctcccccataaccctggggtgctggaagtcgtcttggccctgaaggacgaggggtgctccacctatgaaggagaaggagggcgttccaggtagagggaactccgggcagatgtggaggtctgagctgcctcacctctcagacgcagaggcttgaactgcctgtgactgtgttgggtctgtgtcctgaagacctttggaggccccgccaaggagtttgaacttgatcctgatgtcaacagggaggccttgaaagtttctggaaggatgtgacatgctcagccatgtgttatggggcagtattaccatcccttctcatccctccttcattcctgcagagaacttctggaagaccaggcctttgttccgttggctttcctacagcccctggcatcgcttttagaccccgccgcctttctcttgttgtcttctagcagcttttggtcttgaagaccctgtgtgactcagggcaggttctggagcccactgttgtaacggtgtctgccccactgctgacccct

SEQ ID NO: 103676 - DNA, 1034 bp, Homo sapiens
atccgtctccccacccgtgcctcctctccgccccgcgaggtcgcccgtgggtgtgcccgctccctttccacgccaacgtggcgggggcagctcctggagtgtaatcggacctgtccggggggcggccccgggagagggaggcggatggaccaaggcgctttgcaagagggattgtgtgctcccgggtgggtgtgctggcgactggcacggccgagtgagtgggggaggcgtccgtgccctgtgcgggtggcagtgacctgggagggtggtcggcggggggctttcggggctgcgtcgtgagtggagggtgtacacgcccgccacacaggtccgcaggtttggaaggggatcgactgggacctggggctcgaaagatgtttgcccccaaagggaccgtggagactggttttgggtgtctgtatccttcccgtgaattgtacatttcctcctgggcacacccttggtacctcgcttggatccacttacctccagtgctgggtggctccaggccaaggcaaggcagttatgctgggggttgggcatggattcccaatacatatcccctctggaggtgttgtataaggccagacgttttactcctccctcctttccagggcattttggggcaaagcaggtatttgcatgcctgatacctgtggtgaggtgaaggccatgtattatttatctgactgctggtgcttttgtaaggaaagaagcagcaatctgtgccctggaggccctgcgctgcagagtcagccaggcaaacaagctcacctgcacctgcagaggcagcgcaggtctcagaggtgtgacttcgttgacaggttatgcctacagtgtccctttccatctacctatttagcttccttggtagaacccctaggctctgcacctctgaaccttgcctagggtgctgtgcgtatcagagttgggacctgggacgctggggtgggagagccccagcagccaggtatgtgtgcccacctggacagaaacatttgatgcccaagccatcaaggagctctcaagcatgg

SEQ ID NO: 103677 - DNA, 1133 bp, Homo sapiens
tgtgtgtgtgtgtggatgtattgacctgtgtttcccaagacagcaggtgccacggcccgccccgcctgccagcccgaattcccgttctcctgtgtctactaacaaggacatgggggtgggcggtgacctccgcatccctcagagctcagagggtcctcgctgccaccggtccccccctagcccgtcatcagccggtggcagctccatcttccattcctggttttagggcagaatccatggagactgcttccagaaggcatctggctctgagttataaattacttccctggtcctgacagtcacctggggtcccccctctccctggttccacctttctgaggaggagcctggagtcagggctgggttttggattaacccatccttcctagttaacacctttttgtttttattttattttatttttgtttgttttctccgtgtgtgtgttttcctaatttatttacctctgtttcccctttttcctttttttttttaattaaagagcaaagctttttattactttgtaatttaaaaaactgaaaaaaaaaaaactgaagaactttggggggaattttgtacttttttcctgtgtaaatattggacttttttgagctttatcgtggttgttaatttgaagtaataaagtagaaaagataaagtgatgcaggcagccctttgtccacctctgtgcccttagggcctctccctgcagacccggaagtgggtcttgctgggagcagcaggagtcagtgaggaacaagccctcgccctgaaggcaggtgtggctggggccactttcagaacacttgggctgtggttgggatgtccgggggctttgaaaacacgagtgcacacaggtgccacgccacaggtgccacgcgggggtcttgtaaagagggctggggtggggctgagagcttccccctgcacactccaggtgtgctgatggcctggggcccctctttgagaagcaaggccctaaaagctcttcacacatgattttatccacacaagtatcctgagttaggtcctgttaatagccctgccttcggacaagaaactggtcctgctgtaaaatatcttgcccacagtcacagctctggtggcagaggcaagacgagccgaggtcatct

SEQ ID NO: 103678 - DNA, 1054 bp, Homo sapiens
aaggttcggcacggaggtgccacagctcgtgttcctccccaggctttgctgtggctctggctgagtcactgttggccagcctgcaaccgagtgggagcccagggtgaggaccggaggtcaggagttagagccccggtggtcccaggcctgcctgagaggcttctgggtgggaggatgggaagatgcatcttctagagtgttctaaggcaagactctgaacagtgacctcttggggtgcagagagcagagtgggactaggtggcagaggcctgggttcagaccctagctctgccctgagctgtgcaaccccgggcaggtcacaaggcctctctgggccttggtgcctcactaagattcagggatcattctggtcctagccactacttcctggagttgcttaaagacagggcccacccccacctcttggccagtctcctgggagagacatgggttgcaggaaccacaccctgtgcccatgagcaggcccccaactcagcccagagctctctcctccacagatgcggcccccttcctgccagccccctgcccttccctgtggacggccccaggatgaactaggtaacgcagtcgggcgctgcccccacatatgctcttctctggccccttctcacttcctcctgcaccaggggcggcagtggctggacagcagggcacctgggggcttagggtaccccttctgctccagctttgcctgctgggcctcttcttcctccgtggggaacgtggccccattttcttctccagctccccttgagcttctgtcccaaggcaggcggtgtctgtgggttccctgggcctcctggctgtggcctccactgcacctgccagaagccattgccaggtcccggcagggggaaggacagctccctgatgagaagagcccctggctaggtaccgggagagctggtctgagtcctagcccagccttccactagttttgtgactctgggcctgttcttttccccctctggacacccctagccagtctgctagaggcctctaaacagctttcctgctcggtttagcaaccttg

SEQ ID NO: 103679 - DNA, 1910 bp, Homo sapiens
tggctaggacagtgctggctgcagggggtctgggagcgtgggcctcacagtggccttctctatcctctgcaacaccctccagccgaattctcaacatacctcaacttctgccgctccctgcggtttgacgacaagcccgactactcttacctacgtcagctcttccgcaacctcttccaccggcagggcttctcctatgactacgtctttgactggaacatgctgaaattcgtgagtcacctggaggccaaggcgggcttgggggactggatggggaaggccctgactcagagggccagagtgagctggtggcgggaggggctcccgacagacgggaggtacgagctggacagtgtggttgacctcactggggtcccagagccctccagcctcatccgtgctgacagcttgtgccaccatgggcagcagggccaggcagggcgctgtctcccgtcggaacaaggaggatctggcttcacctggggtccctcctgggtgcccgcagcagggcatgggtggtgctggcggcgccccctgctgccctgattgctgcctacaccgtcctgctgctcctgttctgcacatcccaggtggctacctgcaccatggcccctcgggccagcctggacccagtcatggtgcttgctttcttcttggtcatgggcccctgggtctggctaggcagttgttctgtttccctcttttaagagtcccaggggtggggttgggtggggagcagcattggccggccgtacccagagctctggaatctgtgaaattgtatgtcttgtttcacatctcttctggaaaagggggcttcctcgagccaggctcagccccgtgacagccccatgacagcgaagggacctttctgtccccgcccctgtccctgtgctgggcccacgtactcacccacgtactggtaaggatcctctgaggtctggcttttccaaaatttgccacttgaccagtgagcgcaagaggctgagcctcagctgtgctttttgtccctttcaggtgcccggctcccctgggcacccagagccccccagataggccggtggaggaggtggaggagctgtccccccaaaactactggcctgtggtctggactccagggccccatttctgatgtcgccaggtgtgcctgagcccatcggggccaggcctgaggaagtgtttcttgggaggatgggatgaccccctgttcccaagagatggcagcacagtggaggccatggtggaaaaggccctgccatggggtccttgagggccaggacagcctgagggagggatggtggccactgcccacaaggggcctggtgggaacgggtcccaggacagactcatagctagaccccgttggcggcctctgtgttgaaccagaactcattaaacacctcctcttgcttcatcctggtgtgcctctttcatggcagggccctcagccaccctgctagatggttaggaccaaggctctgttctcctggaagccaaggtcggcacattggtcttgggcttctcttctctctgggtttcttgttcactaaggagtaacacagaggtcaggcagagaatgggggtctcgcaggctagggacctcagggagaggcctctgttgcccttttcagcaaggctggaaatgggatatgggcaggggacgtcttctctgacttcaccctagaccttctggctccaaatggggcccatggccttgagcacctgggaccagctctttccaccacagggcattgggcactgggcactttcttatcgagatagtcactcccacgtctggttcgtgatgggcttggccctccagctcagcacaactgcaagaatggattttgtattctctagacggacactgtccaagatggtagccattggccacatgcgacacattttta

SEQ ID NO: 103680 - DNA, 1011 bp, Homo sapiens
ggaggtggctggaaggtggatggtcgagggcattcttttctgccttccccccagtaggggatgcgactttctcctgcaaggcgtgctgggcactggcgaggtctggcctctgggcaggggcagtacttgggaagaccaggccaggctgtgggagcctggggggtaggaggtgtaagagggctgatgcccgttgtgatcccttgagaagcttcttttgaggggcccctgaatgagcatcccccaaagacatgcttgcttggctgcttcctctctggccacactgaaacctgtcctcagcctgccttagctgttccccaggtgtgtggagtgcaggctgtgggccacctgacacctgcagaatgtggtcttcgagaatgcaggttttcgagttcctggtggctctgcctggccttggtggactggacccctttcccggctccccacgtcgctgaccctcatgttcctgcttcctctgcagcaagagtgagccatggagctacgtgtggggaacaagtaccgcctgggacggaagatcgggagcgggtccttcggagatatctacctgggtaagtgttcctagctccagctggagcccctggggccagcccatgggaccaagaggaggaaagaccccaggatttggggatctgaagtcagaatgtggctccaggggcatgatttgccccagggccatcccagatggggaaggaagcagcaggttgccgggaggcaggccagggggctcctctcgcaggccaggctgggcactggagggtatttttagctccagtttctgcaggagtcatgcggttcttttgtgcctcagtgtcccgggtcagctgggtcaccagctgggtgtgggaaaacccaggcggggttcacatcctctcccctgcttcctgggagaaggatattggtagatagaagggacttgggttgctgctggacccctagccaggcccccctctctatgtcctggcctcctggaacccagcccaggcaggctttggg

SEQ ID NO: 103681 - DNA, 1032 bp, Homo sapiens
cacatagcagtcagggggtcctgaagggcttgccccttcccgctctcgttctctgcagacagccggtgagtggggagagactggggggtcatgtgcagtatatttatgtaagacacccagacagagggcacgggtatttatataacccggcgtgggtatttatgtaatataggatgcgggtatatttatgttcctttcctaacctgcgggtttcctggctgccatgtgtggtctctgaattggtgttggcagaaagtggactgaggtgttgggggggggttgcgtgcacacccccccttaccccccaacagggctcactgtgtgtgcctgcttttctttcttccgttggagtgtacacactcgggaagctggacgtgtgtgtacgtgggatgtgtggcgtgtgggtttcctgcaaacgtggactgtgttcccctggcagcgtggcacctcagctgagacaggccaagcatatgggcagcggcccttgattgagagcccagagtttggccagctctggtggaggtccctgcctcgtggttattggtggagggctggtgagctccttgggagccaggtgccggggttccctgtctctcctgggatctgcccactgtccctggaatccatctccctcccaggctggcctggttgttgggggcagcacttggcacgggcaaggggctgatcttctgtgccagcacagctgctctgcagtcttcctgttttgccctgtttgtgagtgtgggagaccaccaggtgggacagccggagccctgtcctcggcgaggctgtaccatctgcagggtggtgtgggacaggtggcatggcctctgtgagcctgagtaccctgtctgtgaaaggagttccctcttgctagtccttgatgctggtcctcttgtaaacacccctccccctgtttactgcagtccctggtccctgtccccacggcagcactgcctccaggccttcagtttcctcctctgctgaccaggaacagggtgtccggacttttgccccaggccagagcagagg

SEQ ID NO: 103682 - DNA, 1096 bp, Homo sapiens
gtccagcccccgagaagcccaaaagtgcagagatggaatccagggagggaagcgggcttagcgcctccgtggctccctatgctcagggcaagcaggacagagggacagggaggaaccaagatgggcatcaggaagcttccagaacagtgagcataggagggccggaggggcagtgttgaggggcagggactaggacctggatccttgtggctttagcttcctggtctatggaccccagtctctaagctgggccggactgggtggcactggctcagaccctgtcatcagagccacctctgctgccaccctccgcctgccggggcagaggaagtcttaggtcctggtccaggctcacctgcttctgagagtcttggggctgagtctgagtggccccgagggagcccctcgctccccagcatctcacctgtccggcttctcctccgcaggccctgcgtcttcccaggtgaccacgccggcttcaggacatgcacggacacagccgcaacggccaggcccacgtgccccggcggaagcgccgcaaccgcttcgtcaagaagaacggccaatgcaacgtgtacttcgccaacctgagcaacaagtcgcagcgctacatggcggacatcttcaccacctgcgtggacacgcgctggcgctacatgctcatgatcttctccgcggccttccttgtctcctggctctttttcggcctcctcttctggtgtatcgccttcttccacggtgacctggaggccagcccaggggtgcctgcggcggggggcccggcggcgggtggtggcggagcagccccggtggcccccaagccctgcatcatgcacgtgaacggcttcctgggtgccttcctgttctcggtggagacgcagacgaccatcggctatgggttccggtgcgtgacagaggagtgcccgctggcagtcatcgctgtggtggtccagtccatcgtgggctgcgtcatcgactccttcatgattggcaccatcatggccaagatggcgcggcccaagaagcgggcgcagacgttgctgttcagccaccacgcggtcatttcggtgcgcgacggcaagctctgcctcatgtg

SEQ ID NO: 103683 - DNA, 1080 bp, Homo sapiens
gctggagcaggaggatcactcgaccccagggtttgaggccagactgggcaacatttaaaaaaaaaaaggctagtccttgtggaagaatgctcagaagtcactgatgcatatccaggaaattgttttaaaattgtttcaagagccctggaatgcctctggtaaatcccctgaaatagaccaatcctgtttcacctaatgctccacaaatgaaggggacgacaagggcacctttgttcatggcagcactgtcagtcccagtatagaagcatggagttatttaatgaaagggtcactgatttcaaattctaggcaactggacccaagataaattgcaaacacatttaacctcttcatgttacattatggcagaacactgacccttaggtttggtaggctaggagcgtagtaaataggccgggaaatgacttcatagattcgattcccatgtctctctccccttttaggtggtttttctcctctgtgcctatgttacagtgtacatgatatatgggaaattccgtaaaacttttgacagtgagaatgacacattccgcctggagtttcttctggtcccagtcattggcctttccttccttgaaaactacagtttcactctgctggaggtaagggaatggactgagtaccagttctcaaagggaaatatgctccctgcatccttccctccagaccctgggcttgccttctgcttacaactgtgaccattactcatgtatctttcagttataagttgagaagaaattgacaagctatttacaatgctttagttggaaatgagcacatctcaatagtcatgatgcccataaaccaagcaggcatcacagccctacttctggctgttgagacgttctgttcaaccgattagcagatccctgtatccctgtagcacagtccaggcccagaaatttcaactcagtaagtttggactgtggcccatgaatctgcaggcaacaagcatcatgggagattctgatgctggtgtttatggacatgactaattttttattatttttttgagatggagtctcactctgttgcccaggctggagtgcagtggcagga

SEQ ID NO: 103684 - DNA, 1100 bp, Homo sapiens
cgcctcgtaggccagggtaaggggcttgcactacattctgattgccaagggcaggtattgggtcattaaaaaacccaatccactagctgctatgtagggtagaaagcagtccaagtacagtgactagctatggggcagttgcagttgatcaggaaaaaggctctaggtagaaagacatgtggacacaagttctaggacttgagaaggactgctgatttgattgtatgagatgtacaatagacaatttgaggccaatcgctaagtttacagctggggggaagggtgccagtaaccaagtcggggatcagtaggtccatagtcaaccggagatggactccccctttgctttaacaatcgaacatatactgtgagccggccattaagagatgataccaagattatgcatcaagttataaagcagtcctttcatcagatggtaaattcttatttcatctccattttcttccagtccttaagggaaagaagttaagtcttccaatgccaatctgaggaccttcagagacagtctacgccttaacaagcacatgaaggaaactattttgaatgttctctttggcaacttatccataatttgggatcaaatgttaaaaccagaaaagtgtttagtgtggatttcagcaaaacctgatcatcccacccagaagaccttctcatcaatagatcgcccttaaagacccattgtaaggtcataaaaaacctcggccacctgcacaaagatggtgcctcactgcaacaagaaaccttaaggtgtcttaccgacgaaataaaaaacataaatgattgttctccaaggcctgagggcaagactcatgatgagcaagtcaaccccaatctggaacaatgtccctcctcttagaatgtcccaactaaagaccagttaaaatattagggtacgttcttgtgaatttccactttccaggtagatgaccaaatttaggtggtcaagatataaaggtgtcagctagttttaagtgtgaaacttatttcactttcacactgccttcaggccagaagcaaaccaaatttaccaggtttggctggaggagttttgtgactcatcttttactggtttgaatttt

SEQ ID NO: 103685 - DNA, 4019 bp, Homo sapiens
tcctgcttcagcctcccaagtagctggtactacaggtatgtgccaccatgtccagctaatttttgtattttttgtagagacagggtttcaccatgttggctggtcttgaactgctgacctcaagtgaccctcctgccttgatctcccaaagtgctgggattacgagagtgagccagtgtgcccccggtcatggttgcttttttaatactttcaaaaatgcttagtagtatattaggtttccagttttccatacggagaggtcagtcattttacactgtttagtggtgggtagaaactgagacatagcagttgcatctacagttgcagaatatcctaggatctgggcttcctgactcaaggtttcatattgtaataccgtgtttcttgatcatcctcaagtaaggggcctaaaagggtgaaaaggtctagtgtcctttaatttttactgtgcttttgaatgtgccccattaaagaatcaaattatgagtatatttttacagtactaattgggaggctggccagcataactaaatatcaaggagacatgtttaatacttttgtacccagtagaatttttacattgttatgtttaggtcctatatctgccattaaaaatcttcttgtatcttcccattaggtggtcgttctcgttaccggaccacttcttcagccaacaatcccaatctgatgtatcaggatgagtgtgaccgaaggcttcgaggagtcaaggatggtggccggagagactctgcaagctatcgggatcgtagtgaaaccgatagagctggttatgctaatggcagtggctatggaagtccaaattctgcctttggagcacaagcaggccaatacacctatggtcaaggcacctatggggcagctgcttatggcaccagtagctatacagctcaagaatatggtgctggcacttatggagctagtagcaccacctcaactgggagaagttcacagagctctagccagcagtttagtgggataggccggtctgggcagcagccacagccactgatgtcacaacagtttgcacagcctccgggagctaccaatatgataggttacatggggcagactgcctaccaataccctcctcctcctccccctcctcctccttcacgtaaatgaaaccactcaagtggtagtgactccagcagacttaattacattttaaggaacactgtctttcctttttttttcctcttcgccttttctttttttttccttttttctttttttttttttaatttttccccccaaccatcgtgatttgtcttttcatgcagattagttagaattcactgccaggtttcttctgcccaccaaaatgatccagtctggaataacattttgtaaaaaaaaaaaaaatatatatatatatatatagctgactggaagagattaatttcttcccccaacttcttgcatgttgaagatatttgagctatttttcatctaaaagagtaaggtattaggcccttttgtgggagccccatgttttgtttttctgagttggtggggagggagggagggggagggctgaattgttttgcagaggaagatggcatctgtgctttaaatttctcattactgggttagaaaacaaagagggattgccctgcacattttcttttgtgcttttaaatgtttcttaagttggaacaggtttcctcgggcctgttttgactgattgctggagtgcatttgatagttaaaaattactaattggttttatttcccttcacactctgcctccccacttctccccccgttactgaaaaataaccattttagtgtcaggctagaaattgaattgctgagttttgtgtatcctttaaattaaaaaccacaagtgtttattgtagtggttaaactgtagcatctcagcatctgggtggaagctgcctatatttcttcccagtttaactggggaccatctgtgaaattaattttccatccagacagctgctgtgagcaaatgaacataaatgctcgctggaaatttactaaccagtttttatattgacctgcagtgtaaaaagcacatttaattataaacaatatattcaaaatgggcaaattttattttcaaatgcagtgtagagctagattaaaagcaactctttgccacctactctgcccttttggcaaagttaccttgaacaaagaatcttaagggtttattaagaactctttattttcttcataccctgttctctgcagtgctttctaacagcttctgggtgcagattttcttcggcatccttttgcactcagcttattacaggtaggtagtgcttaagaaaagtcatggaggactaaagcctaagtccttttcacttttcctccatctgaaggtaggtgagttcatcctcttcatggtaatgctgttttaccaagactttatagcagatggacccagaaagaattttctgctattgtgttcactacaacaggatagggacatcagacagccccagaaaccccttccagatctgatatgggactattaatttttatgctgttaattggtattcattcacaatgcagttgaagggggaaggctccactgcattctttggctaaggcctgaatgcttgctcatctgtaagatctatactcgaggttttgttttccttttaaaattctttagggagagagggatggtttctgaggggttctgaaagtatgattcaatgtgcaacatacaggtaggtcttcagcataagctgaaatatatgcatgtaaaaactttgacatctttttttttaattttccactttcttcttaactttacttctctttttgtcccccccccatcttacagaagttgaggccaagggagaatggtaggcacagaagaaacatggcaaactgctctgtgctttcaaaccaaagtgttccccccaaccccaaatttgtctaagcactggccagtctgttgtgggcattgttttctacaaccaaattctgggtttttttcttctttctttaaacatagaggtaccaccacaagggatgccctactctctcgcagctcttgaaagcatctgtttgagggaaaggtctctgggcaagcaagtggttatttggattgcttgcttccctttttccacctgggacattgtaatcataaaataacagtaaattccaaacctcaaaaactattatggcctgagcacagctgaaatctagcagagtttaactcttctgcctccatgtctgtcacttataattcaggttctgctgttggcttcagaacatgagcagaagaatcgttttatgctagttattgcattcatggttgaaactcaacttagggaaagggttccaatgtattaagcaatgggctgcttctccccaatcctccctaacaattcgttgtgtggacttctcatctaaaaggttagtggcttttgcttgggatcagtgctctctattgatgttcttgctggtctccagacacattcctgttgcattaagacttgaaagacttgtagatgtgtgatgttcaggcacaggatgctgaaagctatgttactattcttagtttgtaaattgtccttttgataccatcatcttgttttctttttgtaggtataaataaaaacactgttgacaataaggtgtgagcttttattgcttaattctctgaataattcaacgtagacgtcttaaaacagtttttgtttcaagacaaagatgggggatattggattgactgattactttcgcacctaaaactgaaaggaaaaaacttaatacaagaattggaattgaaaaccctagcaggatacctagtaggtaagggtttggatatatctgtatctgctcataagtaaaacagtgattgtgcaaatggtactcgcctaagtaccattaggttattggtattaaggtactaagtacaaggcaggtatcagccactggtttgaaaaaattcaaaccagtaaaagatgagtcacaaaactcctccagccaaacctggtaaatttggtttgctt

SEQ ID NO: 103686 - DNA, 4681 bp, Homo sapiens
aaagcgtgattctccccattccctgccccccccacaattttttttaactttggtttcccccaccccccttttattttcaaagtctcttcctgctcctaacaaacaggctttggtctgcagcaaggcctaggcatgactattcaaacagagggagaggagacagacagctgaatggctcagcttctctctggtggtggtttctggctggatagaataagcctgacgaaacctagctattgtaagctagtttcttcagttattcttttccctatccctgtctaagctagatatatacagagaggtccagttttatgaatgcttattagatggaattttataagtctaatgcagtatcagaatagcaaatatgtgtattgcccagtttaatttactgaggtcaaattatcatgggcacttggctatcccctcctacccatgcacttatctgtaggtgtgttatcaactgatgattttctggagtttttgacccattaccatttaagatatacagagaattttatggtagtttagcccactattctgagctaaacaggtctaactcagaacttctatattttaaaaaaaaagattatttgtattacaaggaaatccttaaattattgacaggtatttaatttgcccagtaaggtgagaagtaccatattattcccttatactatataatataaagagaacaggtattcaaactggaatacaaaagtaatgaagcctttttatgcattgcactcatcattccctccttcagaggtggtgacctgcagccatgatggaaagttctctctgcccctctgccctctgaggtcatgtctggatctgtgccattagaacttgggcctgttgggagaggaggcggaggcctgaaagcagtttacataaagctttcagtaatggttggtttttaaacaggcttgctatgtgctggtagcttctttgtgcatcttgcctagacaattaaaaatatttgctccatgtccccttgcatttctaaaccaaattaattggctaccattagaataacttagactcttcatcccacccccactcatccaagtgaggggagagggaaggtacccgagtctgtttcttgttactcaacatcagtgcttgttttgggcccctttgtttgctgccttgtaaaaaatcaaaagagggagaaaacccaccaaaatggcagaattctgaccaatgtcctacaagatcctggaaagtgaaggcttctacctcatagacaggggtgcaattttcagctgagtcaccagggccttttttcacttcctgtcaagcgatggtctcttaaatgttcccttcaggtaagttctttgattcccataattttataatagtcatccttaggctaccacttccctttccactgggatattttttatttttccttttttttgtttgaactacacactgttaaactaaaagtattgaatttattttgttttgttttttaacagaagctttgatatcagctgcagatcactcaatacatggccgagacaaatctacattggccggaagcagctctagatgagcctcttggctagacttagtccctccttattagtgattggcgattcaggccatgtcatagggcctttcagacaaaaggttcttatcccagtcagctggccaaaacattaactttggatttcttaccctgctacagcatcttctagaaaggcagcaagataatattgtggcagtgcacagataacatcagggtagacttgactggagaaaaccaaattctgcgcttgctcctgtgtgcccccatccagctgtgcatgcacacacaggacacctttctagtatgaagaacttgcatcatgtctgccctctattgagcacccccttctagaaatacttccaagtattagcatgtgaactgttgactccaccctggtgctttctgctaggaaagcacacttaacgcatccagtgtagtaattgaacttgttctactgccatggtcatatgcagtgggattgcataaggagcattatcctagctctgaagataccatggagtagaattccccaccccctgtcttacatccaccctggccctgtaaattcttttttcctttgttgcgtcaacgaccctagccggagactcaagctgccccctgtgataagtgccttctcgtctttctggtgtgattcaggactttaggggtcagtaaagaccgaggagcctttattgtaataagaaacagacataatgccccttcttcacaagccctgtaacaacagctaattttttttttttaatctcccctttctcccttgaaattaatccagtctgggcaatagatgcagtctgaccctttggatgtaacttacatttttttttattaattatttttttctacaatcaccccaattatccttgggggaggcgttggaggacctgaaatttttacccgaacccaggttctccggcgcttggcaaccaaatggggctacagagaagcatctaagccagttcacagagcgagcgtgtgtggggacttctcactgccacggacccttgatgcatgctccccgcgctccagtggtcccgtgtcagaaggcggagttttcgaaaggaggccgccaaaaataaaaggcaaagagacgggatcggctgcagcggtttcccaaaggaggagggagtgtgcatcggtctggtaacaaacagagaatgttttttaattatttatatcacaaaaatctgtgttttatctaggatattttctgaatattctttgtaaaatgcagatttttttccacaaaacagtaggattctttgttatattcttaaaattgtttgtttaagtaggtaaaaatatacattcagctgaaagcattacactaacatttacattttaagccttaggaggttattcagcccaattcccagcagtagagagaatactaaacttgtgtctcaaggtttcatggttttcccacgttctttggctattaatttaatttcccaggtcacgtagacaatcattgataattgaaacaagtcctgagttgaaataaccttgagttgagcaaaaatatcctcattttggcagaagctgggcttggtagtacagtaaaattttagtgtaatgtgctcttgtaattgaaaggggatagataatctggatgtttctgcaaaggaaaataggtgtgtacttaacagctttggctctactcagtttcttaaaaagataagagcaaaaaaagttaaatgttaatcaaaacatttaagtttcctttaaattgtagtaataaaatatatgaagctcctttttttactttgctctgtgactggtttaaaggtaagtttgttatgttgttggtagattttgccaggcttctcccaacagagtagaagtgatttggcctcataacttcacagtggtttaccactttgttctatgttctggttttgtaaaggatagtactggaatttgcgtctgaagaccaatattggtgtaactcctgtcagtatattggtaaaatgtagcagaggcaggagtttggatgtttggatgggattcccttaggattctacagccaataaagatcctatttcctatgcatgtcccaggaatcagtaatcctcttttactctgttgggatgagtctttttttgtttctgttcagagtggttactaacttcaccttctttcctcttgctgtcatctgcattcgtgcttcccacctgttgttggcatgtcctttaccttctctttccctgccacatcaacctacacactgactcatcattgacgtggaagatgtggaagatgtcaagtttgtgatcaactatgactatccaaacagctcagaggattatgtgcaccgtattggccgaacagcccgtagcaccaacaagggtaccgcctataccttcttcaccccagggaacctaaaacaggccagagagcttatcaaagtgctggaagaggccaatcaggctatcaatccaaaactgatgcagcttgtggaccacagaggaggcggcggaggcgggggtaagggtaagtcctggagttttccaggtactgccaaggtatctctttacgccttctgtgacttgcttttagttgctgtttttaagaaggctgtaagtatgttgcttaatagcaaaggacactgcctaatgctttttataacctttttcaactaagaaaacgtgaagtttgttgtgatagtcctattagttaagctaaattgtgaatttttttttcttagagactggtctgaggtttggttttgtttgtttgtttgttttgagacggagtcttgctctgtcgcccaggctgaagtgcaatggcgcgatctcagctcattgcaacctctgcctcccaggttcaagtgattctcctgcctcagcctcccaagtagctgggattacaggcacccgccagcacaccctgctaatttttgtatttttagtagaggtggagtttcaccatgttggcctggctggtctcgaactcctgacctctggtgatccacctgtcttggcctcccaaagtgctgagattacaggagtgagccaccaaacctagctgaggctggtctgtggagtttcaccatgttggcctggctggtctcgaactcctgacctctggtgatccacctgtcttggcctcccaaagtgctgagat

SEQ ID NO: 103687 - DNA, 1024 bp, Homo sapiens
acctgactcagtactctaatagttattaaaaattttaaaagcgtaatgtgcaaagaaagtactgtagccttgggagttgatattgcagacataatcgtccacataataactttctgtgtgatgactgcattgttggtcatgttttcaggttgatccaactaatggaagaaataatggctgaaaaggaaaacaaaacaataatatttgtggagacaaagagacgctgtgatgatctgactcgaaggatgcgcagagatgggtgagtatagcaccaaggcaattaacctctggttttatagttaactggaaatttctaaattggtattccaaatgttgtgtaatatttcaataatgcctatccatgcagtttgctcttttaatgagcacagtcatctattcatgaagcctgacaaaccttacaaaaattgcatgatagcatttggctttaaagttcgattttctccactttaaaagatttttaaaatattggtcacttttcttctgatagttggccagctatgtgtatccatggagacaagagtcaaccagaaagagattgggtacttaatggtaagtttaaaactaagcattttctgttgattccccaccccctgcccataagtgaatgttcatgctctatttcagggataggcaaactttctgtaaagggccacatagtaagtatgcttggctttgtaaaccaaatggtggtctctgttatagccactcagcactgctgttttaggacaaaagctgtaggctgtagataatatgtaaagaagtggcctggactgggcaccgttggtggctcatgcctataatcctaacactttgggaggctgaggcgcgtggatcacctaggcccaggagttcaagaccggtctgggcaacatagtgaaatcctgtctctaaaagaaaaacaaaacaaaacaaaacttagccaagcttggtggtgcacgcctgtaaccccagcgactccggagattgaggtgggaggattgcttgagtctaggagacaggttgg

SEQ ID NO: 103688 - DNA, 1717 bp, Homo sapiens
atcattccaaatgctaaacatgaagttctaataatttttttctatattccattgtgctaatattccccacttctgatcttcaccccatcacttttaatgtgctagattagacagcaaagaattaaattagctttttgtattttgtttcttcttttttttttttttttttttaaaccttggatgaggtctcaagtgtctttttgttggtttcagtgtctagttctggctcctaccagagagcttgcccagcaagtacagcaggtggccgatgactatggcaaatgttctagattgaagagtacttgtatttatggaggtgctcctaaaggtccccagattcgagacttggaaagaggtaataatatatagtgtaaaagaattgttagtttatcttactttaccaattcctgtggaggaaattggagaaaaaaagtgggttcttgtgataaactcagaatttcagcagcttagaaattctcagatgtgactaaaacagctattttgagagagaaggttcagcatggctggaaactttgtgaggatttggtgattgtacataagtcctgacatggttttgcggttactttgttaaaatttagcttctctgggccagtgcggtggctcatgcctgtaatcccagcactttgggaggccgaggtgggcggatcacgaggtccagagattgggaccatcctggctaacatggtgaaaccccgtctctactaaaaatacgaaaaattagccaggcgtggtggcaggtgcctgcagtcccagctactggggaggctgaggcaggagaatggcgtgaacctgggagtcggagcttgcagtgagccgagatcgtgccactgcattccagtctgggtgacagagcaagactccatctcaaaaaaaaaaaaaaaaatagcttctctgcagcattgagtacagccaccagggctgctgctgctgcatttttgtagagtcggggtcttgctatgttgaccaggctggttgtgaactggcctcaagcgatcttcccgcctcctcttcccaaagtgctagaacacagctgtgagccactgcacctagtcgattggctcgatcattggttttgttttacaggtgttgagatctgcatagccactcctggacgtctgatagatttcctggagtcaggaaagacaaatcttcgccgatgtacttaccttgtattggacgaagctgacagaatgcttgatatggggtttgaaccccagatccgtaaaattgttgaccaaatcagggtgtgtaaagctaataataagcagtctttatgccatttgtccaagttccttagcctgaaagaaagcctttccttttttgatagcctgataggcagacactgatgtggagtgcaacctggccaaaagaagtaagacagcttgcagaggatttccttcgtgattacacccagatcaacgtaggcaatctggagttgagtgccaaccacaacatcctccagatagtggatgtctgcatggaaagtgaaaaagaccacaagtatgaaagatattttactctgatttgataatgctgataaaccttttctaataaccctccaaaattagtactgtagaaaccagtatattttgaggcctgagaacattaaaagcattgctaggtttctgataatccatcatcatatcatttgtcagagcattatggttaaatgcaaggattctgaattcttgagttt

SEQ ID NO: 103689 - DNA, 1358 bp, Homo sapiens
gactattgtagcagcttttgtttgtttgtttttggaaacggagtctcaacgttgtcacccaggctgaagtgcagtggcgcgatctcagctcactacctcctctgcctcctgggttcatgcgattctgcttcaccctcccgagtagctggaattacaagggcccaccaccactctggctaatttttgtatttttagtagagacagggttcaccatgttgaccaggctggtctggaactcctggcctccactggcctcagcctcccaaagtgatgggattacaggcgtgagccacctagcctggcccttagaagctaacagtgagttggtcggagatctagtagataaagaaaaagcactttggagagatgaagctgggtaaatcttatcttcagtgagcttaaaagtttttttaaaaactcttggtttgtgtctttaaacacaataaaatacgcaaaataaaattctcttacagaatatgtaatggatgtgttgatggatcagcactttacagaaccaactccaattcagtgccagggatttccgttggctcttagtggccgggatatggtgggcattgctcagactggctctgggaagacgttggcggtatgtatgagcaagagaagatccttgatattgtggtaacttattttgctattctagttgtcatacgttctcagttcttcgtagaagtgccattcagatagttagatactattttagttattaaatatatggaagcattttatgttcaaatttgtattgcttcctgtatatagcagtggtaagttctgtttttcactttcctatttatgcattaattcagtaattactaagtatctaagtaagattgtacttctaagcgtaaggttgtcattctttcccccctccacagtatctcctgcctgcaattgttcatattaaccaccagccatacttggaaaggggagatggcccaatcgtaagtgtgtttcagtttctttgtaattctaagaaaaactacaatttagcgactatttaggcttggtgctttacattatccatttgtactcttaaccacaccctccataggtggaaatggtttcattctcatcttacttggaattaaatgacttacccaagatcactcagcaattgaatagctgagcttacatttgaaccaaagtcttactcttaaagaaaccatgcatgctgtatgggcatttactgtgcagtaaatcaagtgttttctggttttggtgtggttttttttgtttttttgttttgattttttgtgtttttttgagatggaggttcgctccgtgttggtcaggctggtctcaaactcctgacctgaggtgatcagcccaccttgccc

SEQ ID NO: 103690 - DNA, 3034 bp, Homo sapiens
aattactgaccggataaaaacatttgagcagcatagtataccagagagtacagtgtgcgtatttaaagatggcatggatatgctcaaaagtaaaaggctttcttgaattttgaggtcattaattatgtcagcattaattataaacatggaagacggcatattttccaagaaccacatgtttcaaattaaatgtttagtgtagaatagaatgtcttgaataaatagccagggaagtaaggagagaggaaaaaaaaatacatgaatgataatcatcagtttaaagccttaacaggaatcttactttcaagttttattttttcctaagtcactaaggtttgggtagcattgcaatgtggcaataacaatgaagtcttttataatttgcaagagtgataatccaaagactttctacctcttgaaaagtaccttatttagctgcttcatttgcaagtgtggcgggagcggcaattgaggtggccttttggtctgttcagtattgagtcttaagctgaggggcatattaaatatgtcgctgacacgggtatccctatgctatgtgctcttcctgttctgattcttaatttgtcttcactgtctcagtagtggtataaatggaattagccaagttctgcctgttgagtgtaggtatccagtgatcccaataaaatctcctgccatcaatttttgttacgtatgtatttagaggaatgtctggctggttaagccagagttctaatggctttgaattgcaggaaattgaggccctgtagaataatacacctacttgcctatcaatgataaagtggaactttatataagatgaagttacaagtgggttagagtgggaaaagggaactaaattcagtacaatattttacaaggagtaaagaaactgagaaaatgctatacagtttgtatgccaaacaaagacctgtactttacaagatcgaaatagggaaaattaaggccatcttagtgttaagattcttctaggaaaagtagcttctgatttcttaaatattagctttggctagtggtcatatttgtattcctcttgagcttgtctgttgtgaaaggtatataaaaagcaagaagttgatcttaagtaattagttgagtgttaaagccttaaataagtcttgttagtgtttttttctctgtaaattaataataccatttgggaacaagaaggagatagaaggtaaaagtagagatcaaagaagaaggaaaggtcataaatctatgttcagctttttttttttttttttgacggaccctccctctgtctaccaggctggagtgctatggtgccatttcagctcactgcaacctccgccttccgagttccagcggttctcctgcctcagcctcccaagtagctagggattacaggcgtgcaccaccacgcctggctactcttttgtgtttttagtaagagacagggtttcactatattggccaggctggtctcaaactcctgacctcaagtgatccactggcctccgcctcccaaagtgctgggattacaggactgagccactgcccccggcaggctcagctcttttattagcgtaagctaaaaatgaagaccagtctaccagtcctttccaagacccagttttgctttgcagataagcagacaggtggagtgcttatcacagtttaataggggagcaggcccaagaagctattctaagattgagggacttgcttggagtgtatcttccttcttgtccacaatcttccctttaattgaaacttaacttaatgtcatcctttgcctgcatgtctgttacacaaaaatagagacttgtgtctgttttgtttagtaactccagcacagcaccacttcaaacagtagccgatacatacttggtacctagtaacttggtacctaataactatttgttgaatgaaatgatgctaacttgtactgagtgctggctatgccagatacttttatagtacattacacattattaggtcattttctcagcagcctctgaaataagtggtattatttctactttgcataggaaactaaggtgtgtggaagttaaataattctcttcaaattatacagtaagtggcagaataaaaactcaaaccatgtctggatccagaatctgtgattgtaatccctaggatgtatttctctcaataaagggatttttaattttttgcctattgtagctatattcataaacagtatttattgttgggtagtaagggaggttttacacatttctccatacctttaaatcacagcaaataaaatggtctttttggaggtaggctggtagtatccctagaactccatcctttttgaatattcttatggcatgtacgatacgttgctttaaaaatactgatgaactaactaaaaattctgttcctagatttggagcaagaggtggtggtggccttcccccgaagaaatttggtaatcctggggagcgtttgcgtaaaaaaaagtgggatttgagtgagctccccaagtttgagaaaaatttttatgtggaacatccggaagtagcaaggctgacaccagtaagtttacatgtgtgttttaatgtacagattattgaaccaagtagatatattggttagagtttattcatacgctactgttgccgttttacattttattctagtgtggtgatatttttcttaaaaaattttttggttaatttttttttttttttcctttttgtagagaccgggtttcgccatattccccaggctggtcttgaactccctagctcaagcaaactacctgcctcagcttttcaaagtgctaggattacaggcgtgagccactgcacccagctgatttttttttttttttttttttttttttttgagacggagttttgctcttgttgcccaggctagagtgcaatggtgtgatcttggctcactgcaacctccgcctcctgggttcaagcgattctactgcctcagcctcccaggtagctgggatcacaggcacccgccaccatgcccggctaattttttgtatttttagcagaga

SEQ ID NO: 103691 - DNA, 1096 bp, Homo sapiens
atatggaggacggttattgtctctgcaaagcaacttcttcaagccggccgcggggtctgtaccgagatcggaatcaggcaaaatcctctattctctaaacagaatgcgttacgcatactgcgcatcttagcaacagcaggccggctaacgacgcaaagaatgttacgtcgcaccagaggcgcttcctcccacctcatcccacgttctagttcgggtggcgcgagaactctacgctcgctccgtactttgtttttcttgtacagaccgcaaaatacacccatcgtcgcaactgacgtaaagtgcttccaagaatacccgtagttccccgcggagccctcgggctattccgaggcgctgtttacgtatcgtctccgccgtacgcagcgttaagttggagccgactcagcggcggccgccattttgtgcagtcgctgggaaggaaggagacgcctaaaccgcggcactgcccggtttgagcgtagccaaacctgcccaccggctttgtagccccgattctctgtgttttgctcccgtctccgacgagagaggcggcgacggtggcgtctgcgacgggagacagcgcgtcggagcgagagagcgctgcgcctgccgccgccccaacagcggaggcgccgccgccatcggtcgtcaccagaccggagccgcaggccctcccgagcccggccatccgtgccccgctcccagatctctatccttttgggaccatgcgcggaggaggctttggggaccgggaccgggatcgtgaccgtggagggtaagggtgggggaggagaggagaggcctggcgtgggggtgggggagttgcttcttggggaggcccggcggactgcgagcctgggagccttgctctcgacccgggaggcgaggggaggcgactcgaggcgagacagcggtttcgtgcgcggacctcggccccggggtcactcgggacccgaggagggcggccgcttggcgacgctgggcctctccgtgcggacggccgtcgtggcgcggcccggccccatcccagccccgcgggggatcgggaggggcggcctggccgcatcagcccaggcccgggctttggcgcctcgcc

SEQ ID NO: 103692 - DNA, 1390 bp, Homo sapiens
gtggtggcccacgcctgtaatcccagcactttgggaggctgaggtgggcagatcatgaggtcaggagttcgagaccagcctgattaacatagtgaaaccccgtctctactaaaaatacaaaaattagccgggcgtggtggcatgtacctgtaatctactactagctactcaggaagctaagctaggagaatcgcttgaacccgggaggtggagattgcaatgagccgcgatcacggcattgcactccagcctgggcaacagagcaagactccgtctcaaaaaaaaaaaatccataaatttgacacaaaatcctgaacaccttagtggaacaaacaaaatttgtttgttttcctttcttttaaacctatggattatatcaaacaaacaaaatttgaattggcttgatagtctcctggagttaaggctgctatgtcacagcctattttgatataacttcttagtttattaatcatttgttagacttttttatccccataatatctttctttttctttttttttcttttattttatgtattttattttatttttgagacaaggtcttgctctgtcacccaggctggagtgactggagtgtagtggcacaatgaacactcaccgcagcctcaacttcctggacttgagagatcttcctgcgtcagcctcctgagtagccaggactccaggcatgcaccgccatgcccagataattgttgtatttttgtagagatggggttttaccatgttgtccagactggtcttgaactcctgggctcaagggatctacctgccgcagcctcccaaagggctgggattacaggtgtgagccactctgcccagcctcattcctatatgttttctttgcccttttgcaaatgctataatttatttccccatttgggtgattcaaaatcatctccttttggaaataatgttcttaacattcaggctcttcacctacagtaatgacaagcaattgtctctattcttttttgcacattgggtaccacactagtaacagcaaacaatagtttgctaagaaaaaaaaatcatggctatacatctagaagctctagcttcccagtcttgtttaggttatctataatggcatgggaggcatggtgcttcaactgggggaatctatcttcttttatatttgcctctgtcagaacactcttcaaaagttccctgaattacagttttgaagatatgacacaaatctgtgtccaagaaggacctagaccagggagtcccaaattgtcatctctgtattcattctgcaatatttatggagtaccctgtatattataggcacttttccaggcgctggagtttcaaagatgaacagatatttagagtatagttggggaataagacccatacatttaaaa

SEQ ID NO: 103693 - DNA, 1033 bp, Homo sapiens
gatgtcaccttctttttgtttgtttgttgtcacccaggctggagtgcaatggcatgatcttggctcactgcaacctccgcctcccaggttcaagagattctcctgcctcagcctcctgagtaactgggattacaggagcatgccaccacacctggctaatttttgtatttttagtagagacagggtttcaccatgttggccaggctggtcttgaactcctgacctcgggcgatccgcccacctcagcctcccaaagtgctgggattacaggtgtgagccaccacacccgtcctaaggatgtcaccttctgatccaacatcattagcataaattaagaggcaatatgattagagaaaaaacattaaaccagggtcactagcatagtgaccttgtacaagtgatttaaactatttgaactgcattttcctccctctcaaaattaatttatgtttattgattacttaccatgtgccaggtgcttttatgcatcatcttatctaattctcatgtgaccccaatgtaactcacagcctccttggacctccctgttgcttttgtgaagccaatctcagtaagttgttgaatccctccccatctcacctccccccgcaaaaaagaacccagaattccatctttaaaatgttgaaaaaagtgtatatttttctgcatattttgggagaagacagaggggagaattacttaacaaaacttcttaaacatacccttttttttttaaccacctcttctctttcctcaaaattcttctttggcggtactcccctttcccccatcttcccaaaatctcaaagcctcccctgccaggcatggctcacaactgtaatcccagcactttgggaggctgaggcaggtggatcacctgaggtcaggagttcgagaccagcctggccaacatggcaaaactgcatctttattaaaaatacaaaaattagccaggtgtggtggggggttcctgtaatcccagctacttgggaggctgaggcagggagaattgcttgaacccaggaggctgagg

SEQ ID NO: 103694 - DNA, 1020 bp, Homo sapiens
tgcccaggctggagtgcagtggtgcgatctcggctcactgcaacctccgcctcccaggttcaagcaattcttcctccttagcctcctgagtagctggaattacaggcacctgccatcacaccaggccaattttttgtatatttagtagagacggggtttcaccatgttggccaggctggtctcgagctcctgacctcgtgatctgtccgcctcagcctcccaaagtgctgggattacaggcatgagccgctgagcccggctttacaactctttttaaaccaaaaatatttattctaaccttaataataataataacaaataatttctgttgtcaatgaaaaataggaatatgatgttatttataaaataaattcatgatgcaatatgtctaaactctgaaatctaaacaatgaacttttaaatatctatattgcctttctcatagttttaaaattttatctcttgatgcagaatataacgtggctgtttttgtgaccaatcaaatgactgccgatccaggagcaactatgacgtaagccccaatattctactttttatttcacagaggttaatataaagagggttagagcgtagaatagaaaataatttcaaggccgggcacggtggctcacgcctgtaattccagcactttagcaggctgaggcaggcggatcacgaggtcaggagatggagaccagcctgactaacatagtgaaaccccgtctctactaaaaatacagagattagccgggtgtggtggcgcacacctgtaatctcagctactccggaggctgaggcagaagaatcacttgaacctgggaggtggaggttgtagtaagccgagatcgcgccattgtactcctgtctgggaaacagagcaagattctatctcaaaaagaaaaaagaaaaaagaaaagaatttaaaaatcattagtctttatgtgggcacaaatatatcacaaatcactttattactgggcgcagtggctcatgcctgtaatcccaacactttgggaggcc

SEQ ID NO: 103695 - DNA, 1050 bp, Homo sapiens
taggcatggtggctcatgcctgtaatcctatcactttgggaggccgaggcaggcatatcacttgaggtcagtagtttgaaaccagcctggccaacatggtgaaaccccgtctccactaaaaatacaaaaattagctaggtatgatggctcgcgcctgtaatcacagctactcaggagactgaaggaggagaaaacaaaaaaaaagctaacaactcctttagaagaaagtagattttaaactgtatatactttccaggtaagatttgaaaagaaaaagaaaacctatgccaacaaaaaacctttggtcgatatttctcttctgggcccttgaagttacctttttgaccctttggttcatgtagtcaaatttatcatttaacaacatgtgattaataatataataaactatttcatattgaggaatgaggggtatgaagagagtgaattaattcactttgcagttattgaattataattcagtgatattatctattacaggtctatttttatagatctgagaacaaaaggactcacaaagcttagttcctagtttttctcttgtaactgatttgctgcataagctcaagtcatttgcctaatctctgtttgccagtgtcttacgttgtaaaatgtaaaacaggccataaaaactagcttccaaggttattgtaaagttttgataatttaatagttaaagtcattactgcctcacatttctatgaccattatcactacctatggtaagttgaggcacttatgaataaacaaatcttgtatagactttaaatggttgctagcatcctctagaataccttcacaggtacattgtttggcttctctgttaatttacggaagatattatgttttgtagtggttgtctaaacttttttagaattgacttattggatccttaatcttggcatactccagccgtccagatcgccttagggacattgctgatcgctttaatgtagaccatgatgcagtactggacaacgtactttatgcacgtgcatatactagtaagagccccatgcagttggatgcttg

SEQ ID NO: 103696 - DNA, 1021 bp, Homo sapiens
gctataaatcccagctacttggaaggctgaggcaggaggcttatttgaggccaggagttcatgattagcctgggcaacatagcaagactctgtctctaccaaaagaaaaaaaatctaaaaacattgtacatcagcagttatttagatttaactataaagatttttgttttctttgttcattatggtttcttgcatcccagatgttattttttcctgtatttttgttttgctgtaatacttatttctttcagaaatgtaatacaggtggtaaactttgaaccttagtatgtctgaaagtgcctttattttgctctcactcttggctgttaatttgtctggtcacagagaactttgcatggtatatttctatcttcttgggtatttgctccttccatccccatctcacagtctttctgaatcatacaaatcatttaaggctctcatttcaaggcctgctttttctaatcttccctaattactcaatttagaaaatcttgtccttcttgacctattatagaatttactatctaaaatactcacttagaaaacaaaacagagaactgtttgcagaagtcccttttcagaaatgccaggcataagaagtctctgaaagagccttttaacttggggaaggagggtgaaatgtcgtacagggctttaacaagggtgctcagctggagttcagctggtttcagaaacaattgattaaggatgattcttatctcagagagggaagaattgttcttgcagagtagcagccactgtttgggcaatttggagtttttttttttcgagatggagtttcactcttgttgcccaggctggagtgcaatggtgcgatctcggctcactacaacctccatctcccaggttcaagcgattctcctcctcagcctcccgagtagctgcgattacaggtgcatgccaccacacccggctaattttgtatttttagtagagacagggtttctccatgttggtcgggctggtctcgaactcccgacctcaggtgatccaccca

SEQ ID NO: 103697 - DNA, 1297 bp, Homo sapiens
cctcaagtgatccacccacctcagcctcccaaagtgttggaattataggcgtgagccatcacgcctggcctaatttttttcttcttttgagacaggttcttgctctgttgcccaggctggagtgcagtggcccaattacactcactgcagactcgaactcccagggtcaagtgatcctcccacttcagccttctgagtagctggaactacaggcacataccaccacgcctggctaattttttttatcttttgtagagaccaggtttcaccacgttgcccaggctgatctccaactcctgggctcaagcgatctgcctgccttggcctcccaaaggactgggattacaggcatgagccattgcacccagccatcattttaatgtattgaatatgatgtacatgaggatatccagatggcactgggaaatattgaattcagcttgagaaaggggtaggcccagaaatatggacgaattaaccaagggggaaagagaacttatagagagagaagagaggagaattgagaacataactttgaggtatgtttatatttaggaagaggactaaaatgagaaacccagagacagaggaagtagaaggaaatctggttgtaaaagtcaagcaaaaggaaagtttcaagacgatgagttgtcagcaatgttacacacacacggattttgaggatacagcctgagaaagatcattataagttcaaaattaggagttcaagcgaacatttgccatagggtgaggtgatagaagctttatgtaaacaaacaacaagggagggaggcagtatgaaattgaccaatgaaaggaagaaggctaggcaccgtggctcacgcctgtaatcccagcactttgggaggctgaggcgggtggattacctgaggtcaggagttcgagaccagcctgaccaacatggagaaaccctgtctctactaaaaatacaaaattagccgggcgtggcggcacatgcctgtatttccagctactcaggaggcttaggcaggagaatcgcttgaactgggaggcggaggttgcggtgagccgagatcgtgccattgcactccagcctgggcaacaagagggaaactccgtctcaaaaaaaaaaacaaaaacaaataggaagaaaaaatatactagtttgaggaggtattcagaggaaattctttttaataacaaagaagacctatgcacatttgtaaggctgttcacagtgaagccccagcctgcctctccaagctcagtactcaccattgccactattagaggcaaagagatgaatctgttttag

SEQ ID NO: 103698 - DNA, 1790 bp, Homo sapiens
gaggctgagtcaggagaatcgcttgaacccgggaggtgaaggttgcagtgagctgagatcgtgccactgcactccagcctgagtgagagcaagactctgtctcaaaaaaaaaataaaaaataacatccgagatactttataagtaagatttgccagttggaaaagaaaaagaaaacagtaatattctaaagccatgttttattctttatgaaaatatctggaaattatgcatttttaaaatcatttttttctgtatttcacagaatttcgtactggaaaaacccagctttctcataccctctgtggtaaggatatataacaacaataacaataataatcatggctattacttatcaaacatctactatgtgcctgatactctaaataatctcatatctgaacatacttgcaaggaaactaaaacacaggcagattaagtaaactgcccgtggttatacagctggtctttgaatgtgtgatccttgaggtgatgtatgtgctgcactatgaacacctgagtagaaatagagagaagttgaatgggtgtatgaatgtgttggtgaggagtccactgtctcagtttttcccattccatcttttctatatcttttttagaagagtgacacaaaatctattgagtcctagaatctttcactttccatggcataaaattggccctaagagagacttaaaaacaaaattgttttaaacaaaataacgaaagatatctccttttccacaaatacactactgtgcatttctttgagctatggagaaggaacttggcaaagtggttaagaaaggagttctggccgggcccggtggctcacgcctgtaatcccagcactttgggaggccgaggcgggcggatcacaaggtcaggagatccagaccatcctggctaacacggtgaaacccggtctctactaaaaatacaaaaaaattagccgggcatggtggcgggcgcctgtagtcccagctgctggggaggctgaggcaggagaatggcgtgaacccgggaggcggagcttgcagtgagccgatatcgcgccactgcactccagcctgggcaacagagcaagactcgtctcaaaaaaaaaaaaaaaaaaaaaaagaaaggagttctggaatcaaaatgccggacttcaatcctggttctatcgttagtagctgtgtgaccttgggcaagttgctctacttctctaatttcccccaccaataaaattgaaataatgacagtgccaaatgttaggattgttttgaaaagtaaatgaaataatgtatgtacctggtataaagtagctccttagtgttaactactactacataaaaagtaattgcagtctagcgtggtggctcacacctgtaatcccagcactttgggaggccaaggcaggaggatctcctgaagtcaggagtttgagaccagcctggtaaacatggtgaaaccctgtctctactaaaaaatacaaaagttagctgggcctggttgaacatgcctgtaatcccagctactggggaggctgaggtcagagaatcacttgaacccgggaggcagaggttgccgtgggccgagatcgtgccactgtactccagcctgggcgacaaagtgagacctgtctcgaaaaaaaaagtaaatgcatttttaaaatttgacatacattaatttaaaggtaacatattagttatatagcataaattatatttgtgactttttttttttgagacggagtctcgctgtgtcacccaggttagagtgcagtggcgcgatctcagctcactgcaacctc

SEQ ID NO: 103699 - DNA, 1046 bp, Homo sapiens
cccagctactcgtgaggctgaggcaggagaatctcttgaacctggtaggcggaggctgcagtgagccaagatcacgccactgcattccagcctgggcgacagagcaagactccatctcgaaaaaaaaaaaataataataataataattaagacgatctgtaactccaattcaattctaaagactagtaagacataaggccttgctaacccatttactatttttttaagttttttcttaaaataatttattattattattttttaagcctacagcatgcagtattcccaggttccatttactattgaagtaagaacgatagggcttatcatttgttttgctgatccacttgcccatacacaatagaacctgtgatctagcaagtggcatgctatttgttcagccaagaattgctgttcatgttctgtagatagataggtagatgatagaatagatagatagatacatagataggaaggatactaatgatatgaatactttctcctctcttaatatttctatttctattcctgttactaatgctttctttctatttccagtaagttactaggaggtggaattgaaagtatggcaattacagaagcttttggaggtaggtagaaccttaatattttgttaaatgaaatattatacacacacacatacacatctatgtgtatacatacacatataattaaataaacaaccaataataaattgtaagtattttggaacttacaaaatctcaattatcataacatgagatcattctgtactgcaacgaaaatatatatgaacattaacagatgggtcttatcaacacttttcatcttttatttgtgattcctatagaagataatagatttttttttttttttttgagacggagtctcgctgtgtcacccaggtccaggctggagtgcagtggcgcaatctcggcttcctgcaagctctgcctcccgggttcacgccattctcctgcctcagcctcccgagtagctgggactacaggcgcctgccaccactcccagctaatttttttgtattt

SEQ ID NO: 103700 - DNA, 1018 bp, Homo sapiens
caatgttttttctttttcttttttgagacagaatcttgttctgtcacctgacacagggctaattttttattttttgtatggctggggtcttgctatgttgcccaggctggtctcaaactcctgaggctcaagagatctgcccaccttggccttccaaagtgctgggattatagacatgagccatcatgcccggcttcagtttttaatatactgaaaaacatatgaaaaacaggtattaggaaaatccagtgattgtcattatggtcaggttatctcacataaaccaaatattatggaggacatgtcagaatagtaaatgtcaaagatgttgtaggtaatgctagcagttagaagagtaactgtcagattctgacagcatacatttaattggtagcccaatgttgtagtgcatttaaagctctgaataagaaaaggcctaaatttaagtcatgatctcattcattcattaaatgcaacacatattaattgtgttaattgtgctaagacctggtaggggcactttaaaaaccttgtatgtagtctattaacatgattttttgggatgtgatcacaggtcagacaaaaatttaagatatatagataatccaatacatttacatttacatagtttaagagagcaatttaaatgtaaattgaaacaatgttggaagttatccacaaatttagtgagggctgcagacttcaataaggaaaagaaaaatctagatagtgtacctgcacaacttaaatctaaaggacatgggctaagcgatcaacccatttggagggaatacacttggaaatcttataggcccagcaactatttttttcttcaacttttattttaaattcaggggtacatgtgccagatatgcaggtttgttacataggtaaacgtgtgccatggtggttgggctagcaactattaaagaaagctttatttgtccctcttcttcctgagaaaaattaccctggaaagctatacctctggaaaatcccagacaaaattcctggttga

SEQ ID NO: 103701 - DNA, 1026 bp, Homo sapiens
aagggcagctctaaagcctgtgttcctaaccataatcttgtactgccttcaaggacaagtgaactgtagcttataccaaatgatgatcttaataactgagtatatcattttgggcaacatttgaaaatacaaccatgatctttaaactctttttgaacatttccttttatctttctgtaggaaccaggattcttgactgcatttgagtatagtgaaaagaggaaaatggttttccatatcaccaccgggagccaggaatttgagtatgtatcttacttttttataatcactaagcataatctttggaataccatgtttcttttcctctttctggttacttctactataagtagtagaagtagcttcttcatttgaagtttgggtttgtttgtttttttttctaaatgataactgaaacaaattctagactgcttggaggagcaagattaaatgtcttacaagaaattcagacccaaaatctagtttctgaatcagccaatattaatctcaaaccacttttaaaaatcagtttaacttttcatttactttccttctccatatgaaggatgtttcattgcacattttgggtttactcaaaaagcaattgttagattaaatatttcagaaatattgcagttatttttgctcttctgcaggagaagttttaacatccctttttatttactcttttatgatccccaagacatatcatcatcttctcaatgcaagtttactaaaatgtgggttttttctccctaccttactagaaagaattagtgtttcatgtgttacagcagtgcccaagagcatttagaacaaaagcagtatttcctctaagtatttctcaaaatgctggcctcacaagatacattaagaaaaaaaggatttcatagtcaaatatacctccacttgaacgtctaattgatagctcagacttcacaggtccaaaaatcaaacttctgacctttgccccaaatctgcttctcccaaagtctccctcatcttagatctatctctttcctgatc

SEQ ID NO: 103702 - DNA, 1049 bp, Homo sapiens
gttcttggctttgcccaaaggtgagccagtggtgttggacagcaacttttgttgaagcagcccagtacagtgcagcagaggtactgctccttgcagagcagggctacctcataggcagtatgcccagaagtagcagctcagaggcagttttgccattatagttatacccacttttaattacgtgcaaattaaggggcagtttatgcataaatttctagaaaaagtggtaatttctgggtcattgggtcattgcaatggaaaggggcagtaacttccaggtgttgccatagcaatggtaaactgacatggcacattggtgggccatgtcttatggaaagttgcttctgccctggaccctgttttagctagttctcaatttggtctggtgtctgagccccacctctggagtcaaatcccctctcctaccttactactttctagcagggcccactgactgtgaggggcctttgcaactgccaggctgccagacaaaagcctatatacctttgacccaagcttttatgtagagcttttgggaatcactagaggtaccagctcttgaaataggaaagcaaagaaaggtagtcactaagtcttcctcttcatttaatagcaggcctctccatttctctattggtatgtgagggtctcattcccagtgagtctgagaagctctcttcaccaacggccatttggtttccttcttcagaggcagccaaggcaggagagtgatgcaagtggcagtgtgatcctgaacttggaggggactcaaccgaactgaatcactctgaacccagctcagttgctctagcttctgagtacactcaggcagtgtacccacaagtcaattccacaactgccagggtgttgaagaaagccctggagcagtactcagggtttgggaaactgctctatgacattagagttgttttctttggaaattaaatcttattaccaaagaaaagaacctctctctttctcaagcacccactactgcaccaagaatcttctcctttcttagcttaaactgtttattcttttttatttgt

SEQ ID NO: 103703 - DNA, 1106 bp, Homo sapiens
aatctctttcagtggttttagaaaatagaagcaagagaaaatcctggtcctttggtgatgtagttatttgcattctccaggggcagaggaaaaaaaaaatctttacaaatttaaaagaacatgttggtaatgaagttctgtagaaggaaggagctgaactgagggggtgaatgtgtgataaatttgttagcttttccaccaacaggcttttcttttgaattccttgttacattgccatggtctcactaacattcttgggaaatcagggcacagtcagaacatttggcagcctgctgagtatgttctactcagatatttccagaacatttggctacatggtgggtgggttccacctggcagcttgtataaaattggcatcatggtggaaggagatggacacagaaacacatgacatagtatgggagccttgcaggctggcatcttatcagtctgctgtgcccattctttaatttacagaacgtggctgacattaagaaactgaaatcagtaggaatctgtaccatcaaaggtatacagatgacaacaagaagagctctatgcaatgtcaaaggactctcagaagccaaagtagacaagattaaagaggcagcgaacaaactaattgtaagcaaaatccattctttgctgttttagcttggcagggccttgtgaatctttataggctttctcatgaaaactagaaattattgtgggaactgagttcctgtagatcacagtatattatactccccatgttaactttttatcacttcagtttcaaagcaacagcaattgatttctgaaagatgaaggtagggattaagagacctggaacactaatgaaggtaattatttttgccaaaactttttgtctctctttatattactttttctggctgtctctgcctttccttctcctttccttttttttttttttttctgagacagagtcttgctctgtcgccaggccagagtgcagtggcgtgatctcagctcactgcaacctccacctccggggttcaagcgagtctcctgcctcagcctcctgagtagctgggactacaggcacacagcaccacgcccagctaattttgtatttttagtag

SEQ ID NO: 103704 - DNA, 1074 bp, Homo sapiens
ggcccgctcgtgggtgtgggatccgcgtggtacgggatcggagcgaagcggctgctttgggaggcggggttaggggccctgctgggccctgggtgccctagctccagtggggctcggcggctcccagtgccgcagcggggccaggaatggatgtcgctttttcggctaagacccgcgtctactccaccacagctagatgagaccctgtcggagagactatggggcctgacggagatgtttccggagagggtccggtccgcggccggagccacttttgatctttccctctttgtggctcagaaaatgtacaggtaaggaacgagggcaaaggcactgggtacgtgcatgggatggtcgtggtgctgtgaaagaacacggggtttggaagcagcagacccgtgttgggtgaccttgggcttgtaccctatcctttcttagtttcctcttctgtaaaatggggattcttacctggcaggggagttgtgggggttatttcagattgttggagataattaatgaataaggagctttgtaagaactcaggagaatgttaaaccgccatcactagatgatacagctaccatagctgctcctcctgtctctggtaggagtatggtgtaaggagcgggtagaatacgtttatcaaaaacattggagtatgtaatgtgagaggtttggttactgggtagttcttgcctgttttgtttgcatgtcttcatgctcaccctctggggattttcctctgcaggttttccagggcagccttgtggattgggaccacttcctttatgatcctggttcttcccgttgtctttgagacggagaagttgcaaatggagcaacagcagcaactgcagcagcggcaggtgagcccagaccttgggctttttgccagtggtggagacgcaagttatttcactaacacattggtccccaacctttttggcaccagggactggtttcatggaacacagtttttacatggatggtgggttgggggtggccgggggtcggggggggggttctggatgattcaagtgcattacatttattgtgcactgaatttctattatt

SEQ ID NO: 103705 - DNA, 1480 bp, Homo sapiens
tgtctgggggtgatgggagacagtgacagatcatcaggcattagattttcataaggagcttgcaacctagatccctcgcatgcactgttcacaagggtttgtgttcctatgagaatctaacactgctgctgatctgacaggaggtggagctcaggcagtaatgtgagcgatggtgaacagcagtaaacacagatgaagcttctctcacttgcctgctgctgatctactgctgtgtggctcagctcctaacaggccatgggccagtgccagtccacagcccaggggttgagggctcctgttgtagcacctgagttgaccaacagttaatgtgtgggtggggattgggatcgggcccatgctcttttagttgtctgactgtgctttcagtattatttttgtagacgttggccccatcaggtatggtgagaataagctctctaggcctgtatgatgccttacacccctccttttcttttccagatacttctaggacctaacacagggctctcaggaggaatgccaggggctctaccctcacttcctggaaagatctagattgttattgctgtttgagctgtctcagtgggataagtttgaaattcaagtgtttgaactgctgataatttggatttttttttttttttaactttggcacattgatctatctaaacctggtggggagaattatccccacattgtctcatggaaagactcaacttgcaactgtgccctccacactatccttacttctgtctccactctgataccagagtgcagccatgcagatggttattccagctctggtcacccgactcctttcaccaaattgctcctaactggaagatctcactttccccttgtggggtaggaaccgatgccagtgggagggatgtgcccctgaccattaacgactgttttttttttttttttttaaagaatggagttgttggggcaggacatgcacacaatgtgaaacagacaaaatgcattacacctgtagtgtaaagtggccactatgaatccctatgtatgagaggagggaggcaggctgcagcttcagccacagaatggggactatggaagacagcaggagctcatttcctctgcacattttggctgttagacctgtgtgtgtgtttaaaaaaagagaagtcagtgctcactttttgtatttaaatattaaaaatgattccaactgaaagtgtcatcctaagtaccttgaaatgagaccacgtcagagacatgtactgcccctcacattttctcacctaaaccagcagcacctccatcttaacagccataggcccaaattgtttccaagtgaaaattcatttttagccaagtacttcatagcaatctttgccctgaatttaggcagtcactttgagatccatcagcctaaaacaaaggattgggtctatgtacttctttagtctataatgacactgtgtaattataaagtatttgtagggaataacat

SEQ ID NO: 103706 - DNA, 1126 bp, Homo sapiens
atcttcatgtcgtttcctctctgtatcaatggaagttcaacccgcccctacctcttcagatagttgtaggccacttttctcttgtaactttggaaaacaaaagaggagaaataagtatcataccatatgcgtgtctccaaagtggatgtggttgcctcaaggcaggtggcaggcaggggtgacctgctggccctcagatcaatggtcgtggcaggtctgagagctgtcccactggccagacttctctccagcagcaaagccagcctggggcttgcatgttgatcctgagcaagcttaacggggtgaagctgggctttctcccccctgtgactggagtgcatgttgacaccagcactttttctgcacatgtatcttcaatccaacaaggccgtttttttaatgctgagtaacaggccaccaagcggctactgcgttatatcttctcagcaactggccgcagtctcttctgcaccattttctacaccagacctgcttggcaccacagggagctcttttcctgccctgcacaatgacattccaaccaccaccagccagacattacagccaaccttgctgattgtcacaagcaggaccttggggccactggcactgtcagatagtaagccatttcttgggtagaggaggaaactcctctccacaaatccacttgggcctgtgcaaatggcacttgaaagagtccccatgcacttggagtccatgagccaatgggatatgcaaagacgcttaaacatttcagggctggtttctctgttcatatccaattctggtgcttaggaacagggacccatgctgatgcccaagggcaaaaagccccacttcctttaaggaagtgaacaggcctgaccctgatgcccaataacgggcaaccctaggctttttgtttttcttgcttttattcctttttgttgttggccttgtgctgcgtttgtttacaaaagatgtattttgtttaaccaaatattaaaaatggaaaactccatatatgtctccttgtctgcctgaattctataattgtgtaaagaaaaataaactttagtatgacgctgttttaaaaggagttcattgccagcgtaagtcatcttttagagacatatcattctttgat

SEQ ID NO: 103707 - DNA, 1050 bp, Homo sapiens
tcgctcagctggggaggagcatgtccgagaatgtctacttttcgaggccacccgaaacaaaatggaaagatggtcaggctccttagtctcgctatcctgtgagtggaagctcatcttgtatgagtggagcagtgaaggacgtttaaaaccgtgttttttgagctgtcgagaaggtaggcaggaattaaggcctcgccaacggcttgacattgtgaagaatagaaaagtaaatacaagatgtgactggtgttttgaaggtgcttaacgttccttagggaaagaatgccaacttgggagtcagacagggctgggttccctttcctgccctaccatcgaaaggctctgtgacgttgggaaagtttcttaacctttcagttctccaaccacctcatcttaagaaagtacagatgggttgtaaaaattagaaatatttaagaagacacctaatagtgcctgatgcatactagagactcagtaaatgtttgaagtgaacgagatagttcctaatttcctgtgcagattaaatagcagtgggtgaaagatagaacaccaataccaccacttacatttgtaggatagttacgatagacattttatccagctttgaaaatgtttgtgactttttatagtttatggcggcaaatttgcatgaaacttggtcctaaactggggaggaactttccctgcaacctaagcaagttattttcaactgctctttgccattgtagtctcaggtgagcacttggaagccagctagcctgtcaaagttggtcctgtcttgtgcctgtaaggccataatgaggatggccaaacttagagagagggatggccaggacgatgtaaaagacccaggaaacatccaggttacaattacaagctctgatgagtcaactcaggaagttacaagattatggacctgactcaagagcaaacaaactggatgtcaacacatggtcaaggtgctgaagaaacatgataggaaattgcagggcagagttgcaaagacggtagtaccttcatttcttgaccagctcatttaatattcctaga

SEQ ID NO: 103708 - DNA, 1028 bp, Homo sapiens
tcaggtagaataacagcctgaatcaggctggtggctgcggattggcaaaaagggcagacatcagggaaggaggcaaggtaaaatgctagaatcatcaggactggactgaggagactggtggctagagagatggtattgtcattgtcagaaataaagaaggaactggtcaggcagtaagaggaaaaggctctggttttggaatctgaagacctgaactcatggcctcccccaagctctgagatctccctaggttctttttaccccactgttaaaagggaacagtaatgcctacctcataagattacagtgagaaataaaatgctttattaacattgttagtgtctgtgctgttgtttaaaagagggttgggttgggtgttgagtttggatatcagacttctaggagttatccaggcaattggaaattcagtctggagttctgggcataggatggtgttagaaatgagtgtttttatagttttcaaaatgacagccaaagccatagaacaagatggccaaggggaaagtttggaggaaacagaacagggccactgacagactactggaaaaaactggcattcaggagacaagagcgggggacggggtggggaggcacatcaggagaggtcaggtgatgcgtgagcagggtgggagggaagtgcttcaagagggaaaggctgagtggccagcagtatcgaatgctgtaggagtcaagaagagggcattagagagtttagaaggccactggtgggccaggcatgatggctgacgcctgtaatcccagcactttggtgggaggccaaggcgggcagatcacttgaggtcaggagttcgagaccagcctggccagcatggtgaaaccccgtctctactgaaaatacaaaacttagccaggcatgatggcgggcgcctgtaatcccagctacctgggaggctgaggcaggagaatcgcttgaacctgggaggcagaggttgctgtgagcaaggattgtgccactgcactccagcctgggtgacagagtgagactc

SEQ ID NO: 103709 - DNA, 1029 bp, Homo sapiens
taacccacagccatctgatcatgttactcccctgcctcagcctacgggtgtctcaatgcctggtgcagaaggtgtgtcgctgctgtccgtctgttgtgctgcttccacctctcatgtagtctcccgacactccatgtcacccatgctgctcctcaacacactgagctgcttcctggtccctgaacttgccatgatctgccacgccacgctttgttcctctggctaggatgtccttcctccttctgcaggcccagcacttgttgacctagcttggcatcagccctttgcagaactgtcctcggcttccccaggcagtgctttatgttctcttcacacagtcctagagtgcagcacttgagctgtattgcaattaattaatttcctgtctgcctcccccactgggctgtgagctcactaggggcacctgtagtcctagtacccagcatgaggcttggcataaaacctgggagagcctcggtggctgttgttgaatgaagtagcgaatgctctgcttgatggagaggtctgtggcactgtcatgttttaacttggtgtgtgcccaggttttctctcaggtagagaggacccctgttcctctgcagtgctggggtcggggggtggtggcctttgttaggtggggttcctggctggctggttggcaggctggttggtcaggactccctctcctgctgatgtctgggctcttgtcaccagatgggactgagtatgggctgagtgaagctgacatggaggcctcctacgccacagtgaagagcatggcggaacagatagaggccgatgtcatccttctgcgggaacggcaagaagctgggggccgcgtgcgtgattacctggtccggaaacgagtaggagacaatgacttcctggaggtcaggtgaggaggccgcgggacattttggggtccccattcttcacagaggttggtgactgagcctgtggcacttggcgtgtcagctccatcctttcccctcctgaggcggggaaagagtgtccaggtgtctggagacg

SEQ ID NO: 103710 - DNA, 2344 bp, Homo sapiens
aggcttcacgggggtctgtagccccagagataagcccccacccttccacagcttaagcgtatttcatgctttcactcactgcctcccgttgtcctgaagccaccaggtggctccagcctatcctgacctctggcttccttgacagtgcactgtgggagcatcaggcagacagccaccattctgagcatggacaaggactgtctgcgcactggggacaaggccactgtacacttccgcttcatcaagacccctgagtacctgcacatagaccagcggctggtgttccgggaaggccgcaccaaggctgtcggcaccatcaccaaggtatggccaggacagaccttgcctgcctccaggaagcaccaggggccactcctgttctgtgaccctgagtgcagggcagaggtttagtcactgccatgggagagctggacccactgaggtgtggcctcggtgccatctctctactcccttagaggtatcctgtggcctcctgtcctgggcagtggtggtgaccatggagaggagaaggtagggttagggtatgatcttcctccatagaaaactggtgacagaatgtctgggcccagccaggctcagcctccagggtgctgtcacaggttcctatggcctcactgggaccatgtctaaggtctcctctcagagcagaggtctggttggagtaagtgcagggggttatgggcgtgagttctcttggggcttaagctgttggtgtatcctggacacttgcccactgcagaccttgcccctggtcttggaggggcatttgatagaggggtttgacccctgctccgtacaaaggaggtactggccccagcctatctgagatcttggaatcagtctttggctggccttgcctccagaaaaggcccccatccatggtcaccctggggctacagatgtccttgaaggcctgcatgctcctgggactgctgagtttggccaaggctgcagcaaacactgtaatgtcctctgggactcactgggcttcttttgtgctttgtatgagatagaacttgggccacaagggaagatttcaagtcagttacttctggccaaactccagatgtttccagctgaggagacattcacttggtctcttcgggaggccctgagttaacacttgccctagacttgttacgggggcagcagcagcgtgctggggctggagctgcagcatgctctgaggagtctccaccagcttagcaatcaggagatcccggagctccacttgccaggctctgtgcaggctctgggctctgggggctggactgagcgggaggtgggagcaaggttcaccaatttctctgcaggaatagtagctgcagcagagaacaggatggagcctttctgggctgggcagaggcaggaagtgaggcatgagtccagggccatagcagtcctcagccactgagtggggatgagaatgcctcttcatccccactgcctcctgtcacagccttcctgccatctgccttgccctgaactggcaagatcaaggaatgaggagtctgtgggagaagggggctgagggtggggggtagccaagccagtgccactgccccgcagctccagcctcagcctctctccatggctcccacagctcctccagaccaccaacaactccccaatgaactccaagccgcagcagattaaaatgcagtcgacgaaaaagggccccctgacgaaacgagacgaggggggcccgtctggtgggccagcagtaggagcacccccacctggagatgaagcctcctctgtaggggcagggcaaccagctgcgtccagcaatctccagcctcaggtgagcacgggcccctcgcagcttcggcatggtggtgggggctgtggcttttactctgattcggtgagggtgacatgtaggcaagcctcaaacctggctagagggtctcctccacagctctggcactgaagtgctcctaagaatgaggcatttgtctctagaagctataaggcagtgcttccaaatcagggaatacagcccacctgaaaccagtttaattggccctaactagcatttggttttaatgaaataaaatagaacagaaaaatgtcgaagcttccctttcatagtaagattaagtattgcaagtattgctggtgtgagtgtccaagtgatatatgtgtgcactgcagtccagcaggtttgagagacactgccttagagggtcctcctctgtcccctccctgacgtgcacacatcctgaaggggaggtggctttgggatgtgccagtgcgcctcttactcggcatctcctgccagctgtctcccacaggcactctctcctggcgtgatgaaggc

SEQ ID NO: 103711 - DNA, 1072 bp, Homo sapiens
atatgtctctgtctctctctattgtgtgtgtgtgtgtgtgtgtgtgtgtgtgtgtgtgtgtggtgcaggagtgccacccccagggccctgtcaacctctcttttctcctccatggctgtctgcctgcgtatctgtctctgagaatcctcggggcggtcaggggatgtcaggaggggaaggagccgccctccctatcttgctgctcctcttggcactcaggggcaccttccatggagccagaccgggtggaggggcttctgggatttggtgtctgctgctgccagagcaggaacccccagtctaggacttgggcattttaacagggagaaagtagtggcttcccttttctctctctcctcctttttccctttaagcccacagattcaggtcatgccaaaagctctctggttgtaacctggagacatgtggaggggaatggcgatgggattataggactctccccatctcgggccctgaccctgacccttgccaccaacccaaagacagctggtgggtttccccttggagacaatcctgcgtttgcctgggccggccctggctgccctcagctttcgctgatctgcccggcctggagcctcccatcaccccgcttcttgttgggcctcaggcactggttaccagaagggggtctgggtctgctcaggatcatgttttgtagcacctcctgttggaggggtggagggatgttcccctgagccaggctgagactagaaccccatcttccctgagccaggctgagactagaaccccatcttccccaccacgccacccctgtggctgctacaggagcacagtagtgaaggcctgagctccaggtttgaaagacccaactggagcgtggggcgggcaggcaggggttagtgaaaggacacttccagggttaggacagagcatttagccttctggaagaacccctgcctggggtgggactgtgcaggccagagaaggtggcatgggcctgaacccacctggactgacttctgcactgaagccacagatggagggtaggctggtgggtgggggtggttcgttctctagccggggcagacac

SEQ ID NO: 103712 - DNA, 1044 bp, Homo sapiens
caggagtgtgctaggcctgtggcatctgcccaggtaagatatgctgctaacaccattcccaacactgtggctagacagaggcccgatgggcactggagaaaaagaatcaagtgtgccccacatcagcatctatgaagccctctatgaaggtggttctatctgttgatcacaataaaaaaacgattgtggatgaattcattccggtttcagatgaagtgtgctacaggtggccccttaacccactggctggaaacactgctcaggaggctaaagataggagcttttgaagcctggttctcttcagagccccagggaaggagcaggggagccatctggccctaggcgaggctgtctccccttcccaccttctctgtcagtgaggcctcacaggtctctgatgctcttaatccctttcttctctacccaggcccctacgatggccacgtaccaggtggtggagctgcggatcctgactaactggggccaccccgagtacacctgcatctaccgcttcagagtgcatggggagcccgcccactagccctgcttactggtgcctgctgccagccatctgggagtgggtgaacagcaccccgccgcttcccccacacgcttgctcggcgctctgacttctaggagcacaagagaggagcctgtggccccatgcagatgaaaaggacgggcagggtctcctgagcagcaggtggctcgaggcggttagcaggctccagcagctcccttcttccttccctctgtgcccgtggcgtctgcttcccatcctgggagtgtgtatatatgtagcatatcatgggggactgggaagttgggagaggtaggacctgactggtcttggctggggtcaggggctggtgcctgggagctgatgaagcaggtgccagggctgtgggaggggcaagctacggcctgggctaggtgagctgcctctgcccctgggcaaggaagcgaggccctctgggaggagggtgcttagctccagagcaggatgggacttccccaggcaggaagcacttgatggagagctgc

SEQ ID NO: 103713 - DNA, 1018 bp, Homo sapiens
ccgcgtggggctccttcagagagaggagatgcaagctcagctgcgagagctggagagcaagatcctcacccatgtggcagagatgcagggcaagtcggccagggaagccgcggcctccctgagcctgacgctgcagaaagaaggtgtgattggagtgacagaggaggtgaggcccacatgcccctctccacacacccacccacagctctcctccctgggagccctggacagtcccacactgccagctccctggcaggttccaggatggaagtgccaagcaggaggctttgcatgctgtggggctggcatgggtgggtggcagtgtgcccacatctgcctgggcaccagcacagtgcaagcctagaaggggtcagcccatgggtccttggcccacggccacgaggtgacagggggacacgtctgctccctgctgcaaccgtctcctggtgcctgcattgcagcaggtgcaccacatcgtgaagcaggccctgcagcgctacagtgaggaccgcatcgggctggcagactacgccctggagtcaggaggtacgtgctctgctttcctcgctctgccttgtcctggaccccgcaatggccggtcccctggcatctaccaggttggtggtggggcagagcaagcaaagctcaggatcagcagaaatcacccaacctagtacccatgacaaaggcaagtggcaattcagggaagtcaggacgtaccgagtaccatcctgggccagggagaggctgacctttaaagctgctctgagcatctcggttagggttaaaggctaggcctggggcatctgccgtccaccttcagcgaggagacagccaatggcctgagcggggccctcctcccgtgcgggagcccaccctgccttcctctcctgtctcaggggccagcgtcatcagcacccgatgttctgagacctacgagaccaagacggccctcctcagcctcttcggcatccccctgtggtaccactcccagtcaccccgagtcatcctccaggtg

SEQ ID NO: 103714 - DNA, 1491 bp, Homo sapiens
ggcgtgcaccaccacatccagctaattttgtatttttagtagagacagggttttaccaagttggccaggctggtctcgaactcctgacctctagtgatctgcctgccttggcctcccaaagtcctgggattacaggcgtgagccaccacgccaggcctcctcaccttctctaagcctcagtttcctgctctttgatggaggccatcgtgtctcccccacccccatagtgagctgtgcgagtagaaagccccagcatggtacctgacaccgcagaggtgtgcagtggagctgaagcgggagtcttgcgtggttcagagaaggctgagagccagggctctggaagcaaacagaccttgtttgaattccagttccgccacttcctagtcatgagggtccctataagcatggctctgtccaacctgtcctctcactcccgtctcacaggaagaactgtctgccctgagagcagagcatcagcaagactcagaagacctcttcaagaagatcgtccgggcctcccaggtcagcgggcttgcggcactcagggcctgtgactgggtcctgaccccatccaacatgttcacctcggacccctcggcccttccaaagggactgtttgggtgttgcatggggaggggagtgccctcctctgacttctctgtttgacccccgaccccttagttggagagctgtgcaggggctccctggggtgtgccagggcacagcggcctgtcatgctggtgtgcatgtgctgagtgtgggtgaacagatacctcagtgtgtcagacatggacgagactcatgagggctttgacaaggaggccagtttgatttttgctgcaggggtcaagagaccttgggcaggggtgtggttaagcaaagacgctaacagacagcagatcctactctggaacaccaatttctgagatgagtatttcttgtatttgtcccttcttcctacacaggagtccgaggctcgcatccagcagctgaagtcagagtggcaaaggtactgggcgccaccagctggcctcggcctgctcctccccagccccacccactctccaggcaggactggggagcagagccgcagagcagagagttctgatcatcttgccaagcagatggtagggggaggggttgaaacccagctcaggacccctgcccagggcctgtctttgaggtgccatggaggttagcaggggggtcctgagggcggggggcaggctgtgtgagaggaccgggattcatttatagacacagcatcctttcttacagcctcacataactgccttctcatgccccagatgtccatgcttgtggaggatgtgagaggctgaggcagagtacattctggactctgggcttagaaagggagcaggctcagaattagctccttgggacaggcaggggttctgcagccagaacccccaggagaggccttgccccttctcaggttcacaatgagtgctgggcacccgctctcctgac

SEQ ID NO: 103715 - DNA, 1011 bp, Homo sapiens
caaggacccaggccaacttcctgcttttcctactaccaatcggtcccttttccaacaccagctaaaagtagaggggatgccagatgggcgtctgacctgggaagatgccaacaaggccaggacatgaggctgcttgtttttcagaggaggactttctagctggactaaccagaccttcgggtttctgcagcctgggttgggaagtggacttctatactcaccacacaacccagagaactggtcatttaagtatcaaccaggaatattagaagtgatcaaaagtcacaagcaagtgctaggaattcccaagtgactttgttgtacgggccagcagaggcactaacgttgagactccccatgttggcagtcggggactttgaattcgggtgtctagacctgagtggttcattaatcttcctcatgtcacagaatgctacctcttgccagatctttgcactttggcttcctttgtcctcattatcagttccagagccttgatttctgccccacatggtgaccggaactgactgtaattcatgctgccctcctcctccctattttgttagtttgctaacaaatatttgttgtgtaacaagtttgtatacagccttgttttgcgcatgtgtgaggctaaaaaagattctagctgaggacacacaactagaatcttcaatacattcctgaaacaactggaaaactttatgcctgagtagaaagacccaggccctacagcctgtcagagctgagcccaaaccctggctttggcacttacaggctggggactgtggacaagttacccattgcctcagtgtccaggttcttcccttgtagatgggagtaatgatacctaccttgcttctaataatataaatgaggtatacaaggagcccggtcccagcagacacttaccattttatcatcatcttaccaagatgtggcagcacagtgtgcaccgtggggacagacagtgcaagcgccatcaggacgtaggtgggagcctggccaacttgg

SEQ ID NO: 103716 - DNA, 1844 bp, Homo sapiens
gaggtcaggagttcgagaccagcctggccaacatggtgaaaccccatctctactaaaaatacaaaaattagccaggcgtggtggcgcgtacctgtaatcccagctacttgggaggctgagtcagaagaattgcttgaacccgggaggcggaggttgcagtgagccgagatcgcgtcactacactccagcctgtgcaacaagagcaaaacgctgtctcaaaaaaaaaaaaaagaaagaaagaaagaaagaaaagaaaagaaaactgaggcttagggaggtaagcccttgtctaaaacagaaccaagatgtgaattcagatccgacggtggagtctgtactcagaaccaccatgacatgctccaggtgtgtcctgcaatctctcaggtgcatggtgggtggtacagggaggcgagccgtgatctaagggccgcggatgttccagacattgaatggctgcccccctcccagggggctggcagatattttgggccttatttcccagaacgcattcatttttcccagtccctcccacacaccctaaccctctttaggattcttcccagacgcttcagacacagaatagtgaatggtgactgaggtcagtgccacaaaagaacaagggatagcaggaccaggaacactggccttgaccaggcaatgagataaagggcccttgtctgtgcccactgttgcttaggaagagcctcacatcagagggggtgaggatatgtaaagcccacagatggcccttgagtgaggaggagagcaggggtagtgggagagggaataaggctgcccctggctttgcaccactgtgggccagatgggctggagtcgagcttctgtacccaggagattcaagtaccctggcggtgggcacagttttgtttttgttttgttttgttttgttttgttttgagactgagtctcacttcttcgcccaggctggagtgcaatggtgtgatcttggctcaccgcaatctctgtctcccgggttcaagccattctcctgcctcagcctccccagtagctgggattacaggcatgtaccaccacatccggctaatttttatatttttagtagagacagggttttaccctgttggccaggctggtctcgaacttctgacctcaagtgatccacccacctcggcctcccaaagtgctgggattacaggcgtgagccactgcacccagccacaattatattattaaaaggctcttttagacctgacatgactctttctggctccaagagttcaggcacatgcttctctgcatggaagattgataaggttgttagaacctctggttctgctatttttggtaacattctttgaggagagttttaggactgtggctgaatgactctagctgtactataatgatacagcgtcataaaaaattctcctgcctttctgtatttggaaacacatcatctataacgattcctttttattctgtctcatctcttttaggtccccagaagtatgtgtagtggttagaaaaagctctttgtagtcagggcccttagtaaacttggctgaatcatggtgaccaagtcctggctgattaacgctggtagcagagagcactgtgataacagcgcagagagctttaacgtttcaaatcgctcacatacacatacctggggcttgcaacagcttcctgagaacgcagagataggatttagtatcccgtttcatagagaaggaaaccaaggcttaggtgaaattacttgctgacggctgcaaagaaaggaagtgagcagaatgctcgtctttgacagagctggtctccatgcctgcacactccggcttgcggcccacacagttcttagctct

SEQ ID NO: 103717 - DNA, 1014 bp, Homo sapiens
ctccagccctcctcagccctgcctctggcctgtctaccccgggtctcccaacaagtttaatttgttgacggtcacgtggctgggaagtgggggagacgagatttggtctcaggacatctaaggtccagagcccctgcactttaatcacacccctcaacacagaggtggagcagagagagccctgaaggcactgggcatgcagcaggtgcctgggagctgttagccatctttctgaagtgtgccctgtccaccccacccttttcggtgtccaccgacctccaccatgtctgccttgcccaccctcagggtcctcagcctacagtcctccagatgccttcaagatcagcatccccatccgtaacaactacatgtacgcccgcgtgcggaaggctctgcccgagctctacgcattcaccgcctgcatgtggctgcggtccaggtccagcggcaccggccagggcacccccttctcctactcagtgcccgggcaggccaacgagattgtactgctagaggcgggccatgagcccatggagctgctgatcaacgacaaggtaggcagggctggcagggagggctggctgggggagggccacccttccagaagcacccactccacactgggctctttcattctcctgctcattctcctgctctgcatattcagcacacattaagtacctaccgtgtgctaggctgggctctgggaatataaagacaagccagacatggagctgccggaagagaggctgtgtccaatagaggctctaagtgttgttccattttacagaggaggcaagtgaagctcttggggatccagtgacttccccagtgacccagctatgggacagggctgaggtgtctgcccccagggccctgctcatcatcctggacttaaagagaagggaggtggccgggcgcactggctcatgcctgtaatcccagcactttgggaggccgaggcgggcggatcacgaggtcaggagattgagaccatcctggctaacatggtga

SEQ ID NO: 103718 - DNA, 1035 bp, Homo sapiens
gtgcccctggcggccagcccggcgcgggcgctgcccggcggcgccgacaatgcttcggtcgcctcgggcgccgccgcgtccccgggcccgcagcggagcctgagcgcgctgcacggcgcgggcggttcagccgggccccccgcgctgcccggggcacccgcggccagcgcgcacccgctgccgcccgggcccctgttcagccgcttcctgtgcacgccgctggctgctgcctgcccgtcgggggcccagcagggggacgcggcgggcgctgcgccgggcgagcgcgaagagctgctgctgctgcagagcacggccgagcagctgcgccagacggcgctgcagcaggaggcgcgcatccgcgccgaccaggacaccatccgtgagctcaccggcaagctgggccgctgcgagagcggcctgccgcgcggcctccagggcgccgggccccgccgcgacaccatggccgacgggccctgggactcgcctgcgctcattctggagctggaggacgccgtgcgcgccctgcgggaccgcatcgaccgcctggaggtgagcgccgcgcgccgtcgggggagccgcccgggtggtgtgaggggccgcccggccgcggtcgtccggcggtccccgagcctccggtctcccgtctgtgttccggggacgatcgcgccttcctcgctggcgaggcggggggatttcgatagggaacgcgggcaggcgtctggcacggtgactgaggcacagagggcgcgccagaaagattcgctccccacccttttccgtctccaggcacctctctgagcctcagtttctgtgtctgtaaaataggtataacagtgtccacttgtagtggaaattgaatcaaatgtaggtgtgtgaaaatgcttggcacgtactaggacctcattaaatgtccctttcatttccttcttccggacacccccaaatcagcccagctccacgctcacactttatggccaggagatggatgcgctgtccaaaggacttggggtcctcccctcattacacagagccggg

SEQ ID NO: 103719 - DNA, 1076 bp, Homo sapiens
taatcccagcacttggggaggttgaggggtggatcacttgaggctcggagtctgagaccaccctaggcgacatggcgaaaccccatctctacaaaaaatagaaaaatcagctaggcatggtggtgtgtgcctgtagtcccagctactcaggaggctgaggtgggaggatcacttgaccctgggaggtcaagtctgcaatgagtcatgatcgtaacactgcactccagcctcggtgacagagcaagaccctgcctctaaaaaataaaaagagtggttaagatggtaaattttgttattgtaacatattttactatgattaaaaatttgaaaaacaaaacaaaatcaatagcagttaagatggtaaattttgttattgtaacatattttactatgattaaaaatttgaaaaacaaaacaaaatcaatagcaaaaagataactaaaacccaaaacttcatctatccggacagtaacccagagctctctttcccctgcatcttgctccctccccaaccttctgaaatctttaggacaatgagattcaaagatgaatgtgaacattcctaatagcgagcagacacgcagggggcgcacagccaatctgacttaaagctggatgggaacaggtccccctctgatccctctagaagggatgtggccttcattagagcaaattggtaccaaagtcttttctgtcttttccaaaggatgagtgagctcagagcttgacaaagacatgagcctccatttaaatgacggccgccagcaatcagcctttatgaacacaagggcctgggaaacatcggtgcggagccagggtgggctgatggaaacagaacaaagccgggtggcaggggtcctcagtcctgtgaaataaggacaagccccccaccagcttatcctgcctatcacgcctcagggcctgaaactgcagcgccagcaacaggctctttcagagaagatctggatatccctaggagttctcggtaaaggctcagatactcccagccgtgagcaaggaaacaggacacactttggaaaaggcaaatgtggaccctgtcccccaaggggactcat

SEQ ID NO: 103720 - DNA, 1035 bp, Homo sapiens
agcgctctggtctccccttcctcaccaccccacctcctgtctggcctctctagtatctccccgccctgcagcctggggtcctgagcgcttctgctttggcagcggctctggcctggtccaccagtctccatcctggcctgcacctgccccctgtgtcttccacaccagtgccataggggtcagggaggctaccgccccagcgccacggcctctaggcaggcaggagtgtgatctagttccttgtcatgcctggtcccggcgctggggatattcaatgcagacagaccctgctgttaatttccaggctgcaatgcccagagcccccacagctcaacacagcctgtgtgccatctgcaaatggctgaggtgcaaagtctcccctagcctccacctccccgcccccctcctccttgcctccctttgcctgaagcccctcccctgccacctgccctcccgggccctgccctgtctcctccctcggtattgacctgcggttttgtccttcccccttcctaaggacagggctgggtcttcatcccctctctgcccacacctcagtgtctggcacatggtaggcccagatcatctccgtcaccaagctcagtcctcttcctatgctggctgggacagtgaggcttgggagcggctgagaggtagacctggggctcagtgcaatcaaccaactgcctctgagcattaccagtgggcctggcctgggccaggcaggggccagcaggacaaatgggagtgtgtccctgtcccggatacggggctgccactgggcaggcaggtgggaagggacccacagtgaagcacccacagggcaggggaggccagccagtaagccagggctggtcctgctcagtgccactgctgcacctcacggccacctccttgtcatcttgagcacctgccttggtgttctactcccagaaagccctcattcgtacttatttttttgaaccccaaattattagcgcacctactatcggccaagccctggtgagcacgtcactggccctagcccatgtccct

SEQ ID NO: 103721 - DNA, 1686 bp, Homo sapiens
cggcagggactggggcccaggatgctttggcctatggggaaaagccctttaaaaggcagggcccaggccctggagccagcacaagactggcctcgagcccctgagccaggaggtcctggaggagagccaggccggtgggcccgcccaaggctggagggtcagccccaacagggagctgggttggccagggggctggactgctaccagcctctctggcctatggggacccaagaggacacatcccccttttgcccactcttctgtgtcattttgttgttttggtttgtggtggtttttcttttttcttttgtttttcttttttctttctttctttttttttttttttttttttttttttgcacttcgcccacacaggacagtggagccccacctggtcagttccacttccgggctcccatgcacttgcccaaggcggcctctttgggacggggatggtttgaggaaacacttttaaagaaaaaaggaagacattgaaaggttttagtttcttccctatctgcatgtcctctcatatagaaagcccagaattaggggctagaactccaggagagggtctccccgactcatctcttgctgacggtcaccaggatgcagaaatagggagatggttagtgggggccaaagatgccccctcccaggccttcgtggttccctcctccgccccctgcaatctttggaggagtcagtgcctcactccagcagtgagtgcctactgtatgcaggtagtcagccaggcaaagagagactaacggtctcatgggggaaccctcttgcgggaggccgggtagctggagcgaagcgttccggctgcccttgctgctgggtggagtggagagggagacttctttttgttggttttaatttaaaaacacaaaggcctaaagaaatacgtatcttataatttttttaatttttgagacgttcatttaatgaattgtgcacgaatgaattctatatatataaaatatacatatatagctctatatttggggaggggcactgtctcttttttctctcatttttaaaatgaagtgttgttgcctttgtatgtggttcaaccatccagctcccagctggctaaactttgcctccagtggtcaaagatgggaaaagagtggggttggcaggagatggaaaacggaggtgccgccccagcatggggggcaggtcccccagtccaccctgcccctccccctgtggagaagacgcttagttgggggtgtgggtttgggctccattctggattcggcggttccgggggaggggtgggtctgtgccgattactctgtcttgtacgtttgttctgctgctcttcaatattgtatcaacgccaggaaaggggggtgaaaagcctcttttaccccccaaataaattgtcacattccgaagctgaggcctagcccctaggttggggtgtgtctgtgtcttcttccagctgtgactggcttttcaaaagtagcaggcccatgtccctccagtgacaggtgaagagggggaagccctgtcccaccgctggcactcacttgcttcccggttcctatctcccacactcccccagctcacatgtgcctcagtgggaaaaagagatgcctgctgcttcttggacccttgagaataacgggtaggtgagagtgggaggatggaggtctcatcactgcctgtccc

SEQ ID NO: 103722 - DNA, 1146 bp, Homo sapiens
ttttcagaggtgattttatgacaggaaagtgaaagaattagttttgcaaaaaaacaaaaacaaaaaaagaggaaaaaaaaaagaaatagaaaaaaatattgtgggattcctatgggggggtggcgggggagaaagagctatttaagaaaaaatagtaacgcagtgattgcacaggtgaggtggcaatgtcaggatggggcggaggcctgggcccagctggcaggtcccctggcatcgcaggcactgtggagagggcctggacccagatctccacacccgtgcttgctcaaagggaaggacaacagcgggcccccgggagctaacccaagctgcaggtcccggcaagctgaggtttgggagggtgggggttgtcactggtgattttctccagggggctggtgagtgggcagtttggtttcttgcccccttctgttcctttcccagttgttgggccatctggtccccaccaccgccaccctatgggggagacctccctccccacgggtcaccctaaagcccacaacctctctgagcctccctggcctgaaaggggatgcaggcttcaggaggcaagaagctgggcccctgggggtggctggggagagggaatgcatttcccttgccacaggtggtctgcttctgctggcctgagctccaagtggagcagcccgggccagccttggtgcatgaagaggcaccaggcacaccgccttgaggtgggcagtgcccatgggggcccgagtggatgggaccgagggtgagtggagcctccttcctcccctctctagtacccccgcctcccacacacttgcacggatcggcctcccttgggagatcagcctccatgggcccctcgtccacccttgctgctttccatttgcctaattaccaagcagaagttgcaatctggtttgctttatttttgtatgtgaaataacccccaaagcccaatctcctcctacgttcaatattggttggggcatccgtcatctccccttaagtgcgccccctccccacccaagtatcataggaaaccggtgaggtctggtgtctctggtttgagacggtaagttgggacccatccctgtctgggtgcccactctgacctttagtttgcccttctgtgaaatgggtgtattgggtagc

SEQ ID NO: 103723 - DNA, 1218 bp, Homo sapiens
ctcaagaaggacatccgccgctgccaccgtatgtcccgccgtcccctgccccgcccggacccgcaggggggcagccccggactgcgcccgcccatttcgcccttctcggagacggtgcgcatcatcaaccgcaaggtgaagccgcgggagcccaagcggaaccgcatcatcctgaacctgaaggtgatcgacaagggcgctggcggcgggggcgccgggcagggggccggggcgctggcccgccccaaagtcccctcgcggaaccgcgttataggcaagagcaagaagttcagcgagagcgtcctgcgtacacagatccgccacatgaagttcggcgcctttgcgctgtacaagcctccgcccgcccccctggtagccccgtcccccggcaaggctgaggcctcagccccgggccctgggctacttctggccgcccccgccgccccctacgacgcccgcagctctggctcctccggctgcccctcgcctacaccacagtcctctgaccccgacgacacgccccccaagctcctccccgagaccgtgagcccatccgcccccagctggcgcgagccggaggtgctcgacctgtccctccctcccgagtcggcagccaccagcaagcgggcaccgcctgaggtcacagctgctgccggcccggcacctcccacggcccctgagcccgccggtgcctcctccgagcccgaggctggggactggcgccccgagatgtcaccctgctccaatgtggtcgtcaccgatgtcaccagcaacctcctgacggtcacaatcaaggaattctgcaaccctgaggatttcgagaaggtggctgctggggtagcaggcgccgctgggggcggtggcagcattggggcgagcaagtgagggggctccaccaaggaggggggcttgggggggccctcctgcccgaagtcatactcttgctcccaccccacccttgcccccagccctctctccctgtgctttgcttgtctcaaatggctcggtgttgacccagggatggggctgggtagttggggtcccagaaagccgggggtaggggccaccctggaatggggcaggggaagggcacaccccctgcccatgcatggtagcccactgggtggtttctggaaagccctagaaactagggttcctctgccccttccacatcccacctgtctctctagcttgcttcctgctctcctgtgcggcgtc

SEQ ID NO: 103724 - DNA, 1098 bp, Homo sapiens
taagccagcaaacatctctcctgagagttgtgatcaaatggtaatctagtcttgtctgagaggcatatgggctacctccaggtactagttaagcatccaatgctgtggggagtgggaggtagagagacctcacaacagatcccaccctcatggacctcacagaccaaccgtggggacatggccttcttctcggtcccaaccatctcccacctagattgagggcagccatcacctaacaagcctccctgccccagtaggatctctaaaacccacgccccttgtggcaccccacacacaccccagcctctgtccccagcccttgctttcagtcctgtgactcctcgccatcttctcacaccactgggatcttgcccagaggactctctgcctctaccatctgtctgtcttagcaggccaccgcagcctctggaactgtctggggtgcagtcagggctcagtaaggaccaggactttttcctacttaggtgtcagggccgggctttgatgtttcattctccaagcctggggtctgtgcttctctgggctctgtggttctttcgctgcacgaaatcacttcatattcccactgcccaccgtcctccctgtgatagggcagctctccaggggagagtctgtgcgtgtgcagctgtaaccccaagcaactggtgcctggtgcctcagtaccttccttagtaaagaaaggactggccatgcagacagcttacatcgccttaggagtcccttagcctctctccatttagtggcatctgacaacgggtgggttggaccggaacctggggtctcttgagagccctgtggctttaaagagatttcatgcctggaaggacagctggaaggacaggcctgggagcctggggcagtattcctggctgcccacgacctctgcaccatcatcctgccccagaccatcttggcacagagaataggcagtggtcgggcccacttctaggcctgtccccaccaaactcacgtctgaccgggttgggttccagcccaggctttgggatgcattggtaccagttcactctgagccaggcactgggcagacaagtaaatgagacccatccagggaagtat

SEQ ID NO: 103725 - DNA, 1031 bp, Homo sapiens
cccgccggggcctgggcgctgcggcgcgtgcgcgagcggtgccgcaccggccgcgggcgcagggagtattatgggctgtgggtgccgctgagcaagatggagctgtctgcagtgggcgagcgggtcttcgcggccgaatccatcatcaaacggcggatccgaaaggtgagccgccgcccggggcgggccgccgctgtccgcagccggggccggggccgggggccctcggggcgaagcggtcccgctagcccggctccctcgcccagccccgcgccgccgcctcctcgcgtccccgcatcctccccacccccacccccgtttttctcccctctgtttttcagggacgcatcgagtacctggtgaaatggaaggggtgggcgatcaagtgagtgtcgcggggtccgggggcgtcgcgggaggggaggcagcgggcaccggggcctggggtgggggtgcgcgctcttgctctcgccgcgtgcctgtccctctctggtcttcatcctgattttgtgcgtttgtgactcggcaggtacagcacttgggagcccgaggagaacatcctggactcgcggctcattgcagccttcgaacaaaagtgagttgttggggaagctggcaggggctgcgaggccgaggctcggctggggcgccgcgcggggaagcgggagagccggggagggcagcgcggagtggggcccgggaaggggctctttttaacctctggtgtttttcggccgcagggagagggagcgtgagctgtatgggcccaagaagaggggacccaaacccaaaactttcctcctgaaggtaacctggcccagccccagcagcatccccctctcgggcccccagccccggcacagcacggggcctggaagggagggacagatacgcggccgcccaagcgggccggccttttcagaggggccccagctgggcagggggtggttgtgagcccccccagaagcccctgatggcaggcctcagccagcatcagcttcaacaagagggttttgggactggggataatc

SEQ ID NO: 103726 - DNA, 1017 bp, Homo sapiens
aaccacctgctgttcccgggtggtccccgcttttccacacctttgtaccttcacctgggatgcacctatgcatctttcaaaactcagttctggggtctcctgtatgaagccatatctggccctgccaggtagaactggccagccttcctttgccccattttggtgtttatagagcatcaagaacacaggagagttcttcctggtgacttgccacctccctgcaaagcatgagctccctgagggcatggccccctgtgctgcttgttccctggacagggcctgacactaggtagacagtcaagtaatatttactgggcttcaatcatatgcttgtactattctaggagctggggacacagcagagaacaagacagacagagtccctgcccttgagagtcttggattcttatgggggcagcagacagacaacaaacacacaaggcaagatgatttcaagtcagatatgtgttgtgaagaggctgaataggaatgcacagtggagaggaacagggcgcatgggtggggtgctcagcatggtggctggggcaggcctgtagagcagccacatctgagatgagacccacaccaggaaaaggaggcagctgtatagatctgggagaggaggtttcctagcaaaaggccctgaggcagggacacacctggcatatctgagggacagaaggaagccagcggggctggagccgagtggacagagagagtgaggtcagcgagggaggcagggccctgcaggccatggaggagagcctgggccttgatccaagtacagggaggaggcccccagtgacaactcactgcagaggcgaaggggcctggcacagcaagctggatgcagaggctgagccctgggtgaggttccgagggccaagaggcagatgcatttccaatctgctgcagcgcagcctccccgatgtatattcagagaggcaacaggctgtacattaaaatggaaagagctggaaactccctggaaactccaagcctgggcaccatctcaca

SEQ ID NO: 103727 - DNA, 1230 bp, Homo sapiens
tgcagtcagcccagatcccaccactgcaccccctaacctgtgcaccagagagagaccctgtctcaaaaatgagtaaataaggaaacggcccggggctccaggcccgccctctgctcccatcgccccacccctgcactcctcctgctcctggtctgagctcccctgtcctcctcctcctccttcgccaggtggattctgagacccattgtcatgcagaaaggtgcttcctctcttggttctgcgacgacatactgtctcctaacacaaagtaccaggtcacctggtacacatcttggagcccttgcccagactgtgcaggggaggtggccgagttcctggccaggcacagcaacgtgaatctcaccatcttcaccgcccgcctctactacttccagtatccatgttaccaggaggggctccgcagcctgagtcaggaaggggtcgctgtggagatcatggactatgaaggtgagacgtggggggctgaggagagtgggtgcaggagggacagcatgaggggcagatggttctccaatgctgtggggcgggtcagtgtcccctgggtgtctgtggggaccgggccagcgcccactgcaactggcagcctggatacctgggctgggaggggagggcccagggccaggagagaggcctgctgggccctcactgttttctccttgttttttctcagattttaaatattgttgggaaaactttgtgtacaatgataatgagccattcaagccttggaagggattaaaaaccaactttcgacttctgaaaagaaggctacgggagagtctccagtgaggggtctccctgggcctcatggtctgtctcctctagcctcctgctcatgctgcacgggcctcccctccaccctggacccgctctgtttctgcctggtcatcctgagcccctcctggcctcagggccattccacagtgctcccctgcctcaccgcttcctcctcgctcttccagactcttcctgcagaggctcctttctgcctccatggctatccatccacccccacagaccccgttcctccagcctgcgtgcccctaacctggcttttcccatctccccagcataaccaaatcttactaaactcatcctaggctgggcatggtgactcacgcctgtaatcccccagcaatttgggaggcaaaggtgggagaatcgcgtgagcccaggagttccagaccaggctgggtcacatgacaaagc

SEQ ID NO: 103728 - DNA, 1099 bp, Homo sapiens
acctgctctttaggatcatcccgggttggacacagcctcctaggcgggtgtccaaaggcagggtccacagagcttcgggactggggcgtggaggtgttgtctcctcctctggacacagggatctttgtccaatttacagaaagatgtggaagtcctgggacagatgaattaacacacgggtgcgtgagtgcagggctgtataaaccagggaaggcaggaagcgggtgcttgccctgcactaggccaggccacgcactagaaagttcaccggacagacccctctgcccccccatccccgcccccgtcccggcccccgcccccagtcacatgactcctggcctctctcttctcccctcccttctctctgtttgggaccctccccagaaaaagtgccatgcagaaatttgctttattaacgagatcaagtccatgggactggacgaaacgcagtgctaccaagtcacctgttacctcacgtggagcccctgctcctcctgtgcctgggagctggttgacttcatcaaggctcacgaccatctgaacctgggcatcttcgcctcccgcctgtactaccactggtgcaagccccagcagaaggggctgcggcttctgtgtggatcccaggtcccggtggaggtcatgggcttcccaagtaggaaagaggctttgcagttataagagtgcaaacccccgggggcacaggcttggcaggggctgggggttgggggttgggggttggaggaggttggcggggggcgggggcgggttggaggaggttggcggggggtgggggcgggttggaggaggttggcggggggcgggggcgggttggaggaggttggcagggggtgggggggtggcggggagcggggggtctgtgggaggccaggaaggaaggattgtggctcagtcaaggcccaagatctgacaccacccgggagggagaattccccagacagagcaatgtccagggagaggaagagaagagaggggaaaggaagcaagagctcctggcactgcagctgctgcccctggggcctggctggtttccctcttccctctcagagtttgctgactgctgggaaaactttgtggacca

SEQ ID NO: 103729 - DNA, 1033 bp, Homo sapiens
gggaggtgaaggctgtagtgagctgagatcgtgccactgcactccagcctgggcaacagagtgaggctttgcttaaaaaaataataataacccaagatgaattaaagacttaaatgtaagacctcaaactataaaaatcttagaagaaaacccgggaaatatgaaatactctactggacactggtctatgcaaagaatttatgattaaattctgaaaagcagatgcaaccaaaacagaaattgacaattgggatctaattaaatggagcacagcaaaagaaactatcaacagagtaaacagacaatctcccttttctaagatgctcttgtcacctccgtgtttttctccaggccttctgggcccttctggtgccagttcttttctcttcctaatgatctcatcctcacctctccctcccttcctccctgtggtgtcccaccagttggtacctcctaacttctctctttccctctcagcagtcctgaagtgtggatgttttagagaatgacttaagaagtttgcagcttggacccgtatcccactcattatcaagaagcaactcaagatgactttccctggggcatgtcagttgcctcatagcctgctggtcctgtaagcaagcactaagctccacagtgccagttccttgccccaacctggccccatccaagtacagaagaccttcctttcctcctttttccatattgctttctgttctaagtgggtgaataattttataattgaaaaaataaagataaagtctgtaaatccagccgggtacggtggctcacgcctgtaatcctagcactttgggaggctgagatgctcggccaataaatttctattgtttatgaatcacccagtctgtggtattttgttataggacatatggactaagatactgagttaaggccaggtgcggtggctcatgcctataatcccagcactttgagaggccgaggtgggtggatcacctgaggtcaggagtttgagaccagcctgaccaacatcgcgaaaacctgtctctactaa

SEQ ID NO: 103730 - DNA, 5816 bp, Homo sapiens
atggtagaatgtactgggcttctttttttttttttttttttttcccagacagagtctcgctctgtcgcccaggctggaatacagtggtgcgatctctgctcactgcaagctctgccttctgggttcaaatgattgtcctgccttagcctcccaagtagctgggattacaggcacctgccaccacacccggctaatttttgtatttttagtagagatggggtttcgccatgttggccaggctggccttgaactcctgacctctggtgatccagctgcctcggcctcctaaagtgttgggattacaggcgtgagccactgtgcctggcccatactaggcttctgatggcctgtgagcccgctgggaggagtgggttttgagtcagctgcctaccagatgtgcctcccaggcactgcagtattttcccagtcccctcccagtttagccctcctcccatcactgcagcagccggcacctggggacatgtgatgccgttaacaggcacgactgtgagtgggacctgcgtgtgtcatcccttccctcagcttggaggtgtttgacctcacaggtcccatctgatggctgcactatcttcctgggagctcctgacctctggtagcaggtggcaggagaaggtactgtcccagtgatccagagtctcccaacatcttggcaccatgaatcttttgtagattcatgtaaattctccccaagtaaataagataaatcccgacattacaaactccaggggtggacagacttgccctccagctccagatgtgtcgcgggcaatcagcagagcgggctgcaatcacagagcccaggagccccctggaggggtcggggtgcatctgcaggccaggtggagccctgtccctttggctggatagcatgggcatccggggctgtgtgtgctgctggcctggctttgccccaagcaactccaagagcacaccttggccctctgcctgcaccatctcccgggtgagctggcagtgtcagttttggaggtgctctggcaagcaaagatgcctttcctaaaacgaaggctaactccttaatgcatccagatttgtttctcttggccagttttcagtttgtccttcttgtatgcttctctgctgggtatcaaaggagtaaacgctgggacgcgagtgctctgtggggcccagaggcagggctgagctggccgaccctggggttgcccggggcgcactctctgggctggggtggggtggggtgatggccagccgtggcatgggaaggagttgagtgggtagacatggcatgggaagggcattccgggtgggaggaacagcatgagcaaaggtgtggcgggtgggagggtggggctgacccgcgctgccctggcttgcccccgcagcggctgtacagcatggacctgcggagctcccacaaggccaagggcaaggagaagctctgcttctccctgacgtgcccactcggcagcgggagccctgagggggtggtcaaggcgggggcacctgagctggtggacaagggccccttggtgcccaccctgcccttcccgctccgcaagccccgaaaggcccacaagtacctgcggctctcgcgcaagaagttcccgccccgcgggcccaacctggagagccacagccatcgacgggagctcttcctgcaggagccaccggccccagacgtcctgcaggcggctggcgagtgggagcctgctgcgcagccccctgaagaggagggtaaggcggccccagcccagagaccctcagagctggaaagggccctatgggtcataaggtccagctggttcaatgtccaaagagggcctgtagtgctttgtggggccagtcgggtctgggctcagggcccaacactagcccagggctcctcctgtcgtcccgctctggctgagctcttgtctaggtggggaggatgcacccagtgccctcctcccaagtgtccagccctgtgtgaggccctgagctgactgaagacacagagaggaggagctggagttggggtcgggttgggtggtctgcatggcttcccaccttgtcaacgctgcccccatctgtgtgtctgacgctgcagcagatgccgacctggccgaggggccccctccctggacacctgcgctcccctcaagtgaggtgaccgtgaccgacatcaccgccaactccatcaccgtcaccttccgcgaggcccaggcagctgagggcttcttccgagaccgcagtgggaagttctgaatcaccgtttttactcttcttaaactgttttcttttgggcttggggtgggacttccagagatagggatgggttgggggcggggtaattattttatttaaaaaaataccgagcagcaaaaggggagaagatcccactactctcccaccacctgccctttctctgagggacgtttaccacgaggcctcaggctggggatggagagagttgctctgggagttggggtaccacccccagggcaggatggggacaggatcacctgcccgggacaccaccattatcattctcctctagtgacgcagcagctggttctgggagttaaaggagcattggaaggcccaaaccctctcccttgagtggccaccccagcctggttggctggttttccccttttctcttgtttcaattgggtctttaccttgaactctcctctctggctttgcggtgggctgtggaggctggttttgaccaaaagtgagtggggcgggaggaaggggcaggaggaagggttgaggttacttggggcgagtcccttccccttcagagaggcttctatccttcccagggaggaggcgccgctgagacccttctgctgagagctctgccctcccctcatcacctggcctgtgcagaaacgctcatgcacacctggctgcacaggtgtgcacgcattacccttcgcgtgtacgttcccatgtgccccgtgaaagcatgtgtggctgcagacgtgtccacatgggccttgcgaacctgggttagaaaccctggccaggcgaacgtggggtgattcacagcacaaaagacctcaccaccacacctgcactcaccccaccttgcatgcaccttgctacctgcttgcggctttcagtggagggcaggggtctggcacaggtgcgatggcaccccatgctccaggcatacagatgtggtttctcggctgcaccgggccaggctgcgggtgtgcaggcgtctgctaagttgtgtgatgtatcagcacaggctttgagacgtctggaccctgtccttcctcccgtgaggggttcttgttctttctgactcaggtgacttttcagcccttccaattcccctctttttctgccctcccctccaactcagccaacccaggtgtgggcagtcagggagggagggagtgtcccaccacgttctcagggcagcccttgactcctaagccccttcctccttccattctgcatcccctccccatccaacctaaatgccacagctggggctgagctgtattcctgtggagggacctctgccgtgcctctctgaggtcaggctgtgctgtgtgatgggcaggctttgccccagcccacccctggcaaggtgcacttgttttctggtttgtacaaggtgtcctgggggcccgtggcttccctgccagtgaggagtgacttctccctctcttccagtcctgtaggggagacaaaaccagattggggggcccaaggggagcatggaaaaggccggctcccctgtctttccttggctgtcagagtcagggtaacacacaccaagagtggagtgcggccagcaagtttgagacctgcccgccctcctcgcagctctgctctgtgtcctcaggaagtcacagagtctactgaggcaaggagagggtgattctttccccaaatcccttcttccctggttcccaaaccaaagacagcctgcagccctttctgcatggggtgctctgttgacaggcttcccagatccctgagtctctctttccttcctcctcgatctttagttgtccacggtcaattcagtgcttccattgggggacagtcccctccgggatgacctgattcacctccagcccagggaatggaatctagaggaatacgtggggtgggtctggacaaggagcggcaggaatcaccacccatctccagctgtggagccctgtggaggggaaggggaagcttggggttcagaggggactcttccaggagaggggtgcccagcggaggtaaagatgatagagggttgtggggggtctctagttgaatgttttggcccatgactttggaacatggctggcagcttccagcagaagtcacgctccccatcccccaggggacataggacctttttcctgcttcctggtcactttcaaagaactatttgcgcaatctgtgggtctgtggattcacggggctttctgtgtgggtgctgcagttgcttttgtctgcagcagcaggacacatctttcctcttactcagccctttatggcccatggggaactccgtggctcagggagagctgaactccaggggtgtgacctgggacgggtgggcctgaggtgcccagctcagggcagccaggtggctcatgggctgtagtgagccagctccctgggggaaaaggctgtgggccgttaggaccatcctccaggacaggtgacctctatgaggtcacctacggctgtggccgtgcaggcctccttccagcccagagtggcccagtagagcaaggcagacagtgacctccacccccgcagccctcttaaaaggccagtactcttgggggtggggggagggtttagaaagcatttgcccatctgcctttctttcccccagcccccacccgctttgaatgtagagacccgtgggcacttttccttttgtggtggggggtgcggaggaggtacccccacccctggcacagccgcctggaatgcaggactgtcactgctgttcgggtgatgacctcgttgccaagctcctcctgtccccttgttctgggggcaggcgctgtgcttctgtgaggtggtttagcttttgctttcgaagtggccagctgcggccaccaggtctcagcacaagagcgcttcctttgcacagaatgagcttcgagctttgttcagactaaatgaatgtatctgggaggggtcgggggcacgagttgattccaagcacatgcctttgctgagtgtgtgtgtgctgggagagtcagagtggatgtagagcgcggttttatttttgtactgacattggtaagagactgtatagcatctatttatttagatgatttatctggtaaatgaggcaaaaaaattattaaaaatacattaaagatgatttaaaaaaaagaaaattcctgggcatttgattattccttctggtggttgtcaagtgcatccgtccaccaacagactttgtgcgagcaacaaggctgtttatttcacttgggtgcaagtgggctgagtccaaaaagagtcagccaagggagataggggtggggcagttttataggactggggtaagcagtggaaagttacagtgaaaggtggttagctattgtcagcaggggagggggtcacaaggtgcctgttggggagatcataatactcattgtccggaagaaggtcaccaggtcgatcagttggggcagggcaggaacaagccataatggacctgcaggccatctggatgtatatgtgcaggtcacaggggttacaatggctgagctgcagctcagaggccagacagtggtgtccccactgtgctgaagaaagagcttcagcccctggcaatgcctggggtttag

SEQ ID NO: 103731 - DNA, 1068 bp, Homo sapiens
tcatcaagacgtcactagatgacaggaatttttcagttccgttgtaattttatgggtccaccattacatgcgcaggccgtcacggacagaaatgttattcggcacttgactgtacatatattgtttttaatggaaaagtttttatgtttgcgtcgatggtgagtgatactggtttttccatttatggaagtcatagtttgcttttaaaataatttaaaccaaaaaagctcctctaaaggcagatacgaagtaaacaggagtgctagtggaacgagggtgtggtgggtgtcaccacggtggttccacagataggtgagctctggagccgctgcgctgacatcacagggtctgccccagcaggagggtgctccctggctgggtggcgagggtagaagatcccctgtagcattacccgggggcctgcgctaggcctgctgaaccattcagccactagacatttaccaaatacctgctgtgtaccaggcccagagacaagggaacttcagacctggctgtggcctgggtggggtgcactgaagagggagactatgctggggatggggatggggtttggagggcggggaggaacagcaacagcagcaaacacagtgcgctgacgacacatcaggcacgctgttactcttgtaacaccctctaaacacttggaatacacatctcatcagcacaagagtcctttacagagggggacattgaggcacagagctgttcaggaagttgctcaaggtcgcacagctagctaggggcagagatggacttgaacccaggccgtgagcctgtccccagagccctggctccttttcatcctctcttgcctggtgtggggcttacaggcgccctctctcctcctggcacccgagggtctctagtgattgtggagtctaacaaggagttggacccagtcacattgtagagtgatatgaaccaggacaactctggtgttgctggagccctcaggaggcccaggctgggtctgtccttgaagtaggtgacaatgacaccttaccaggacagggtgaaggcacacttgcagtgggcactgggtcagca

SEQ ID NO: 103732 - DNA, 1126 bp, Homo sapiens
aatgaggccttgcccagggtcatagagctgggcagatgtgaactacgggctgcctgatacacaggcaactccactagagatgactaggactcttgcctgctggccttttggccagttcagtgagaagtgctgaggctttccacctctgaaggtttacagctgtgtgacccagggcaaagccctcaacctctctgtgcctcactttccccacctataaaaatgaggccctaacctcacagggccctgctgaagattgcctgagacaagacaagattcattaacaccctgccaggggcagagtgggagctgtctccacccaggctggggagactggagttaggagccgcagacttttacgctccctgggcttttcattgatttaactcaggcttatttgccttcactgtgtaccacactgatcgaaatgctttccgtggcttaacacatctaatcttcactacagccctatacgactggggttactggtgggcccactttaggatgaggccccagagcggtggcgtctcctgaacgaggccgcaccccgcagtctggaccagagcccgtgctgtgtcttctgtgcagcagctttaaatcggagtggggactggggcttgggggttggcctggctctgcggggttccgggtggttccacctgccccaaggccgcctgcgtcacagctcagcagcgcctccaaaccccgcttcccccgaccccccgggaaaggccggcgggggtcctgcacccgctgcgccccttcccactgcgtgccctcaccgcagcagggcgagccctgcgcggcggggctttggctgggcggccggggcttgtttacccggccgtggggcggggcggggaggtcacgtggccgtgtttatctcggagccggcgcgcgccgtccctgtccccgcccccgcccccgccccctcggtttgccggtaatcccggcgcgcgcccctccccgtgcgtgcgtgcgcgcggccggcgggggcggggcctggcgctccgccccctcccacggggtgatcggttcccgccccgccggcgccgcgagcccagtgcagacccccgcagtcccccggtgtccacgccgcggtccgcgcagcccaggcaacgagcgtgtc

SEQ ID NO: 103733 - DNA, 1032 bp, Homo sapiens
ctcacccccctccactttggtcctgggttctaggcctggctgcccacccgacaggcatgagccctgggacagggccccaccatggctgggtctctgcttcctcatcttcgagttgagatggtgaagcctcctttgcaggctactgtgagggtgagagggtggatgtaattgagcgaatgcatgttcagcccagtccaagtgctttagtaaacatttggttttaagattaagttagatagatagcctagctgttctttttgttttccccagtcaggaaagggacctaagggattccattcttctcaggagtgcaaagtatccttagaaatcatttaggccagtcctctgatttttcagatggggaaactgaggcccagagagggttggtccttaaaaaaatataactgccaaccccatgcactgtggtgcccacttcatgccatccacagtgccaccacggtctgggagtgaggcaggtatggctgctaaccatccccacctcacttgggggaaacagaggttcactctgggggagaagcaggggagccagctctgtcttcccctcctcgggggccctgcttggagaaaaagctgagaaagagggtggggggtggggagttaggcaggctgtgtcctccaggcctgggagccttggctgggcagtgccggcctgggtggggtagtgattctcctgctcagcatctgccctgtaggtggggagacttacattcttctcagtaacagtaacaggaaccatgatttaaatggacactctaggatgggcatggtggttcatgcccgtaatcccagcattttgggagactgaggtgggcggatcacttgaggtcaggagttccagaccagcctggccaacatggcaaaaaccccgtctctaccaaaagcataaaaaattagccaggcatggtgatgtgcgcctgtaatcccagctacttgggaggctgagacaggagaatcgtgccactgcactccagcctgggcaacacagtgagacgccgtcccccacaaaaaaaa

SEQ ID NO: 103734 - DNA, 1996 bp, Homo sapiens
actttctaacaaccacagggctgaccaccccttctgaaggtggagactttgccagtcttccatggggtcctgccagggtcttttgagttgagagtcctcaagtcactggcccattacctctgagccagaggcagccactcacagactgaaaggggactcagcagatgggggaggagcgtggggactaccccagagaggaatgttttcgtatttggagactcttccaatctaaaaaagaaagtaagcgttcccacctgtgcactggggctctagacactgtgggtctttggccacgcatgcacacctccatgcagtctcagctcccagtgtgtgacatgagccctgggcttgggcctcaggagcctcagaggtggctggagccagacgcactcctgtgctgtcctagggagggcagtatggggcgggcatgcagcagtcgcggttatatgggttggcgaggatctggtggacagtccccggattgtgtttgtgtgttggggagacacctgtctgcagatgggatttggagctgggctcctttgggccttaactgtccttccgagtggctgtaggggcaaccacgagactcactgtgtctgcttctctctcttctcagggtaaagtcgagtatctggtgaagtggaaaggatggcccccaaagtaagctccttcatgtgtgtgtgtctgtctgtctgcctaccgacccatgcattcctccacctgccttttgccccctcccctgcctagcttttagctccagctactcttgtaactggacagctgaccttgatttaatcatcatcttctctgggcctcagtttccccctggaccacaggagggtcaaggtgggtctccagcttctcttctcaccctgccctcctgagtgttgagctcctctgctagttggagcttctgctctccctcctcccctccctgtggcttttcttggcaactgggaggtgaaggcccagcatccgggctactggagatggctgctggacaggaggaggggaccccagctgctttaagcacagtgctgcatgagtcctcagtgctgtgtggccaggggcagagcctgaatccccctcacctctagacggcactttccagtctatagagcaggttcccatacagctttgtaaggtaggtgtgatcaggcgctctcaaggtgaggaaacaggctcagagagggtaagcagcttgccttaggtcacacagcaagtggaggcagagttgggacttgaactaggccttctccttttcaggtgtctcctctgtgccttcccagcctcccatctcggagttgggaggcagggagctgtatctgagacctcccagcttctccacctctcctgctgaggccccatcaggaacccaccaatgccctccagcagggagttgttgggagggaatgagctagtcgtggggcctccccattggtctgtgggtgccccaccccctgccccgcctcccggagactgagtcctggaaaccccctctgcccagagctgctgctgtcgggcagggactttttgctgtgctggtgggggctgacctggtatggggtcctgtgggcattctggggtgatggtggggagagacagcagagaggaagacagcccacagtgcctcagcttccctctctgcaaaatgggttcagaaacccaggccctgcactcatctcacaggcttggtggccctatcggatgaaaggcctgggcacatgttctgggtgacctgtggatatcctgatgacaggggttgggagctggcaggccgagaatacactccacccctcacaccaacccccacttcagttctcccttcccgaatattctgagggctgaaggagaatccctcccccgccacacccagctgctagaaggtgggcttccagcctgagtgaagggggcagtaaagggagtgacgatgcccagagtgggcagcaggagcaccgcctccctgggcgcgcacacccctgcctctctcgcttcg

SEQ ID NO: 103735 - DNA, 1130 bp, Homo sapiens
gtctcgtgccacaaatggttgagcccccactaagcacctagcgcccagtacacgcgggtttggggaaggctggggcagcgcggcggcaaaatccgtccccgggggacctcagctccaccgcggccgctcctgccgcgaacgagggcccggcccgggagccctcgaggcagcgcccgcgtctgacccgtgcgtctgggcaccgaccaccgagggtcgggtggatggacaaatggaagggcggatggaggggtgggtggacggacgtggagacactggccaaactgcgccgcggagaaggccggattagggagacctcggccctgcgacgtccggacacggtgggaagccttttgggtcccggctctcctgcaactcgaggggctgcgcctcgggcccagtctcctccgctgcgggaggtgagcaaatggcctccccgctctgagccttgactttgtcgtcggctccactgggccctgccacttcggcccctggcagtcaccgggaggctatgaggcgcccgcctgggtattaaggatcacgtcccgccccggcgtcacagcaagacggggcgcgcgagcctccgccccgccccagccggtgaccgagccaaataagtcccacggcagcgctcgcggctcgcggcccgcggcccaatcgcaacccgcgggggcgggccccgggggcggggttccgatgggggcggggctcgggggcggagctgaccctcagggcgcgagccgagcccgcggccgttccgcgcgctcccgccccgccccctccttgcgcgcgctcgctcgctggcgccgaggaaaacgttgcgcaggttcaaaaatggaacgtcggcggcgtgagggagcgcgagggggtgtgcgcgcgtgcgcgtgcgcgtgcgcgcccggacgagggtgacggggaccccgccagccccagcatcgcgcgccgcagccgcggccccgcagctccgcccccggcccggcccggccccgggcccgctcgcccgccgccccgcatggagctgtcagccatcggcgagcaggtgttcgccgtggagagcatccggaagaagcgcgtgcggaaggtgaggctgcccgggggcggctcccaggaccccagtggggtccctcccgtcc

SEQ ID NO: 103736 - DNA, 1053 bp, Homo sapiens
acacttttcattatgaaatgaccttatttatctctagtgatgtttttccctcgatattaaaataactgcaccagccttcttttcgttagcatttgcgtggtattttccccccatgtgtttacttttgaccatcactagctttatgttttggaagtgtctcttgtgggtttctcttgtaaactgcatctagctatttatgcattctgataatctttgtattttaactgcaatatttagttgcatttattgaatcacaaaatattcgaatttatagctatcgtctatttgtcccctccctgccccgtcttgtatttatttttctctccattcttgcctgctttacagttgtttgggttggtttaatcattctttttcctcctccaataatttggataactatacacagtatttccagtcctacagtgtttatcccagtaatgacaatctggattcttaaattcgtcaaagtgtatttggtatctatcttcaccttcctcctgaagaatataaggatcttagaacactttaactccattcacccaagtaaatgccatcactgttgtgtattttaaatctgtttttatccagaagtcattgttattgtttcacactatcgctgttcttcatttttctttattcccagttgcatcagacctccgtctgggatcatctttttcctgcctgaagttccagctttggaatctccctccggagggtctaccagtggcaaactcttaagtttttgtatttgtaagtgctatgatttcacctacgttctggatacatgtgcctcatactgggtacataattcttgaaatacattttcactgaatatataattctaagatgatggttattttctctctggctttgttgctcttgatgaaaagtcaggtgtgaatctattattctctttttctatgtgccagaaagaggtgttggattttattgtgagggaaatagggaggaaaatttttaagcacagggtgaccccgtcagatctgcattttagaagcacactctggcactgtgtggctgagatcggagggaggg

SEQ ID NO: 103737 - DNA, 1007 bp, Homo sapiens
tgccattgcagaacagccctgagctgagagccaccgaggggtcgttctagggagtgacatggtcagtccactgccagtgcgagatggtggaggtggctgaagtgagaggtgctggtggctacgtcttggagggtggttggtggttgctatagagactgggagaaggggatggtgagaggtggagggaggtgagccagaggaggccctggaacactccttgggtacctggcttggctggctcagttcacctggacaggtactggaaaaaggggaggaggagggggaggaagaagtgacttgggagaagaagagggcagggcgctcaggtctgggtatgttcagtttgagaggtcgtgggacctccaagaggagccatcctgggggcagttgcagcgggatgtgtgatgtaattagggaataactcgcagtacctggtgacctgtgaattagggggaaaagtctagaatgttcccttgagatagcctaagacggtgcttctcacaaataaatgtgcaggtgagtcccctgggggtcctgctacactgcaggttctgactcagtgggtgtggggtggatcctgggaatctgcatttctgacaagctctcgagtgaggttgatgctgcaggtctcagaccacactttgaggacagaaggtctaagacacttagaggatggtggcagttgtccttgacatcaggaacccacatagaggtggaggtgggtctgagagtttgggtttttacaagctctacagataattttgatgcctgagcaggtaacgcgagccagacatgggtacagacatactgggggtgggaaggggtggctgcataatttgtggggtcccatgcagaatgaaaacatggagccctttgttcaacaattgttatgaatttcaagacagcagagcattaagccacatgcctggccctttgaggagggaagtcctgtgtgactgactgaccacctgcccatgaaggtggtcctcctggggcgggggtttgag

SEQ ID NO: 103738 - DNA, 1004 bp, Homo sapiens
tgttagcccagtggttcctgccaatgattggtgatagagctggccttgcagggcccggttggggagtggggaacgggatgcttaggcgaggaggctgactgaggttcagagcctggctccaggtggtcagagaggccacctgggggaaatgggccagaaaatgcggacgggactttgttgggtaaggacaaaaatggtagctgttccactcaagggcatagcaggagcacaggcgtggcagtgagaaagcccagggtgttctggccacgggacccagatctgcacacctgtagtcaaagttggtgtcacaagatagagagatcccatggaaaagaggctggaaccagatcacagagggtcttcagtgtcactgccaggagtcgggagctgacaccctaggcaccggggaactgctgggggcttttgaccagggtagtgatatgtgcagccgggtaatttagggtgacgcctccgtgtggattaggagtggaggatgcaccaggaaacagcataggatgggaggtcagaatctggggtctgctgaattggcttcttttcttttgaacttaataataatgagacataataggtgttcaatcaggccgggcacagtggctcacgcttgtaatcgcagcactttgggaggccgaagcaggcagatcacctgaggtcaggagtttgagaccagcctgaccaaggtggtgaaaccccatctctagttaaaaaaaaaaaaaaaaaagtacaaaattagccaggcgtggtagcacacgcctgtaatcccagctacttgggaggctgaggcaagagaattgcttggactcaggaggcggagtttgcagtgagctgaggtcacaccgctgcactccagcctgggcaacaagagtgaaactccatctgaaaaaaaaaaaaaaaaaggtgttcaatcaatatttatagaatgaatgaatggcaaccaccttatactgtgatatttattttgcatacgttgtcttgtcaattctcac

SEQ ID NO: 103739 - DNA, 1041 bp, Homo sapiens
cggaggatgcaggggtctgtgggggctggctctgtgtgggttcagcacatatgagggcctactatgcgctaagggcttcatgtgaattaactcactcagtctcacatcaaccctgggagcttctgctttgcagatcaggaaactgaggctcacagaggctaaggagcttgaccgaaggccctagctagcaagccgcaaagccagtcagactctgatacccagactctcagccataggccaggtggccccaactcaactgtggccatgggggcatggcctgtgccctcacatggcacctgtgggggaagggcacgttgttcccagctggtcagtttcaaaggtggcaaaggtttgtcttagagatgcagagtccggccctgcccccggggctgttcttgcagatctcagcaccatggaatcccagagtttgatcaggatacagaccattggcaccaggaggggctcctctggaccctccctaatgagcaggggaggccgtcactctggaggttcagggataagaggtggggctctgagaaagctgaaggggggacacagggtaggggagagagcggggctagctgcaccaactccagccctgggatcctagaggtgccgcgccccgccctgggctgcacgcccatcacctcccttcgaggccagcccacctcggccctttggtttggctacaggtctggggcattaccctagcagggtcaggtgcaggcagagacgtggagaccctagccttggatcaggccttgggcgggtggagaacggagaaaatgcagaggcacgggctgtgctgccaccctcgcaacccccgaaaccagcccaaagtgattggagaccaagggaccatctgcacgagaaattctccccatttagaaataggggaaactgaggcacagggaggccatgtggcttgctcagagtcatagagctgtcacgctgtcacctagtggagatgtgattggaatcctgggctttctgtctctggcccccacctgggggcccctcacggttcctctcttctcccct

SEQ ID NO: 103740 - DNA, 2116 bp, Homo sapiens
ctgggattacaggtgtgagccaccatgcccagtgagtttattttattttagtcatgttcatttgttttctagttcatctttagtttgatttttacaacatttattctcctttttctgattacaaaacgaacgtgctcattgccaaaaacattgaaaatacaccgtaaatacacaggaaataggaaattactcatgatttggctgcgcagagatcactgtgattagcatttggtgggtcactttgacttcttctcattgtgcactttcccttttagtaaatcttacactgggaccatttcttatgtcctcactcttcttcaaaggcctcgtatttgatggctgcataatattccatttcgtcattttatcattatttaatcaagcgtgccacacacagatgatcgtgacaccccctgtgcccatcctcctccacagacacaacccctggccacccccgcatctgtaaacacacccggccgtgccgcagtggcccctaagcctcacaattgaggtgatttcccagaggaggctgaacaatgccctggacatgtggacccagcagggtggggttccagccttttcctcctactgtccctcagacagacagagagacagacagatggccagccagccagacaggcagacaggacaggcgggtgggacaggcgggtgggacaggcaggcgggacaggcaggcaggaggcaccaggggaaggcggaggcaatagcgttgggggtgtctggccttttgggggggtcaagtggtagggagatggggtccttgggagcagggccctggcctggatgggagctgaactctgcagggtgagccctagagaagagcaggtaacagggagggacttcctctgcttaatcctctcaagggcaggcagaaggaggtgactgatggtctcagaaccaaacagttgaatttcagaatcctgggaccacagaggactgatgaggctggccccagggaccacatcctctaaccctgtgatgatcaagtggaggtgcagaggcccagggacttctcaggcctcctgactccagcaaagagctgctcctgcctctcgctgtggcctggaccaggttgctctggtccctgtgcccagagccaccgtgagctgttgaagtgggaaatggggcctgcagtgcagatggagctggagttcccaggactgggcaggggcttggggtggtcctcgagccagcaggagaggggagggagagggtgggaggctagagactggcagcccagatgcatccatcccactgcagcccctcctgcctgtcccctcccggccctggaagacccctccaggctccccaagggcagagggcagcatggggagcgggcttggtctcctgcagagtggaggtctctgaagcctccagctcccagcttctccccagactgctctgggcctgaaactagggggcgtttgcagaaaaacatggaaaagaattaccctagtttctggtggttttgcagaacagcaagtccccggattcccgggtcagcttgaccgagctagctgtgggatcttggacaaggacccctttcctcctaggaccccaaaggcactcccagggtgagggctccagagcctgaccgcccccaggccctcccctctgaatgttcgaatcctgcataccatggctgcgtggcggtgggaaccactatatcccaccaggcccggcccagtgcggagaagggatgggctcctgcccttagccagaggcacaggctctgcagagaggcagtgatgatgccatagagcgtgacaagggcagcaatgctggggttgcccaaggaagggatcaaagtctcccatcttgcagacagagatactgagtcccagagaggggaagtggctgtctgggcactggagactagaacccaggagtcttctacctctcccctcttccggctctgaccccgagagcttccctggggaacggtaggtgggctagggagccccataaggtagaactgaaagcagaaactcctcccctgttaactgactcctcccagagcccccgaatctctgcttccagggttggggttcatttgcttctgcgatagtctgggatgggtgggactggcacaaga

SEQ ID NO: 103741 - DNA, 1027 bp, Homo sapiens
ccaccccaaacctgccatccccagctggccccatcagtttcagtagctctgtccttccaagtgctagggcccaaaccttggaataggccttgaccttctctttcctttaccaccacccttcatcagataggccgtactgctgttggctccgccttctgttcctcgccctcaccagggctgctggcccagcctagccccaccagctcccctcctacaggctgcttaagcctaagtcagatcatgtgtttctctgctcagaccctccccggctcctgctccggtcctcactcagagccgcagctcaggtgcttacaaaggcctgcaaggacctatgggatttcaccctgactctgtctgcttgggccccctctgctgacagccctcctcctgcagagcccagcctcagtgggctcactccctcacttccttcagtctgtgaggccctccctggtcaccccacatcaagctacccccacctctggaccctgccccatccttccgcacagcaccaacttctattccctttactcattggttgctttcctgcccatttccctgcatttgaatggaagctgcacagtgcctagcgtgtggatggtattcaagaagtagttgttgaattgaataaatgaatgagtgaatgaatggctgaccattccctgtgttctttcctgaggaatgcccacttggctaagaatctctctccacccggcactccagacttgtagcgagttgaagctagcctatcttccccacgctatacttaaactgagctcgtgcaaccagcggaccctccaaccaccaccggccatatttcccaccaggaccacatcccctgtccccagcctctgtgtgagccgtcacctcctccctgaaggcctcctgattcatccatgtctccctctctccggtgccctcctgagggggcctcatgactggtgactctcccaccctcctgatggacggttaactcgccaagggctccgtctccttcatttctgtaaccccggcactcagcagagcctct

SEQ ID NO: 103742 - DNA, 1371 bp, Homo sapiens
ccagtggtggtgacaggagcttcaccgtcaccatcaccttgctgcaggagtgggcacaggtatggctcagttctgctgccgtggagtgggggtcctgggagagctcaggctgataccctggctttgccccacctcacggtgaccttgggtgagtcacttgtctcagggcctcagcctccctgtcatagcaagggagtcatccctacggagccgtgctccggtgggtagtgggggaggaagcgtgcggacgtggaacacagtcagactcaaacggaagagtcatctgcttttgttatgtgctacctgtttggattcctcctggcgcctaggttgaccctttctgttcccttttttggtgttaaggaagcgtcggatcacttccccgtcccagtcttctccagcctgcacttttcccagcttaatcagtctccagctgcccaagcgtcccaagcaggccctgggttcccgccaacagcggctgcctgcatcccggggctccaggccgggccagatgggcagctggtactggtggcaggaaatagctctgatggggagactgccccctttctggtgctcaaccacttcgtctctgacagagcatagagtctccagaaggttctactgggtggagccagggacatgctttgggtcttcgtccatcccttcctctctcccaacaggacccagtgtctcccagcccagggtggggtagattctgccccgccccaggtgggctctcattggcctaagacaattactatatcccatctggtggccattgtgattggttcagggatggctacaaggctgaagtcaggccaatcagagcaaagatatctgagctccccgggaagaagactgtctctctctctccactgaacatggagagaaggacaatatctacacccggattggatcctgggcaacatggcgaaatcccatctctacagaaaaattagccaggcgctgtagcctgagcctatagtcccagctactctggaggctgaggcaggagaatcgcttgaccctgggaggcagaggttgcagtgggctgagatcatgccactgtactccagcccgggtgacagagagaccctgtctctaaaaaaataataataataataacaaaaaagagtctgggtgcggtggctcacgcctgtaatcccagcactttgggaggccgaggtgggcggatcacaaggccaagagatcgagaccatcctggccaacatggtgaaaccccgtctctactaaaactacaaaaattagctgggcatggtggcacgcgcccatagtcccaactacttgggaggctgaggcaggagaatcgcttgaacctaggaggtggaggttgcagtgagccgagatctc

SEQ ID NO: 103743 - DNA, 1051 bp, Homo sapiens
tggctttattttaccttcttctgatgaataataacacttttacatatttataaacctttttttttttagatgaagtctcactctgtcacccaggctggagtgcagcagcgtgatcttggctcacagcaatctctgcttcctgggttcaagcaattctccctgccttagcctcctgagttgctaggattacaggcgtgcaccaccatgcccggctaatttttgtatttttagtagagatggggttttgctatgttggccaggctggtctcaaactcctgaactcaagtgatctgcccgcctcagcctcccaaagtgctgggattataggtgtgagccaccgcgcccagcctggagaacctcttttgtgaagggcctgctcaaagtctcctgccccctttctactggttgcctctgtttttcttattgatttgtagaagttctttacatatttgggatatgaatgctttgtcaggtactcgttttgcaaatattcacagaaggattctaaactaggaactgatgaggttgaactgcatatctgaaagctccctctggctgcggtgtgcagcacagactgactgtgagaccaggaaggggtggtggggcgaccagggcagcagctatgggggtggacagaagggaccagcggcagagctgacaagaaacatctgccacatcgtgtcatgacaagaaacaagatgtacatggtgacaagggaggggggcagcaaggctgacttccaggcctctctggctggctgctgagctgacgcacgctctgcaacccggccgctggcagccaaaggccgctttgtctatgcaggccccacccaggcctgctggtggagatgctctcgggtcaccgtcaggacactggagagagtgcctagtgttgaatctaagtctcccgtggcaactaggggacaaatagcctcccccatggcaggcgggtccccagaagaccctgtcccccagatgggttggcatctgtgggatctggacacagtcgggctggacaatgacctcctgtctacagcctccttgcccctgct

SEQ ID NO: 103744 - DNA, 1032 bp, Homo sapiens
ttgaacacatggccacaggcgcgatgtatgtggcactttgcagtttatgaagcactttgctgctaagcctgagtgagcctcaggctggccctgggggaggggacctgcatggggatggaaccacgcaggggtcagtccaggaaggagctgtaatggccagtgctgggagagtcagggcaggcctgctggtggaggtggccttggagctgtccacgtcctggtcgtgctcggactaatctttcagcagacggcaggcagccgtgaggcagggctgggtggagggcctgccgaggcctctgaggtgccatctccaccagctgagctggcttccaggagggcgagtcccactgtcacgtgacgcgtctggcctcagcacacttcttccgggaaagagtgaagggccccactgccctttgccatccagcttcctctggctttgctaatggccctagggggcaggagaccaactgctggaatcccagagccctggaggtgtgcaagggcaggtcaaacagaatttggaggatctggtgcaagagccaggaagagagagagagagagagtgtgtgtgtgtgtgtgtgtgcgcatctgagagagagagagagagagactgactgagcaggaatggtgagatgtttatcatgggcctcgtaagtacctctccacgtcttgtcttcccctccccacattgaggagcctcttctgtgacaactcttcctatgttctggtttatttcattgtttattacctgctttctctactggagtgtcaaccccattagagagctttcctcctggtccccacttttagaacagtgcccagagccctgtggacaatcagtaactattagtgcaaagaacagttagtgctgggttggtggggagggcaggacctggccccctgttgctccatggccccactgagtcctcgctttgctctgctccgagggcagccccccttttcagccctctggtaggcatcagtctttcaaagccccccatcttgagagagaagcatgtctgtctctcctct

SEQ ID NO: 103745 - DNA, 1071 bp, Homo sapiens
cccggccgacaggtggacgcggcgcgagtccgtcggtccgtctgcccgcccgctcgccgctctgggcgtcctctgcgggctgcgggctgcgagctgcgagctgcgagctgcggctgctccggttttctctttgcagcgaggctggagggtgggcttttttttttttttttcctttttgcgcgcgtatgtatgtgtgtgcgcgcaaagtatctctatctagggaatgaaaaatgggcgctggcggccggaggggagccctagggaggcagcgggggaggctgcgggtgcgcagggaggcaggcaggccgctcccggctgcaggaggagaagttgccaccctttcagctgttccggcctttataaaggagaagggagagtgcgagaggtgggtggagacagcctttcctcttctggcccggagtcagcgccaggaggggggggacgcgggagctgggggagggcttggggccagggcggggcgcttagggggtctctgagagccgagcaacccttcagtccatgaatctggccctggggaaaaaagaactaggggtgacccaccgtcccgcccctcagcacagtgaccatggacaggttaggagcccacgtggtctagggggatgtctccagagccaaggccaggagtccacgctcccctccaggaccagacatttccaccctggcacaggcatggcagggagggactcaggctctgcagtctgagagcctgaattcagatcctgccctggcactcgggagcttgggtcaccttgggcaagtcacttccctctgtcccctccatctagcctcaacctggagatggggctattgtaaggactcagtgttagcaagggaagacaccgcaaggtgaacccacagaacccggcagccagcgcccttcagctgcaagctgggtccgagtctcctcctcctagctggttgcctggcacaacaggccctgccagcgttggctgaatttgaatttgttgaactgcaaagtcacacaaacccccacagccctgcagcatcttcgcagggctaccaacatgatcttcccgtcagtcaccctgc

SEQ ID NO: 103746 - DNA, 1017 bp, Homo sapiens
ctcacagaggagcacactgagagagtcacacctgctctctcttcatagactgtcttcttggacctggacagggtggaacagaggaggaaggacatctcaggtggtctttacagaccactgcaggcacccacccactgctgcctaccacccagcagcgtggcacagtggcagagacacagcctgaagacacatcaccttggtccaaatcctggagtggccacttgctggacaagtgtctgcaggaaggttttttaacctctcagtacctcggtttcctcctttataaactggagatgaatttataaactggagctgggtgtggtaacaagctcctgtagtcccagctactcaggagactgtggatcgttttgagcccaggagtttgaggctgcagtgagttgtgactgtgccactgcactccagcctgggcaacagagcaagaccctatctctaaagaaataaaaataaatctataatgggaaggagtgagagagaacagagaggcatggcaaaattttagtggtgatggaaatgtttgtcatttttgattgtggtgatgggcttatgggtgtatacgtacatcacaacaaaatgtgtgcagtttgttgtacctcagtgcagttgtagagaatttttaccctgctcctggagtggtctggaggctcccatgaggtcctccatgtggaggcgctcagcaaaacaccttagcaggaagcaagcgcctggaaccttccatgcagccttcaagttcactggtggccccgcactgctccaggcactggggagacaggtgtgaaccagcctaatgcaggcccctgcctttgaagagccccattgagaaggacaaccagatgtataaacagataaattaggagacagggtgacaagggagatggggcagcgggacgaggagataacccccaaacactagatttgaagtctaacgactcagagataaaaaccctcttccaccggacagctgggtcatttgaccttgaccttctgtgtcttctataa

SEQ ID NO: 103747 - DNA, 1027 bp, Homo sapiens
cgtgcatggcacgcctccggagttatcctcgggaagaattggccattccaccaccagctcacctctctggagccccctgccctagggggggcttacaggccaaagcaggcaggcaggtagacagtcggaaagacccagacgactgtataaacaccctggggccgtggttatataagtcaataagcaaacagagggcagccggcatgagtgactaagagtcttaataggaaccaccgcagccatgggcatagtacgtgctccccgggcacagatgtgctctggccatggggcacgtccctgctgaagccacagagttatcatcgatggtcccaggtggaaggggtgttccatggaggatgggctttcctctgccccttcccccttggggcaccaggggacctccctgttcttccttggataacgacagtgctcaccacgccccctcccagctgtgggaccctgggtgagtgtgattctggaacctgtcccatttggtaatggggttaagctagcaaatgaatgaagggggttggcacaaacggagcactccatacatgggagctgtggttaccttcctcccacttggctgaggcacctgaggcacaaacctcattcagtcgcacaatctgcctcaaagggaagcaagcggcatgggaaggatcatacccctcttacagatgggaaaactgaggctcagagagggaaagtgacttctctaacatcaccctgttggttagaggtggagctgggtttgaactgaagtcacagcactcccaggaaagtgctcaaagggagggaagaatgaattaagccagaaagacagatccccccatcccacccaccagtgtgagtgagatattttcccatgtgggatctggtgggggcgtgcagggagggtgagcgtgcctgtgtgatgcggtgtgaagggcgactggggggcctgcgtgcacacaggcattgtgggtgtaaaccaatgtacactggcccgggaggaagggaggatgaaaacaccccctggcagccagca

SEQ ID NO: 103748 - DNA, 3511 bp, Homo sapiens
gagccaccgctcccggtgatgcattttcttacttagagcttgtgctctctcaaaagcaggcttgtcactagggcaagtgtaggtggctgaggtaaaaccactgcagtaccccaaaaggaactgacccaaaggacagccacaggaacattgggctggtaggggctgggatctggttgtttgcctgtggtgtgggtcttgtccgctcatcctgacagtaactcaggcaccagtatccaaagttaagttgttgctgttggcaaaaatgaaagttccttcctcttggtgaggttcagtgacttgttcagagttactggctttttgccgtgtgcttgacatcaatcaggccgcatggagctgcagttcctctgctgtgggaggagcgctggcagctggagctgagctgtgtctaccttctcctagatgcgcctgcttcctctgcgccagaagaaggcccacctgatggagatccaggtgaacggaggcactgtggccgagaagctggactgggcccgcgagaggcttgagcagcaggtacctgtgaaccaagtgtttgggcaggatgagatgatcgacgtcatcggggtgaccaagggcaaaggctacaaaggtgagctttgcggtggcttgagttgctgtgcaaacctgggggagaagtggtttcaggcccagctgttcgttgatgaggctcagagtgagcgctgggtacagcgcccgaatcggacagtgtagaaccattctctactgccttccttctgagaacagccttgtggtcagaagtggctgggatagcggagggccaggggacaacttcttaacacgttcctggaccctttgctctttgtagcctactgataactgcaaaggggagcttggaattatgttagtcagtccctgtgaatgggggagcttaaactaatggatgccttaaaaagcacccattcagaattgagttcagggtgacacccccagagcctatccagcttgacaggggagacctgtgggtaatgcacatgaaataatcttatcactccctcagatgacccagccatggttggtaattgctgagtagcaggaaggggtcagtgggaggtgctgggcgctgaggtgaagtaatgtgtatccattccaggggtcaccagtcgttggcacaccaagaagctgccccgcaagacccaccgaggcctgcgcaaggtggcctgtattggggcatggcatcctgctcgtgtagccttctctgtggcacgcgctgggcagaaaggctaccatcaccgcactgagatcaacaagaaggtgaggttctgagagtggctccctgggggtgggaagaggcccccgtgatggggagtggggtttctgtgcctgtcagtgctgcttcactgactgtagcttatgcatcacgtggacatcagtggcttgcttctcatggtcagttctggcccatcttgatgatttgtaaggtgccatcctgtagagtggctgtggtggggctgactggtgtggctggggatactagtcttattggtccctgatgccaccaccaggggggtgacaggcctgtgttgtacagcaggatctttagttttagcccagccgccttacagaaaggaacctggagggccagccagctttttgctctgaccttgggatacgctgtgactgggactgaggcctcagctgccttctagcgtgctttgcaggtcagcacactggcatgtctgggttatttgtccctaatgccccagccttacacccttcttgttcattcagatttataagattggccagggctaccttatcaaggacggcaagctgatcaagaacaatgcctccactgactatgacctatctgacaagagcatcaaccctctggtaagtaatgggtgttctgctctgtgaggccatcccaggcctcgtgcttttggggataggctgcttcctaggggctgctagcaggatcgttaactgaagccaacacaacacctagctgtgtcccttgtaagtggcatgttgtcatctgagtccactcgtcggggttggctggtgagaagtggggtctcaggctcagctgttcagtgatgaggcctggaatgtgcgctgggcacagcgcccgagacagactgcggaaccgttccttgttgccttccttctgagaacagccctgtggtcagggagggcctgaacctggaggggtcatctgcacgacaatcccctcctgggcctgtgctgatccgatgctcgttttccagggtggctttgtccactatggtgaagtgaccaatgactttgtcatgctgaaaggctgtgtggtgggaaccaagaagcgggtgctcaccctccgcaaggtgaggcaggtcctgacttgtcatgggggggctcttgtagagggaggatccaaggccacagacgctggtggccctgtggtgggagaggaaaggaaggagagggtgttggcagtcctttcacactggctttgaagtcctgagatgaggaaattcccagtctggccttgctgggctgtttgctgctttgagtgtgtcctcatctgccggatggtgggggaggctgaattgatcgtgtggcttcccagatgcaggggcgctgtgaacagtgctgaggaaagcctggctcctcgtaatcctaaatcccttcccctcttggcccatagtccttgctggtgcagacgaagcggcgggctctggagaagattgaccttaagttcattgacaccacctccaagtttggccatggccgcttccagaccatggaggagaagaaagcattcatggtgagcacctctgcctgcccccctcgctgggtgtggtggcttgggcagccgcctgcctttggctccagccggggtaggggtggtcttgatgccttaggcctctcttgtggctgtggagactggcccagagtcttggtctcctctagagtgggcatctgctgtcacctgtcatcttctacctctgaccactgcctctctccccacagggaccactgaagaaagaccgaattgcaaaggaagaaggagcttaatgccaggaacagattttgcagttggtggggtctcaataaaagttattttccactgacatcttgcctctttcttcaggagagaggctgggactggggaggcagatgggggcccttgaggtgccttgtgctccccaaggccactgccctcctttctgtagcttcgctgggtttgccttctggcctcccactctgtcccccaccctcagtccctggagggaggtaaaagctgggcctggttctgcagctgagctgtagaaatccagcctggagcagtgggcattgtgcaaatgtttgtcaccagggtgaggcagctgggtctctgctgtttgcacagcttgggtgatgccagtgctgtggagacgagaaggagacagggaggcctggatgttccctggcgcgtttgatgctggtgtgcaggcagaccgtgggtttgttacttgtttaaaaagttcatttggttttaaattaatccagg

SEQ ID NO: 103749 - DNA, 3939 bp, Homo sapiens
agggatgcccgagattaaaggtattaaaggtaaattggtgtcgccgcaaaaccagcgtgggagccaggaaacgagagtttcagtctttcttcgctaattccagagatagctgcatatcacaggaggagaagcgacgcagccatttttcttcgttattatcaaatttggctgctgccggacgccgtagatttgtggctcacccacccttagcccacctctccgcggcttttcactaagtttgaacccgacccctcgccgtagagtgtgtaatttctgtctccgaagctgacgtcaacttctgaacgaaagctaggagcggaagagcgtgcgtggaaatggcgctcggtacgtgcccccgacctgtcgtctgccgcgggggcgcgctcgcacgccggaaggggcggggccagatttggctttatatagcggacccgtaaggccgaccggcctctaccggcgggatttgatggcgtgatggtatgtgttgtaatggcggccgtttcattgtcaccggcgtcggcacggctgaatccgcgacgcatcgccgccatcccgtcttggccggcgccgggggtttgctttaggggcacgggcgacccagcggggacttcagtctggcctattttctggaaagtcgagaggcttgtgaagagcgcttggaggactggctttgggcctgcaggtcggccagagagaggccgtaagggtgggagcaggcttggaggcccggcgtttttaaagccatgagtcatttctaagtttcgacctcaccaattctatcattagttgggattagggcccataacctgcttgtctgggtagaaggaccttgggtggaggttctcggcgccgttctcattgggaggtaaagaagcttgggggaggggagtgttgtggagtcctcctgaatatctggggccgctggtgcactccgaaggcctctggagctcgcagaaaccacagatgatgaacttattgacgggcggacagaaactgtgtgctgattgtcacgttctgatttggctctgcggagttctttggcctgtgtgtatcagtgtaattagtgtccgggcaccggaggcagcctatagcttaacattgctagctgctacccagcgtttgtcccgggagtccctttctttagcggtcaaaaccttgctaattggcatataaagctgcctgttaagcagtttttagtgccactacttagtgtatttttgtgtggttagataaaaaaaatgggtcgttttcttacaggttgagaggatttgaaataagattcagcttaaattttgtcgaatacaaaagcattcttgacacgtgcgagcctggaagagataatgacctttttattcggcttgctgggtgtctggtcaggattcttcagtattgctgagatttggaacttaagcagctgggaactagagaagggggcactgctttggtttgggtgctgacggtgatttttttcccacctagtctcacagaaagttctccgctcccagacatgggtccctcggcttcctgcctcggaagcgcagcagcaggcatcgtgggaaggtgaagagcttccctaaggatgacccgtccaagccggtccacctcacagccttcctgggatacaaggctggcatgactcacatcgtgcgggaagtcgacaggccgggatccagtatgtacagacatcctaaaagttgggggaataggagtggagggggagggaaattgtagagatggagtcaagctgttagcagagggcagacttttttttttaagcaggagttacacgttgtcagaactgctgcgacagcagaatgggaatgcttaacttgaaaactaatattccaaggctacagatggtcagcactgtttgctttaggtgcggtgtggggtattgatttcagagcatagtaaatttgccaggaaccttagcaaagagaagttaacactagtgtggggggttggagctgctgaggctggcataagaactgcctcattcatgtttttttcacctgaaagcttgaataatggccacttacctgtgtgtgttctacttagagatgtctaacagcactggttgctgagccatggagacattaatgttaggcagttgatactgactaatctctgagctcagagctattgttagggcactgaattttccagataaatagcaatcttgtctgcctccagaggtttctgtagaagagaattgaagctggacaggtatttggctgtctagggtcctgatattttttgtttgaataacataaatgtgctttgaatgagagataggcagtaaggacagccctgtgagtccgtactgcaggtgtggggcccagttgcccttccggcctaaatgggcactttgcattttcctagaaaacattacaccccttgcttgggctcctgccaagtctgactactgctttttttttgcagaggtgaacaagaaggaggtggtggaggctgtgaccattgtagagacaccacccatggtggttgtgggcattgtgggctacgtggaaacccctcgaggcctccggaccttcaagactgtctttgctgagcacatcagtgatgaatgcaagaggcgtttctataagaattggtaagggaggaggccatgcagtccctagcttgggagcttgggagctggagagcagggagcagcgtgtgcatggtttctcagctctgtagcaggcagggagctgctgtcttgggtttagtttgcctctcgaacagaaaaatacctgggatcagacttggccagccatctggtttcagccggaagctaacaccctcattctgagtccaggctagtgggtggtggctgaggacccagttggttgaggagtccaactagaaaccaggagaggtagcagaataattaaacccctataggggtggcaagggcctctggccctgggtggaatgtcccatttccttcatcactgagtgggcttccccagggcagaaaggtttgtcccggagcaagaattttgtttgaatgcgtgtaacttaaattaaccttgtggacctctgctcagctccgctcggctctgcccgatgagctccatccaggctccgcttgctggtggaaaaggctccttagaagccggcaatgagctccatccccacgcggtgccagtgtgccttccgctcacccctcggaggggtgatgaaggcctgcacctggtcccctccccaactctgctctgctcctgaaggcataaatctaagaagaaggcctttaccaagtactgcaagaaatggcaggatgaggatggcaagaagcagctggagaaggacttcagcagcatgaagaagtactgccaagtcatccgtgtcattgcccacacccaggtgagcccagtgccccggggtggcttggcctgccacttagtagaagtgacctatgtgatcatgggggtcccgtgcccgcacgcttatgggtaggcttctcccttgccagcagagggcactgtgtccttactggcccttagcaagggaaccattcccctttaaaattcaactggtgactcaccagtaacactgaaatgcctgcctgaaagtcggttgtgaggtactggctgctctcctggaaacctagttgatgagctgagcaggctttttattgacttggttagagtgggtgcctcttgctgtcctgttactggttatcctggctgatctcaagtgctgagtgcaaccccatgtggtgagggccaccacggatgagagtgcatgtccaccgttgaaattttgtcaggacattgccaggctgtccttgagtgaaagctttatgcttaaatgcatttttttttttttagagacagaatttcgttcttgttgcccaggctagagtgcaatagccctatctcagctcactgcaacctccactttctaggttcaagctattctcctgcctcagcctcc

SEQ ID NO: 103750 - DNA, 4152 bp, Homo sapiens
atttggggccgacaaagtggcaggaaacagccaaacaaatcaagcgtgaagatggtttcagcagagccgacggctcagaggggctgcgaccggggcaggggaccggggatgcggggcagggacacggcccacacttgctgtgcacgcaccgccctcccccaaacactttgcaaagaggtcaccgcactggctgcgagcgcgccctgagccccgggccgcagcacgcgcgcccccgcgcccgaggtcgcgcgctgcccagccccccgcccgcgccccgcgagctgcgcccgccgcgcacgacgccccctcgcgggagccctgggccgccggccgcgcgcgcaggggagggggcgggggcgccgcgcacgcgcacgggccggcggcgcgcgccgagcggggggcaccgcgcgggtgcagccacgatggaagggggtgcgtacggagcgggcaaagccgggggcgccttcgacccctacaccctggtccggcagccgcacaccatcctgcgcgtcgtgtcttgggtaaggacggactggccgacggctctgccaggccggggtggtgggggtgtgagcaaaggcggcgcgcccggaccgaccccgaccccgaccccaacgggcccccggcggcggcgcggcggcgggcgaggagctgtcctgcctgcggggcccgctgccgccgctcctccttcccgggcccggggcgggcgggatccctggtgctcgcgggagacgccgctccggctcccggagccctggtttcctggggcccccggttcgtgcgccccccttcccgccccgattgctgtgacctccaggccgcggctatgccgcgaaaggctcggattgtgcgcggccgccagggcggactggggaccgtggggacggagccagggtttaaggtggccttttttggggggtggatcagggcgtggaccatctcggtggggtgcatgccgcgcctgcgatggacgttggaggaggagagggccgggaaccgggttcgtattgcctagcccggcccgtgtggagcgatgagtcgggaactgagtacctctcttccacccgggaactgcctctccttctctgcgtgaccttgggctgggagccacccaggaaatgttctcgagaaatgaggacttcaattccgaggtggggagtgtcatctcctctctcatgcctcagtttcccaatttatagacaaggtgggcggagccttcttgaggcccccttgggctctgacatttcatgaaccggtaacacccctcccactcagcatgcacctggatgcccaaggcgggtgtctgggagaaaggtctgctcccacagtgaagaggccagggtggcctccagcctagctggggggcagggtcctcagtgcagagggctgagtgggctcttgttcagacgggtggtcagggagaggatgggtcagagacagtgagcacagagggaggggttcaggtgccttgagtggcacctcatggaaagaagccctgctggggtctggagagggggtttctggggctccctgggtttggctggctgtatcccagaaactcccactcgaggttctggcctctgcaggcctggggcccgttccttgtgggcttagactaggaatgggctagactgtcagggaccccaggggctaccccaaggccagctgtgacctcagggtgcccaagcttcctcctttccttggttttcagggtctggttggtaggatggcttgggtatgtatccctggtctgcgaaggatgaccccatttaaagccttttcttctcaaatgccgtcagatgggagctgtttgagggcaggaaagcccagttcctttaacccttgtgtcggtgcctgcacagagccgggcaccccagcacatctgtgtttgtggctctgaattcatttatctgtgccagtctcctgctccccagatgccccaacagacccttgccaaaggtgggagccctggggggcacctgccggatcaggcgggtgggctgcgttcactgctttagtctgcccacccctgggcctctggcctggaagggcgaagccactggctttgtgagggggcttgtctgcttgggtcatttctgcctctgatgccttcatttagcaaagctttattgaatctgctgggccccaagggaaggcagcgtgactcagaagcagcccttgttctcgggaagccacagtcccactggggagtgagccaggtgcccccaggcagaggccgcaagagccaggagaggggtctccctgctgtggaatcaaatttcatggtgaaggtgatgtcagattgggcctggtgggatgagggtttatacatatgcacatccaggggagaggacgtggaaagcaggaggaaggatcagcccctctgagcacccatggggtgcaagaccacacacagctacctagctggttccccaacactagaggaagctgcggctcagcgagcgaggccaagtgcctggcccaaagtcactaagcatgtaagtggcagacgagcatttgagcctaggtcttcctgtctccaaagagtagttctccccctggggcagggaagaatccagaatcctggaatgtcaggattggaaaggacacaaaggtcacctggaccaaccaatgctcaaacgaccccacagcctcccagtcctgctcacacacgtggatacaaggcgctcactacctttgtcgaaccaagaggtgtctgatacaggctgattgacacctttaaaagtagctttttttcctgatcagagtaatacctgccaattattggaaagtataaaaatcacatgtgatggttgcacggtaggaatgtacttaacaccactgaaatggtgaagatggtaaattgtatgttacgtgtgttttaccacaacagaaaaagtttggtggggggtggtaatcatgtgataccaccacttagggagggctgcagtgaatagggtgctgtctccttctggtcttttcgaaactgtgtggcgtgctgagccatttaaacacatcaggagctgcgggggatgcagctggcgcctgctcttggccctcacaccacagggcagagcaagtgaagctgagctccaggaccagggtgacccgtttatcctggtgtgctggaacttcctgcctttagcattctgagaggcccttagtccagacaaacagggacaatttgtcaccctgtccaggactcctggacaacccagacccctaccacagccctggaggggccctaacagcatgtgcacatgaacctgtgattgttttttttctttttttgagatggagtcttgctctgttgcccaggctggagtacaatggtgccatctcggctcattgcaacctccgcctcccaggttcaagcaactctactgcctcggcctcccaagtagctgggactacaggcacacaccaccacgcccagctaatttttgtatttttagtagagatggggtttcaccatgttagccaggctggtctcgaactcctgacctcaggtgatccacctgccttggcctcccaacgtgctgggattacaggcgtgagccaccgcacccggcctggacctgggatttttgtaaaatttgtaaaagaaagatttttttttctgttgcttttccaaaagagggcccccaaatcatgtaagcttcagggcctcaccaacctggacccaccctggaacccaagccctctgagcccctgggtcagcctgcacagaagcagggcctccaagacctggcttgtctcttttttatttttttagagacaggatcttgctgtgttgcccaggctggtctcagactcctggactcaagtgatcctcccacctcagccttgtgagcagctgggacgatgaggcgaggcgtgggccactgcatccggcatggcttgtctcttgactaaggctttctcacctcttggtgtcatcgccccagtggcagatcagctgccactcctggcacccccaggccacagctgtgaccttcagtaagtgtcccctccccaccctctgtgcctcagtcttcccacccgaactgggctgggctgggtcagaagtgcctgatctgttgcgcggtgactgccgcctgtcagtgactcatttctttgttctaaagccagatgggaaaaaaaggagttaca

SEQ ID NO: 103751 - DNA, 1032 bp, Homo sapiens
agcaccttggggaggcaggggtctgctcgcccaggccctgcccagcggagtccactccacccccaccaccgagcactcggggcgacagcttgcggagattacgcctaatccccagtgggtcacttccaaggctgcacaacccggtgtgaggcggggtgggggaggggcctggagcctcacctgccccacccccaccttttccccagagtgagactcttcaggaagacaaggggctgcccaacacccatcatgtgtccatgcggcttcagccattttcctcacttgaccctgggggaagacaaggccctgttcctgtgaaggggggcccttggcagcctgactcatttctcaaagtgtgaccgctcccttcttccctcagcctttccccaggaggcaggatggatgcctgcaccaggacaagggcaggaaggctgggttcagcttgtggggagagggctcggcagcccccttttcagggagtgagctccctgtgcacaggggtgtgcaagcggaggtgccagccaaggacgctcaggaggggatgattctcctttctaccccccgtgctgcctggccctctctgactatcagacttgctgtctactcccctcaaagcctttcctgaccctctccctgggtctgggggagagacgtgcacccaacaactgaaccaacaaataggaaagaagttatattgtgatgttaccaagaaaattaattgaggcactggagaataccttagatctggagtctggtctggagggcttctctggggaggtgtcttttgtgttgagatgtgcgtgttgaggagccagctgaaggaagatctggagaaatacaggcatcccaggcagaggaaagagccgagtgtgaatgccctgaggcagggatgaactcaggagggcttgggaggagagtgttggggagcttcagaggaaggcaggagccctggcgtttggtgggggaaggtctttacctgggcagggggcggtgggtgagcatcaatccaagagtctagacctggggggtgac

SEQ ID NO: 103752 - DNA, 4493 bp, Homo sapiens
gttattttttcattcatcactccatctacttgccaggcctgggtaggggcctgagaccccagaccagcccacagctctgcagagggaaggagaacacaagatggggcccggcacatgccagcatctggaggagtcagcctgggggtgggggctgggcaggtccacagcccaggagggcctgtggctccttgttctttgagagtcggtccagtcccaggatatcttggtgtcagggcccaggaagacctttaggacctggctgaggggtgttggaaggggccacatctatggtcagagagtcctcagtgcctgtggctgaggaaggaagtgattgacccccacctggtgctatgtgacccacataagttaccctccctctctggggatccccctctgaaatgcctgcttaacccgggtcttgtagctcacggagggccaggcagcaggcgagggtggcagcctccccgtcccctgggtggtgtgaggcaggggtctgcccaggtctaaggtgtggccccacccccgacagctgttctccatagtggtgttcggctccatcgtgaacgagggctacctcaacagcgcctccgagggggaggagttctgcatctacaaccgcaaccccaacgcctgcagctatggcgtggccgtgggcgtgctcgccttcctcacctgcctgctgtacctggccctggacgtgtacttcccgcagatcagcagcgtcaaggaccgcaagaaagccgtcctgtccgacatcggtgtctcgggtgagccccacccagcaggtaccccctgcacagagtctacagagggctgtcccggccataggaggcggctgccacccttcttcccatgtttcagatgaggaaatgaggtgcaggcgggtgaagggatggactcagggtcacatggctggcagcaggaaggatgggaccaggacagggcctgggaccccaaaataacccatgctgcccacaggcaggggagcgtggatgggattctagttccttctagtctaagggacccatggatggcactgggcatgtgccagcccccatgggttggcccgtgtttcagtggcctcttctgtgccacctccctggggcagcctcatgaggactaagcaaggcggtgactgggtgcccagtgcacagcaggggccctggagcctcagcctccccacgcctcccagccagaccttggcaggaccagggcctggacctgtggagccaacctgacctgctgccctttgcccttcagaagcagcctttggcagaggcaccctgacctctgctccgtgacttccaggaatctgattggtggatgctctcagtcaggggtccgaacccgaggcttcagcctcgctgttctgaggcttgggtccccggactgggaccaacccctagttctaagcctggagctctcaggataagccaggctgaaggcaggtcatgaggtctagttttagaaggaactagaactaaatgaatggttctcaaacttccacagagcctcagggttccctggcagtgcctctgggaggtgggctgggccccaggtgggcaccccacctgcttggcagatgcacgccttgtcctgagcaggtctgggcttctctggggagaccttggcactcacaggagattgcgtggctatgaggctcccactgctgacgcccccaggctcggctctcagtgggcccctcgctaaacctggggctctgtggggtcgcagcacgttagaagtcgaagcccagacccacccagccaagctgccatccttgccccagcctcgtcctccttcccatacctcatttgtctggcagcctgagggttggggtcttcctgcctgcagagttgcaggcatcaggggtggaccgggggggcccacgtcagcggtgtggctggacatgggggtttggcagaggctgcagaaatgcggcctgagttgattaccttctttctctgtctctccctccatcctcccctctcactgcccgtggctctcctctgactggccctgaccctgccctgtctgtggcctcctcccccctgcatctggctggcttccctcttctcgcctgcatcttctcttggctcccctctctcttcccctaccccctttgcctgtccctttgggggtgggggagcatgggagatgcactcttgaatgtccctctgttcctcggcttccccattttctccccactcaccctctcccccatgtgtggcactgcctattctgcccggtcctgggaccccccagccttctgggctttcctctggttcgtgggattctgctacctggccaaccagtggcaggtctccaagcccaaggacaacccactgaacgaagggacggacgcagcccgggccgccatcgccttctcctttttctccatcttcacctgggtgagtacagccaccgcgcaccagcccacactcgtcccctttccccactgagcccctggatgggtggcctttcgctagcctgggacccgctctgcctctgggagcccacactaccctcgctccctcttctgcctgcctgtctgcggcgctcacagtggtgctgcctccctcagcaaggaggctacagccctcgggggtagcatggtcactggagatggcagaccctcactgtggtgcagagcagccttcctgggggtcacggaccaccccccccccaaaccactctgggtaaatggtgtttattatcccctttcacagatgagaaagcagaggcctagacaggaaggtgaggcttacagggtttgaggctgggaagcagccctgcctaggagtcaggagacctgcttccgatcggggctgcctctgattttcctagcctctgtcttcccatccataaaatgagagggtaggatctgggggacacaggtgtcgacatcagatgcacatgggccaggcagggcctgagagccgtgagcaggccgggtgacacatgcgtgcctatcctaagtcctaagagggtacctctgctcggctgccaagcaggaatagggacctagagaaggcagaagtctgaatttttacatgaaatctgatcttgatatgttggaagtttattcaggtttaaacaatatattgtgtgtgtcaaacaaagtatgtctctgggcccagcaggccctgggctggcagctcggctggcccctctttcccactggtctgggtcatgtctgtttcttctctcctaatcacccttctgcagagatctggggccacatcacctccatagccccatcccaagagccctccccataacccacagctgcctcccctctggaccggcgagcacttctgggcccagcctcctgcaaggagactcttgaggctacatacaggccgccagccgtccctgtttcccccatccttctggtttgccccgggttgacgtctttttctttttgagggcccctggatatccatttttgaggggtacacccatctccccaacaatattagaagatagcatttggagggggagacccgtggttcaggccctagtgggccagccttggctgctccacccctcagtgtcctcaagactgggtaggaagaaccaggtgaccccaggggatctcagtccagagaaggtgccccagaagtggggaccacccagcctacagggaggagtttaggggcggggctcacagaggagtagtggatgatttctagccatgggtctgaagtacctgaccaacaggtgcctgcccggccccctgaagccagcctccctcctggcacctctgcagctcttccccactggcctcacccctactctctcctggcagagcctgaccgcagccctggccgtgcggagattcaaggacctaagcttccaggaggagtacagcacactgttccctgcctcggcacagccgtaggcctccccggcttgcagaggccggcagccctgtatcacccctggcagtgaggtggcaggagcagcctagtgccagaaatgtccaagatgccagggcatgcagggcagtggaaggctggcttgaggaaccaattcaggttctccactgactcattcattccttcaccgcctccttcattgattcttcatgcgttcattcattcagtaaacatttattgagcagctgttttgtgcctagtgatgaattaggtggggtccttggctccaggagcccacaggctggggaggagaaaacaaacacatcaatatctcttccaaatggacagccgtggacagttaccaggtaggtagcggccccatacatgggctgcctagaggcgttcatggtccccattgctgagctgtgggtgcagagcaatagcctctcccttcacagcggtgtgaagagtgacctcactgtccttagggttagcatcctggccgaggatgtcacagggctcctggtctggctctgtcctcatgtgctatgtgaccctgacaaacccgtgcacctctctcagcctcagtccacttacctgaactgaggggtg

SEQ ID NO: 103753 - DNA, 1051 bp, Homo sapiens
agcatgctcaataaatgtaagctcttttgttcattcattcattcattcattcattcttctctccagagagtcaggggcacctccagaatctctactttaagagtaattctcatgtgatgaatccttgttcctccaaaggattttggtctctggttctacacaggtttcctgcttgaggcccccagctgcctgggcaggaactcacccattcctccactctctgctggagttgaggaggctggtggagcacagacagttcccccaaagcaatgcctcaaccctgcgagggcctgagcacatcgagagtgagcttcctggcactggaggcatcccagtgcagatgcagactgcctgctgcacgctggagatgctgcagagagagcacctacactgagaaagtggggccaggggaccaccaggtccctgggctctcagtagaactcccatcctccctctgcagcccaggccagcgggggcccaggcctctcctttgctcctgtcttgtggccccttaaactggttgcccaaatgaagctttgacttagtgagggcagagagctgaacacagagacagtatgagtgcctacagccagaggcatctccctagaaggatcagtaggggtcatctgctccagccctctgcctctgtacaggaaaccagcctggatagtagagccagggagctcggggagaaccgcgtctacagacattgctctcaaggttcattcagtcagttcctgtgggctggccagggctcaagtgtaccctcagggggctcttcacctcccctgcttcttcaggctccggcgtctgagcccccagcagccaggacctcatgctaacatagtgggaaaccccagagggctacaccttatcccttagcccaatttctttagacctagtctgcctttcccaaggtgctggcactttgctttaaatacccacctcccagaaagtgcttcccctcagaactttggtcaatgagtacaatcaaaaggtaatgccctagctgggcatggtggctcatgcctgtgatcccagcactttggga

SEQ ID NO: 103754 - DNA, 1356 bp, Homo sapiens
gattctcctgcttgcacctcccgagtagctgggattacaggtgatgccaccatgcccagctaatttttttaattttcagtagagatggggtttcaccatgttggccaggctggtctcaaactcctgacctcaagtaatctgcccatcttggcctctcaaagtgctgggattgcaagcatgagttgtcgcgcctggcctctcctgctttcaagaagaagatcagattgttattgtgcctgctgtttttcaagtgcctttaactcaacatagtcaatatgccagaggtgcatattttagcccaggctggtcttgatctcctggcctcaagcaatccttccaccttggcctatcaaagttgtgggattacaggcatgagccgcggtgcatggcccccaggcatctttcattcctacagacttggctcatggtctttgtggtcccttttggcaattagagctccagccatcacatctgtgttccaggcatcaggtcagagggtgggacagagaacatgagggtaccccattggccaaaacgtagtcacatggccatgcctagctgcaagagagacaaaagaatgactcttaggagatgctaacagtcctttgtcccgctgagaagctttttttaagaaggctgttgtgagcctttgagccatcttaacactccataatggagatctagaacttttggtagcccagactgacctctgggattgggagacaggggcaggtgatttctggggtactttctggctggatgatatggttctgggcatttccgggggtggctgcgagaacagccttccttctccacagccaagcttggtctcatgtttggtgctttgaggatctttaaccctctcctgcctgtgtcctgtgaactaaccaccactaacccagtgctcttgtctgtctctcccctaaccaccccctcccgcctgtccttgtcctcgccggcctttgtccccaggcgggccaggctgtgctggccttccagcggtaccagattggcgccgactcggccctcttctcccaggactacatggaccccagccaggactccagcatgccttacgcgccctacgtggagcccactgggccggatcccgccggtatgggcggcacctaccagcagccggccaacaccttcgacaccgagccccagggctaccagtcgcagggctactgagccacagtgaccgcctgcccccgcccctccccatctgtcccctctctccacacccagcccctgctcctgcccaggctgccctgcccagcgcctcatcagcctctgccttgtcccactgaggtccagggtagctcggggcaggggtggggcagtccagtgttgggg

SEQ ID NO: 103755 - DNA, 1084 bp, Homo sapiens
cctgaggaggtcataatctcttctgagtgggggcaggtcgattcttgcacaaggtgggctcttcactgagccataagggacagggaggtatgggagagcgctgggggcccatccccctgtccacccagtgtccactggcctgtccttcagggagcagagcagagcaggtggtggacgggcccagtgctgggtgttttcaccaccatccccccatcccccatctaagaatcctaagaggcaggcgatccctcacctgcttactcactcagcagttacccggcccctgtgctggagataccaagggcatgggtggtccctgcttcgatggccccaaagctgggccagagttaagggaaagaggaggaagtcctaagcagagaagtagcaccattatccccatttaacagaagggaaactgaggctcggcaagcataggcgagttggcagtggaacacggatctaaactcaggtgtgtccaagtcctcccaaaggacagcagtgatggagaggaccccagccagctgtgtgacagctggttgttgctgacttcattttccaatccggagaaggggctctgtccacagtcccccgccgccaggtggcccacatgggaccagcatgggggcaggttatctgttggcctgaagagtgaaacctgtaccaggccaaaggtgagggcgtgagtgagggcaggagtgtttatggcagagtgaagttctgtgcccaccacaagaggctgtgagatgttctgaccctcacccactgtccaccaaaagcctctcctgctgatgggcactaggagacctcagggtactgcccatctgtttctcctcgggtgccagccagctgctggtgatcctcagccggagggcagggtaccaggtaagcttaactccatcttgggtgtttgtgacaggccctgcctgccaccctaggcagggaaagctgtcaagactcctgccaggaatggggggtgctgagtcatctcacgaagaatccctcactcttcccgggttcagcccagaagcccttccaggcatgatcttccccatcaggctgggctctggcagggacctgcccagga

SEQ ID NO: 103756 - DNA, 1005 bp, Homo sapiens
actgtcctgcctgcacggctcctatccacctgggggtgtcgcagttgaggggctaattcccaggggactgacgttagttccctactccatccttccctggtgattcttgatcttcaaagcctcggggatcccaggtttccccatgtaactgagacaccctgcctgttagccctgggagacccctaaccttggcccaagacccctttgattctctaaggagcacgaaagggggaatgcccctcccaggagtttatgggagaagggactgggccggctgcctcccagcgatgcacttgacctgacactccccatgtcctggtgcgcacagcccttgtcggtgccccggcccctcccgcagcgttactgcctgtgtatagtataaatatatatattttctatatataagatgtataatataaggctccacaaatatatctgtgtgtgtgtgtgcgtgtgtgtgcggtgaagggcggtccccatcctgggcccccactctagacccccccaccacctggttaagtctcgagtgaatccagtggccccgtggcaccctcctttatgacatccatccatctgtggtgaaccaagtgaaggtggtgacttctggtgacatagtaataaagtgaagactcagaacccaccagcgattgcaagtgtgtcaccgtgtttctttgttcttcattctgcgtttggcttggatgctccatcccgtttgtctccttagacaggccatgtcttacttggttattattgtttgttaatttttcattacacaatgaacctatgaatatattatctttttaaaaagtaaaattggccgactgcagtggctcatgcctgtaatcccaacactttgggaggccaaggtgggtggatcacctgaggttaggagttcgagaccagcctgaccgacatggtgaaaacctgtctctactaaaaatacaaaaaaaaaaaaaaattagccgggtgtggtggcagacgcctgtaatcccagctactcgggag

SEQ ID NO: 103757 - DNA, 1749 bp, Homo sapiens
ggtccagtgctcgcccttggcgtcacagaggtgagtagacattggctcagggataacctggaaccagagccttgaaattattctcccaggagcacagttcccaggcctccccagtggggattgctgtcttcccctccacacctttactactcctttattttattactgctgggcacgtctgtcttgttaccgagttggcattgattttagacggctggccctctgctttgtaagttcccagagggcaaggtccctgtataactgtccccactctagttagcatttgggaaacgctggttggattgtgacattgggagggaaaattgtaaatggtgcaggctgagttggcttgctgagaagagagcagccacctgggtcatgtagagtaggtggctgccagcttctccccttcctagatgtgatggaaccaaagggaattgtgttaggcagaaggccagctctactagccccagaatgtgtttctccaggtggtggtggccttttttaaagcaagaatagttagctttaaacacattgcatcttggtgcgtggcaaagggatggcagggatgtcatcagaaggcccctccgccctcatgatgatcaggacatccctctcacaggttgtatggatgtccaggtggtgtgtagggcttgctgatgtcacatccactgtctcaagtctggggagaacaactcagctcagacacctgcattcagagatggctgtgagggctgctggtctgtggctactgggcaaatatgaatgaggcgtggtgcccaccctcactgcgtttgtagatcagcttgggaggagcatatgccactgatacaatacctggggcactgtcttgttattgtagacctgtgtcaagagccctgggcagacagcagagaattttagaggctttaaaggatgagaggagtttgccaagcagaggagaggagggccattccaggaggatgtgtatgtgtgttttcttgacacgtgtgtttttgttttcatttttcttcctagagatggggtttcgccatgttgcccaggctggtctagaatcctgggttcaagcaatcctcctgccttcgcctcccaaagtgctgggattacaggcatgagccaccgcatctggctaaggacaggtgtttaaatatgtgtgcatgtgtttgttaagcttttcacaagttaagtacaattagtactacaagtctatgtgttgaggggctgcagagtggcctgattggtctgggtcagtggaggtttgcaggaatggcatttgcaagggtatgctggggccacttggtagatcacttggtgggagcatcattgcaggcactgtggtaccttgaaaggtcttttgaagcaaaaagcttttttgtgggtgtatggggaagacaggatctcactgtcacccagactggagtgaagcggtgtgatctcggctcactgcaacctctgcttcgtgggttcaagtgattcttgtgcctcagcctcccaagtagctgggattacaggtgtgcaccaccacaccagctaactttcatatttttagtagagacagggtttcaccacgttgcctaggctggtcatgaactcctggcctcaagcaatccgcctgcctgggcctcccaaagtgctaggattacaggtgtgagccactgtgcccggccacaaagaggttctaaggagagcttgatgtgttcaaaaggacccagacctttcagccggataaaacagtgttagtctcatact

SEQ ID NO: 103758 - DNA, 1067 bp, Homo sapiens
aaaaaaatggacctaaacctccttcctaccttacacagaaattaattcaaaatggatcacagatctaaatgtaaaatataaaactataaaacttttagaaaaaaacataggtgctctttgtaacttgggactggacagagagttcttaaacatgactccaaaagcatgaaccatgaaagagaaaaaatggattaaatggacttcatctaaactaaaacctttgctctgcaaaagacactactgagtgaaatgctaagttacaaataaaaagaactctcagaacacaatagttaagaaaataacctaatttaaaaataggcaaaaaacttgcacttcaccaaagaggatgagttggtgccaaataaacacgtgaaagatactcagtgtcgttagccgttaggaagtgcagattaaagtcacgatgagctaccactacccacctcttagaatatctaaattcagaaaaagacaataccacatggtggcaaggacgtggagcagccggaactcaacattggaaatgcaaatggttcagctgctctggaaaacagtttggcaggttcttataaagttaaacatatacttaccatatgagccagccctgtcactcctaggtatttaccctggataaatgaaaagttacattcatacaaaaacctgtacatgaatgtttatagcatatttcttcatagttataagaaacgaaacagcccaaatgtccttcagtggatgaatggataaacaaactttactacatccgaacaatggtatattactctatgaaagagagagagagactgttgatgcacacaggctaacaacttggatgagtcttagagacataatgttgagtgaaagaagccagtctcaggaggtcatgtttactgcatcatttcatttatgtgacattgtgtgacattgttttgttttgttttgttttgtttggagacagagtctcactccgtcgcccaggctggagtgcagtggtgtgcaatctcggctcatggcaacctctgcctctcaggttcaggtgattctcgtgcctcagcctcttgagtagctggaat

SEQ ID NO: 103759 - DNA, 1047 bp, Homo sapiens
agtgtgcatttggagccagtgcagtaagaggtggggtccccagagtttcctgccaagagtctgcgacatttgtgtgtgtttcactaggtttcataacggctcactcctggaggtcattgctgcgccttacatttgggaatggtggagtctcagttttcctgggaaacaagtttgtagactagccataaaaacagcaaacccttctgcaggtgtctgttcatacaaacattattgttttccagaaggaagtggaaccctctgtgtagggctgcgggcctgctaggtttttgttgcagaaggaataggtgaagtggggactaccctgcagacgcggtggcgtctcacggcttcctggtgtccttccccaggagcagcagccaagctggacagatgacctgcctctctgccacctctctggggttggctcagcctccaaccgcagctactctgctgatggcaagggcactgagagccacccgccagaggacagctggctcaagttcaggtgtgtgtgccagcatttctgtgttgggcccggggagttggttggtttgcaagcaaggaaagacaccgaccttgcagctttctcgtatgggcttgccagtgacatgtggcccgtgagaggtggcctctgctgctgtcttgccaagggcctgctctgatggggtagcgtgagcatggggaggagggtatcccagaatgtcatagccagagtgaaatgatggctaaagcagggggacccaggagggcccctgaagctgcagctgctgtcgctttagtctcccccaattcctttccctttctccctccacctccgtgagaccctggtctcaggcctccctctgccctctccctcttccaggagtgagaacaactgcttcctgtatggggtcttcaacggctatgatggcaaccgagtgaccaacttcgtggcccagcggctgtccgcagagctcctgctgggccagctgaatgccgagcacgccgaggccgatgtgcggcgtgtgctgctgcaggtaatggtgccggggccaacagtgacccagc

SEQ ID NO: 103760 - DNA, 1073 bp, Homo sapiens
gggagacaggtgtcctggcctttagtccctattctgcttcttaactcattctggacgagtcgtatcccattctgggtggccttgggggccgctgcttctggaagaggttacctggccatgaataaccaaccagtatccccatgaacagctgcgagatggggctaggtgacagggacattggggtttgtgagaagaccagacaggtgcaggtttcagtagaaaggactctgtagagacccttctgatgatgctgcctttttttaatactccagtggaaaattttccacaatatagaacaatagagtgactgatatttaatgaacattcatgcgcccatccccaatcccagcagttatcaactgtggccagccttctttgtccccacgttctctattttgaagcaaatgccagacactgtatcatgttatctgtaaatatttcagtctgtatctctagagaagaggtctgttttattaagatcataatcctatgattacactgaaaaagttaaacccaattctttcgtatcaccagctgtccctaactggtgactcaccccgttggtctgagcctgttttgcccatttcaggtatttccatgtgtgaaatgcctgccttttccctctctgccttcccggtatgccctatttctctctgtgtgtagtctttgcttagctgttcacattctgccacaggtacaaaccgtgcacttttatgcaaatcgacagtggatgggttgcaggtgacacagctgaacgtggaccacaccacagagaacgaggatgagctcttccgtctttcgcagctgggtgagtggggagagtgggagcggaagctgatccccatgggctcacccttcgcctgcctttggtggtggggtagagaggcgtgtggtagaggggctgtgatcttgggctccccagccagcctgcctggggttcattcccagcactgccgcttactggttggtgattggaacttaagttttctgtgcctcagatcccccgctgtgtaatgaggataatagtaacctacctcgggatgctaggaggattcagttagtgcatgtgaaat

SEQ ID NO: 103761 - DNA, 1073 bp, Homo sapiens
tatcctgaataccttgaaaggctcagattgcaaacttggctggcaggcatttccttcacctgctgggctgttgaccactgaatctcctgattttaggctccaagattatggcccatgccccccaggccgcacctcgttccttaccaggttcttcctaccccctcccccaggagattgctgcgatgattgacactgagtttgccaagcagacctccctggacgcagtggcccaggccgtcgtggaccgggtgaagcgcatccacagcgacaccttcgccagtggtggggagcgtgccaggttctgcccccggcacgaggacatgaccctgctagtgaggaactttggctacccgctgggcgaaatgagccagcccacaccgagcccagccccaggtacgtgtgctgtgcagacaggcagtgcctggggatgccatctgggggccagaggtgggtgcagagcccccgaggctgcttgaaacggagatggagtcaggaggcctggctctgagtggctctaattcaggttctctgatttttagcctctctgagctgagtgttgatttttgctcttttgtctgtaaaatgaggttaataccacctgccccggcaacctcccagaacctgagtgccccagcaagcaattcacagagccctgaagccacataatagagatgatggccaccactgattgagtgcctcccttgtgccaggcacacagcctgccttattcccttcagtcctcatgggcaaccctaaagacaggtggtacccctgttttccagagagggaaactgaggctgaagaatgaagggacctggaagagattaggcatgtggacagatggtcaggccccaaggcctgtctgtccctgggctgcactggagcagggcagggagaaggacgttttgctttttacctatgtcattcttcaaccaagttctcaggaaaagaggtggctgctctttcccgtgctccccccagtgctgctcagcactaagaccttcggttcctgagggctgcatttctttttctttgctttaaacaagcaaatcttagataaagctcaggcatcc

SEQ ID NO: 103762 - DNA, 1037 bp, Homo sapiens
cttattttcatcttttctataaaaataaaattgaaacaatggaaatcattcacacacctaattaccgtattgtttatgaacttatttggctcaaaactttggttcttaccgaagtgggaatcccttgagaggggtgggtgagggccaggccagggagacagacctgtgcacgtgccaggacctcagagcctgctctccggctgccctctctgggcaggccaggaacttcccagaaggaacagcccagagacagggttctaagtgagggaggccggcccgagtgggttctgggactctggctggcaggcctggtggtggatggctcccatggttgtcctccccaccttggcctccgggtcatcataatttgctgctctttatcaagcacttcctatgtgctgggcccagggccaaccaaccactttctatgcattctcccagagatgtctctaacttgctgagaggcaagcactattatcatccctgtttggcactttgagggtacccagagttgggggtccacagctgggaagtggcagggctgggattgtgtccagcctataggaccctcagagagcagcctccctcggtcacccagacctgttccttctctcccgtgggctcccagcagggcctgttccctgaggcttggagccctgagacagccatcacttagcctcttggcctccaggcttccccttcaaggccctccttctgccactgtcctgggccctgtctctggaacgcctgctcaatgtcacctgggcggcctgcgtaaagtacctgtttgccagaccctagccagccctgctgagtgagcatctcacaacgggagggctggaagcccacagtttaaaaaatactgacttggactcccaaagtaatcctagtactttgggaggctgaggcaggaggattcattgagtccaggagtccgagaccagcctgggcaacatagtgggaccctgtctctacaaaaaattaaaaaaaaaattaggcaggtatggtggcaaacgcctatagcctcatctacttgg

SEQ ID NO: 103763 - DNA, 1012 bp, Homo sapiens
gggcaggcacacgcactccacccacttgcgccgggcgcctcggccccccgtgcgctcccgggcgctcaggaggtaccggggtggccgccgggccgaggagccgttggccccctcaggcttctcctccggccgtcccgggggcggcctctccagcatcttggtgccgggtttgaagcagacgccgccggccttggtgcgcacgaaatactcggtggtgtcctcgggcagcaccaagtccacccggtggagctcctcggccgccttgctgggcggcagcggctgcagcaggggcgagtgggagtagagtggggtacgcagcaggtcagggcctcctggctcggggctggcctggggcgtgaccggggcattgttccagaaaaagctggacaccaggttagggctgagggaggccagttctcgggggaaggtgacataggacagggtcttgaagaagtgcaggaaggagatgaggcacaggccggccatacagaacatgagaaagagcttgtagcgtctcatcttcatcctgcgggagagagagagacaggagactcatcagggcagcccaggctcctttcctaggaaggggacctaggaggcctctgctgccaccttgctggacaatgtggtggccagcacctgctgcccctgcatggagtgacctcctgcccccaagagtcaactcgcggtaccaaggcccctgaaagccccagcactgaggacaccgccgtgctcccatagcccttccctgagatccccaggccaccaccctgccccctctgcagcctgcttctccgcctggcccaccccaccctgactgtgcggctgcactgctaggcttggctccaggagtaacatgcgccttgggaaaagctcaactcgcagtacagactccgccccaggacagaacggggagagcaggctgtaggctgccctcctgggtcctgtccctcccctcctatcttcttttttatggacatactgacaaaccttttgaatattttttcactga

SEQ ID NO: 103764 - DNA, 1025 bp, Homo sapiens
ggccctgacctgctgcgtaccccactctactcccactcgcccctgctgcagccgctgccgcccagcaaggcggccgaggagctccaccgggtggacttggtgctgcccgaggacaccaccgagtatttcgtgcgcaccaaggccggcggcgtctgcttcaaacccggcaccaagatgctggagaggccgcccccgggacggccggaggagaagcctgagggggccaacggctcctcggcccggcggccaccccggtacctcctgagcgcccgggagcgcacggggggccgaggcgcccggcgcaagtgggtggagtgcgtgtgcctgcccggctggcacggacccagctgcggcgtgcccactgtggtgcagtactccaacctgcccaccaaggagcggctggtgcccagggaggtgccgcgccgcgtcatcaacgccatcaacgtcaaccacgagttcgacctgctggacgtgcgcttccacgagctgggcgacgtggtggacgcctttgtggtgtgcgagtccaacttcacggcttatggggagccgcggccgctcaagttccgggagatgctgaccaatggcaccttcgagtacatccgccacaaggtgctctatgtcttcctggaccacttcccgcccggcggccggcaggacggctggatcgccgacgactacctgcgcaccttcctcacccaggacggcgtctcgcggctgcgcaacctgcggcccgacgacgtcttcatcattgacgatgcggacgagatcccggcccgtgacggcgtccttttcctcaagctctacgatggctggaccgagcccttcgccttccacatgcgcaagtcgctctacggcttcttctggaagcagccgggcaccctggaggtggtgtcaggctgcacggtggacatgctgcaggcagtgtatgggctggacggcatccgcctgcgccgccgccagtactacaccatgcccaacttcagacagtatgagaaccgcaccggccacatcctggtgcagtggtc

SEQ ID NO: 103765 - DNA, 1190 bp, Homo sapiens
gtccatgccaagcatccgggaagcatggctggccttatccacccatgggtcacgtcggttcccaggggcagcatgggagatctttgggggcaacagggagagtctgggtggggagacgggacttgtccaagcagaaggcaggaccctgggaaatgcataatgtaaggacatcaataatagtattattttttttgtaagggaaaatcaatatgtacattctgaaatcattttctctgtaaatggttggatttcatttcacccttaaagggatgcttaaaggagaagataatattaataataaaaacagctacaaagtctgaattgtgtgcatgtgtggccggtttgtgggtgctctggggcagggaggggtgggaacaggtggctctggtcttgctaaagacacccttacttctggatccatggggtgcaagaacttcccaaggactggatggccagtggggagagggggctgcagggagcaccttcacttagggatgacgtgtcccccagccgcaggtggaagcagctgggaagtggaggatgctgggctgaggtctggtggaaggaagcagaagtgaaccaggctcctaggaccaggggcacccaccctcctgcaggtgggcagggacccttttggggatctggatgaaggctttggtgcctctgcagagagggggtggttctacaattctgctctggggcatcaaaataagtgctcctgcctcagtagtttttcctgtcaggttctaaatgcctcatccaaggtcacagccttgtagattctggacctggactctcagcaccggactctctggactcccaggagcaggtatctccctcccatgtagccaaccttgaacttgtgcttggacagcacctggagccttgggatgtcagggcttccaaggagcttcctctgggccgggtgggcactggagttgtcctgggggtcccctgtgtgtgtcctaaagacagtctcaggcggtgggaacagacacttttttttttttttgagacagagtctcactctgttgcccaggctagagcgcagtggcgcgatctcagctcctgcaatctccacctcctgggttcaagcgattctcctgtctccaagcgattctcctgtgtcagcctcctgagtagctgggattacaggcatgtgccaccaggcctggctaatttctctatgt

SEQ ID NO: 103766 - DNA, 1062 bp, Homo sapiens
ctagtctcgtacatactcaagcaagataggtttataaaaaggcctatggctttttcaattaaaataagttggaactttcacacttctgtgctgtcatcctaggaagccgcaaggcctccattattcatcatccttaactatattagggtgatgagcatttctgttcccatttttgtatctagcgagacaggttaaataacttgcctgaaatattggcagagctgaaattctccatccctagttctgcccaccaggtctgtgttccttctttgttttttattttaaccatcttaaccattttaaagtgtacagttcagtagtagtaagtatattcacattgttgggtaacagagccccagaacccttttcatctggcacatctgaaactctgtacccattaagcaatggggttccttcatgacagtcccgattggaggtggagttcttacctgctagtaggctgtaagcttatgcagcagaacctgagtggagagcgtgtcatggagaagcagtttaaactggaacaagttgaattaacttttcaagtaaggtccgtgtctgtctgttgagcttgtggatgccgtcttctgttccaggtcaccaggtctgtgatgtcagtccgtccttggatggtgggcggggggtgcctattgcactacagtaggaaaagcctttttttcttgagatggagtcttgctctgtcacccaggctggagtgcagtgggtgcaatcttggctcactgcaacctctgcctcccgacttcaagcgattctcctgcctcggcctcccgagtagctgggactacaggcgcctgccaccacacctggctaattttttgtgtttttagtagagacagaggttcaccgtgttagccaggatggtctcgatctcctgacctcgtgatctgcccaccttggcctcccaaagtgttgggattacaggcgtgagccaccgtacccggccgaaaaggcttaacaagctggcccaacttaatagttttgatctcagctgttggctcacgcctgtaatcccagcactttgagaggccagggtgggcagat

SEQ ID NO: 103767 - DNA, 1026 bp, Homo sapiens
tgctgcagacgtagggcaggtgaaggccaaagcgggtgttggtggtcaggccctggattctccgttagatacacttggctacctagttggtgcctcacagggttcctgctgcctggtgtcttgctgatcatcaccctggtcacttcatgctgattagaatgacatctctttcgtctcctattttgttacccaactcttcctatttttgttaccaatcactgtgctctctgccgccccctggctccaggctaatttttctggaatgaattgagaaggtggcgtgctggcctgagctgatggaccacttggtgttttgcgttttggcccatgtttgctgcctctatctggtctgccttgcccgtttgcctgttcctattcagtgtcttttctattttttcctctctcgttcatgccttctgttttgctcttgtccctggagcatatctgcctaattaagatgttgccttttagttgaatgccactgaagagctgtgatagcatgtttcaaagctgaactctacagagcgagtgctgagacagtatttagggtttctgggagtgaggctggtagaagagttggcctttgaccacggttcctggagtagaagtccatcctccccccaacctcctgacccattcataaatgctgagaatgtctctcatgggaacactgttaatgacccacacaggataagctgaatgcaaagttatttgcaggttgaatttcttggtggctattagcagaagtgcagagtagggaaccagagctggttaagggcctagtgaagggtttgtgtgcccagtgtctgctcgtcatctgtggctgcaggggtcagacagacaaggatggggactgccagggcaccacttcatcatgaatgctggttttcacaccttttccttattttattgccaatcaggacaaggccttgaaggaacgcagccttagacatcaggtgaggatgatggaggtagacagtcgactgaatgtcagctggaaaatccagtcactagttggggtttggt

SEQ ID NO: 103768 - DNA, 1003 bp, Homo sapiens
agcaagaacagacccaacagccagcccttcatcctccagcgtctgccataggaatgtgagaggggtgtttgctgagcgctccgggcacggccagagggcaagtgagcatgcacggacctcttccccctgtcctgtttctcacccagcacctggggagatcggtgctaccaaggaagagagcacacagataagacagaggggaggaggtgggcatttcctacattcctccttgtttgccgctgctgagattgcagtatttattgcaatgtaaatgtatcctgaaggtggggaggaatgtttaatctaccatgtccgtgtgtcatcttggtttgtgtttttccctgtttgtagcaagactctgatgataattctgtttctcatctgcccattcagtattttgttttccttccgtcaagttgtcttattttttcaatgactacctctccatcattgaggttctggtgaagctctctgcagctgtctcattccttcccaacgatagtaacaggaaatgactctttagcatcgatacctcaacatcaatttagggtagagattcctgcccctcttttgtcacagattaggaaattgagaactagggttaaccttgactatatttagaggtctttttgcctcttttccccttaacaaggatttcttatggtggtttcagtttcatttgcataaaggtattgagagggaacaaaaaacataaagctgagaatcttgagagagctcatctaccctgtctgttggtcagactcaaatgagagttaaaaaaaaaaaaaaaaatctgtatgcctgagtaccatcctggatgaatctagaaggtatggggtagagcttgacagggttcctgtgtacccactgggtatccgttagaggtaagggagaggagaggattgatagagtgttgcaaaagtatagattattcattgagataaaggatttggtttccctgccatgagtattaaaaaaatttaagttttcccaagcttgcatc

SEQ ID NO: 103769 - DNA, 1614 bp, Homo sapiens
tgaactctcagcgctggtcctggtgggtttgctgaccatgactgggcaagccgttctttttgctgccatcttcctcatcataaagtgtggaacataggcaattgctttgagattcttggatagaagaggacaacattctgcacctgcccccttttttaaatctttggggaaagatgagtaactttccccactactctgccttcctgttcagtaactcttacttttgcctgaagtaacagcatcttctacttctccatctagagatttttgtgtgtgtgccatcaaggttagcaaactttatacgtagcctaacacttaaaaaatgcactcattatcttaaacctaataaattccagagtttattttggttctcctctgttgcccttcctaaaaaatgagctgaagatgacagtatttttctttacatgcttggttatgacttttaaagttttatttaaataaatgttgaagctcaagtttaaagaagcgttgcagaggcccacggtctcctgggtcccggccacctgtccatattccacatttgctgactgtgctccctgcactccactcaagttgagagttcaaatagtcttgaaggggaatcagcttcaggatggaaggacccaggagaggccccgaggtgggagggttctgtaaatacagactactgcgagtgtccagagctctctgccatgatacttccttgggactgacttggctgagaacgtgttctgtcagaggatttgttagaactctgcccttttgtctgaaactcaaggccaaggagaatgataggagacttaggacagagctgacccttgcaccaggctgggaggctgcagcccttttagatgccacttactgtaagtggccagaataccagagaggtgggttccatggtcaaatgcacagtaggtgtttacctttacatttggatcaccttgtagtctttaaattcttggtccctgaggccaagtccacaacttgccttctagtcacttgcctgcccgcagtggtggtggatgtgttagctggtagatttggaatcagtcaccagtctttctgtactgtcttggttagctctatataagtaggggcagcttagccctgaggcccagagacctgctgtcctttttctccttgagggaggaaataaaactgcggaatacaatgtccttccatagcatgggaagaagaaaataaacatctcctttccaacagctgtgacttgtgtgtgtcgtatagaacattttcctgtgggagtggtactgggtctccattttcagctaggggaacctttgaagtgtttgagctaggtctctataaaagaatggatgggacaggctgccatgggagtcattcttttatgaccttttcagtgtcaaaattggggcagtgttactttaatactcaaccatttgcacagtcatctgtcaggaggtactgtctatagcaaaaggagaacacgtcctgtgggtccctagttctgcctttggaagacatggctaatggctcaggtattcttactgcctttgcatggaaaggctagaaaactcctgtattttttttttttttaaagacagggtcttgctctgttgcccaggctgagttgca

SEQ ID NO: 103770 - DNA, 2961 bp, Homo sapiens
caataagagctcgagatatatatgattcaccgggcctgggccaatcaccttgacgcgcgctcttcgccagcacctcgcgcgataacctggcgtcctcggccttcacaataaaaactcttcgccggaaaacgacctttccccgcccactgcgctgacaccggaagcgaggcgtgtctgggagatcactccgcgctccggcggcgaaggaaagaacggactctgatcatagaagcctagtaaagtagtacacctctctcctttcgtgaggccataagaacaaactccttttctcgtcacagctacgccctgggcataaacggttggggcgtcaaagggagggagggaagggagcgggcgggaggagacggtcacgtggtcgcggcggaaggatgcgtctgtgctgcgtccccatagagacgaagtctataaagggccggcgggcggccacggcagccatttctactttgcccgcccacagatgtagttttctctgcgcgtgtgcgttttccctcctccccgccctcagggtccacggccaccatggcgtattaggggcagcagtgcctgcggcagcattggcctttgcagcggcggcagcagcaccaggctctgcagcggcaacccccagcggcttaagccatggcgtgagtaccggggcgggtcgtccagctgtgctcctggggccggcgcgggttttggattggtggggtgcggcctggggccagggcggtgccgccaagggggaagcgatttaacgagcgcccgggacgcgtggtctttgcttgggtgtccccgagacgctcgcgtgcctgggatcgggaaagcgtagtcgggtgcccggactgcttccccaggagccctacagccctcggaccccgagccccgcaagggtcccaggggtcttggctgttgccccacgaaacgtggcaggaaccaagatggcggcggcagggcggcggcgcgggcgtgagtcaagggcgggcggtgggcggggcgcggccgccctggccgtatttggacgtggggacggagcgctttcctcttggcggccggtggaagaatcccctggtctccgtgagcgtccattttgtggaacctgagttgcaagcagggaggggcaaatacaactgccctgttcccgattctctagatggccgatctagagaagtcccgcctcataagtggaaggatgaaattctcagaacagctaacctctaatgggagttggcttctgattctcattcaggcttctcacggcattcagcagcagcgttgctgtaaccgacaaagacaccttcgaattaagcacattcctcgattccagcaaagcaccgcaacatgaccgaaatgagcttcctgagcagcgaggtgttggtgggggacttgatgtcccccttcgaccagtcgggtttgggggctgaagaaagcctaggtctcttagatgattacctggaggtggccaagcacttcaaacctcatgggttctccagcgacaaggctaaggcgggctcctccgaatggctggctgtggatgggttggtcagtccctccaacaacagcaagggtgagtgggccaccaccacatcgtcctggtgggatctagggttaggggcctcctacctttgtatctgactcacttggccccatcactcaaatgttttgcagaggatgccttctccgggacagattggatgttggagaaaatggatttgaaggagttcgacttggatgccctgttgggtatagatgacctggaaaccatgccagatgaccttctgaccacgttggatgacacttgtgatctctttgcccccctagtccaggagactaataagcagcccccccagacggtgaacccaattggccatctcccagaaagtttaacaaaacccgaccaggttgcccccttcaccttcttacaacctcttcccctttccccaggggtcctgtcctccactccagatcattcctttagtttagagctgggcagtgaagtggatatcactgaaggagataggaagccagactacactgcttacgttgccatgatccctcagtgcataaaggaggaagacaccccttcagataatgatagtggcatctgtatgagcccagagtcctatctggggtctcctcagcacagcccctctaccaggggctctccaaataggagcctcccatctccaggtgttctctgtgggtctgcccgtcccaaaccttacgatcctcctggagagaagatggtagcagcaaaagtaaagggtgagaaactggataagaagctgaaaaaaatggagcaaaacaagacagcagccactaggtaccgccagaagaagagggcggagcaggaggctcttactggtgagtgcaaagagctggaaaagaagaacgaggctctaaaagagagggcggattccctggccaaggagatccagtacctgaaagatttgatagaagaggtccgcaaggcaagggggaagaaaagggtcccctagttgaggatagtcaggagcgtcaatgtgcttgtacatagagtgctgtagctgtgtgttccaataaattattttgtagggaaagtacttgtgcgtttgaattcctttcctggcaaagtaaccgagtgaagcgccacccacccaccccaagctggtcttaacatttcctgtgagatctgggggaggaggcagtccaaggctgaagatcggttcccagagtgggatttgctcatccctgctcggtgtaggccacgatggctgattcatggggccctggagccgtatagttggccatttatagtaagctgggtcctttgcccagagctgagtgctggttgtgtagggggaggaggctggagatctctgggagattcagagggagggacagcctgggcctccacctgtttattcaagagggcttcatgccaacagctgtcgcataaaaccctgaataaggttgcacggtctt

SEQ ID NO: 103771 - DNA, 1051 bp, Homo sapiens
cctccagtttccgccccttcttccgctcaagtgtaaacccctaacgcatgcgtcctaagaaagatgggcacttccgcccatccccctccggatccctctgttcgggctcgggtttccgccgagacgacagggactgccaggtcggaagtagtgtgaggctcgtgggcggagccaagcgccgccatgtccgccgccctgctgcggcggggcctggagctgctggcggcgtccgagggtgaggagggctggccaggggacgtccggcgcgggcaggaggatggtagtggctgcgggcgggagccctggatggaaaacaatccaggccgggcttagccccagtggcatgggaacgctgcgcgccctctgacctgggtctcttcctctctcttcccctacagccccccgggaccctccaggtcaggccaagccgagaggggctccggtgaaacggccccggaagacgaaggcaattcaggcccagaaactgcggaactcggccaagggaaaggtgcccaagtcggcactgggtaagttcgggaaggggctgaaagtgctgcctccggtgctgggacctgcgccccagaggaggtggcgcttgaggcagggcttgaagcgttcgcccggtattgctagacctactgtgtgccaggcgcggagcggggccctggacatacgaaggtgacagaacacgccaccgtcctggtcctcgtggactacggccctagtggggagagaagcatcaaagaatatcaaacccagtgtgtcattgctaagtgcattgaagcctatgaattaaaagactacggtactctgatggggacttaggccaagtcagccttctctgaggaagcgacatttcagccgagagctgaaggatgtataagagtgagctaggtgaaaagtaggagaatattctaggaagaatagtatgtgcaaaggtcctgagtcagaaaggaggttgttgcctttgagaatttgaaaaaataaaggctggtaaaggtgacctagtgaatgaggatcaaagatggagcatttaaacacattcactaac

SEQ ID NO: 103772 - DNA, 1051 bp, Homo sapiens
accgccttcaggaatagtgcctttgcccatgccagtccctctgctggccaaggcttcgcatcctggagtccagctcagcaaatgtgcccggagcggccccactccccagacacagtcctttggctcaacacttggtcccctgtccccttgctgccaggctgtgagctctgtgtgtgtgtggggggagggttgggggggtaaaaaatgggtcttgtttgtctttggattccccatgtgcccaacgccatgcctggcatgcagctggcatttactatgtgtttcatgaatgaatgagtgagtgaatgaatgaatgaatgaatgaacgatggggcaccagaaaggcctgcagttggcctacttgagtcagggaatccatttggatggattatgagggcacccattctatttctcccttccctctgctgtacacgcctcgcttccctgcttgggggtgtagggtggtggggagctgagcctcaccctggcctgctctcggtggggtgaagcagcctgcaggcaagctccactgtctttcctgagaggaggctgacctagttttgtggagagggaagatggggtgggccttaattattgattggaaatcactgcacacagagtttgtgacgcaaattccaaataattatcctcattaataagcacctcaggctcacccctagcatacacaaccatctggacagggccactgttctacttgtcaccatccttccatcttcctctctccaatcttccactccctccccatgacttatcacatcattcattcatgagtagtcattgaacaaatgttaggtgagcctgtcttctgggccaggacctgctgggttctgggaatactgaggtgacttagacaagggccctgcccccagaaccttatagcctagtggaagagataggaaagtaaacagacaactatacattagggctagaataagacgagatattgatatggatggaacctcctaggttgtgcagtatacaacctgcacaactgtacgtggcagcctaggctaggtcagaggtgctgagattg

SEQ ID NO: 103773 - DNA, 1050 bp, Homo sapiens
gtagcctgtatggcttgcatctgaggggacatcagaaggcttcctggaggaggaggcctttgtgctgggctctggaggcaggtggcattccagtaggcacatcaggggctgtgaagaggaggagcctggtgcaggggcagggagcagcctgagggaaggcctggggcagaagcagagggtactaggcagcgtggtatcctcctgacaggctcagggatctgggctgggtaagcctcgagtgccagggaaaggtgggtgacctcgtggtgtgggtgtatggtcagaggaggcagcgccaggtgggcaccctgagcaggtgtagagtcggcacctggccagaggagaggataggggttgcttcctcgaggccagcgtggtctgcactgctgcctgggccctctgccttccttctggccagggtgggaggcagctgacgctcaggcagcccccgcccaccctgcccaggttccgggtcctgtgtcagaccattattgcccacaaactcttcgactacgtcgtcctggccttcatctttctcaactgcatcaccatcgccctggagcggcctcagatcgaggccggcagcaccgtgagtggctgtagcctttgggcagggcaggcgccaggccaagggacagctcgccagggctgagcagggcagggagacctcaccgaggtggggaggcaggacaggaagtttgcctttggggcggggaaagcctccgtgaactgagaggtggcagcctctcctctacgaaccttggccaaagcagcggctggccagtggccgggcagctctgggagcccctgagcctatggtatctcccgatgctttcaggaacgcatctttctcaccgtgtccaactacatcttcacggccatcttcgtgggcgagatgacattgaaggtagctcccggtttcacccgggacccctgctagccccagctcgggcccctggccctgggtcagcccctgcctcagcttgtcactcgcctgccatcggcttcatttcactcgtagccccatggcccacccctctgggtgccagc

SEQ ID NO: 103774 - DNA, 2110 bp, Homo sapiens
tcaaaatcagtttctacaaataatttattgtctcagcaagaagttttagaagactcaacctatgtgattcaaactatgactgtcttaatgaaaaaaatttaattttatcctctttgaaaatctccaaattgctggaagccaagtaaaccagatcaataccaatttttaaaagattcaaaggcttttaagcctatgacttctcaggaagtcataattgcttagaaaaattattcaaagtatgtgttcagcttttaattatattaacatgcaagaaaaaaacatctgtacatctaattatcatcagtagccagttgattgctggatcttccaaaaccagagacaagtcttcttaagaatcaaggcttttcagacctctccactaatacattgcagtatgcagactttgtttaacttcgtttaacagaagagaagatcctttgaagtgtagtggaagacaggctgacatatttctgtggtctctccttctaagtgtagacacagcttttgttgctgataccttggtcaacagcctttgtgcttatcagttcttccttagttcactgtccttctgactgagaaatgtgatgtccaaatgttgaagtttctggacaagaaaatggagaaggctcctaagatctattttctttctcaaatgaatcatctttttgaaatgcaaatttctgcttaagtgcatgagacgttaaagacatcggatcccaatatgaattttttattttcctcttatgaatggatctgccaccaggtgactgttcaattgcacagagcttcactttatttatgtcctctagaacatccaacatgtttagaacatctttatttctgtggctttttggatgatgactatactagcacctgggtgctgtttgttcatttcagtagctggattatctgagtcacaaatattattagatcctagttgtatgggaagaaaacatggaagctagagagaagaaaactgaggaggaagtggtagtggaggaggagaagaaagcattgaacttggaaactgatttttattatgttaaggcttattatacactctacaaaggaacagagtataaatgtagtaaagaacaaatatatatgtgtgactccccactcagctgaacagcccgtgatgatggcatttgtcccaaactaatgggcccatcattcaagccaaaggaactagaatttgtactgtttttcagttcctgcatttccaaaattgcaggaatctgagagtgaagaaaagttagctcatcttcaagggcacctattttttttttaattgcagcttcatttacaagcagatcatttttcactggtttgttgtgttttagagcagatgacactggatcccaaactagttgcaaaggatggacacattgcattttctcttcatttttccatatactattttgaaatctgagaaaactggcttcctcgacatttgccacacacaaaatatcagcaaaagacaaaacaacagattcagaattatcagagtctacagagttcaagaactggatcaactcaaaattgtgccttcaacaaggttctaacagaagcattttctcattaatatgaacagtattcctagttgatccatagtctttattttcccaaatcagcaaaacctgatctataggaacaccagaatattcactatgagagacactgatgaagcaaatacagaagccaattcaaggaagcattgtcagtttcctggtacctttctctaaaagctggccttccggcaactaccagaatggcaaatggaggacattatgaatcctgtctcggaatcctccattgaagaggcactgatcctggtccaggagtacgcagacatcaacctggtgtctgctcgcacaccttagcttgcaggccacaggcagtaacgatgacctcactgaggggtgtgagatcaacccagtgcccagccctggaacccttcgctcagccagggtaactccctaggcggcatggttgcctcctcctgttcccagctaacctatcaccggtcccgaggacaggacccctcagtgttacattttaaaccatgggacaaaatcagaatattttaatttgtatatagttaacttga

SEQ ID NO: 103775 - DNA, 1035 bp, Homo sapiens
ctgtgcaattgaacagtcacctggtggcagatccattcataagaggaaaataaaaaattcatattgggatccgatgtctttaacgtctcatgcacttaagcagaaatttgcatttcaaaaagatgattcatttgagaaagaaaatagatcttaggagccttctccattttcttgtccagaaacttcaacatttggacatcacatttctcagtcagaaggacagtgaactaaggaagaactgataagcacaaaggctgttgaccaaggtatcagcaacaaaagctgtgtctacacttagaaggagagaccacagaaatatgtcagcctgtcttccactacacttcaaaggatcttctcttctgttaaacgaagttaaacaaagtctgcatactgcaatgtattagtggagaggtctgaaaagccttgattcttaagaagacttgtctctggttttggaagatccagcaatcaactggctactgatgataattagatgtacagatgtttttttcttgcatgttaatataattaaaagctgaacacatactttgaataatttttctaagcaattatgacttcctgagaagtcataggcttaaaagcctttgaatcttttaaaaattggtattgatctggtttacttggcttccagcaatttggagattttcaaagaggataaaattaaatttttttcattaagacagtcatagtttgaatcacataggttgagtcttctaaaacttcttgctgagacaataaattatttgtagaaactgattttgactgttaaatgttaaaagtagaagtatttaaagaatcttgacaagttttgtccatacttgctatgtaaatgtgtatgtctgtcatttttgtttcctttgtcctttactacatttatactctgttcttttgtagagtgtataatacatgagccttaaaaaagaaaaatttaacattttacacaaatgtttgtggcagaattatttgtaatagccaaaagcatatctatttctctatctctatagaagagagaaa

SEQ ID NO: 103776 - DNA, 1006 bp, Homo sapiens
acactgcctggttaaatatagctgccaagggacagccttgggacagtgtttacagaatagtctttccagcccctcaggcctcaagttacagatgatagcaagccttccctccttatcagctgcaaacagagatgcccccaaaagtggtgtcaggccaggatgatgaaaggagaagggaaaggctgcggatggccttcatttcctgctcctggcatctggggattccgagaatgatcccaggacctagatcctatagattccggcagctcttcctgcaaacacaagcccttgttgtgtgcctgagccttgctctccggcctggagacatccatctgcccactctcctaggaactgctgattaccaggaagcaccatcggctctgctgccctccccctggcagagaggcacaatgaccacattatttctcttccagcttcacgttacagcatggaagctgttgccaagtttgatttcactgcttcaggtgaggatgaactgagctttcacactggagatgttttgaaggtaggtgacctggggccccaggggagcagtagggagtttcagttactcagtaatctgacagtccctgcctttgtctcttaagaactgcatgtggttccttttaaaaagagaagttcaccttgattccctttgtgcacccttataccagacaccaaccaggccgggtgatggaaatacagtcggcataagccaccatccttgtcctgggaggttcgtagtctggagaggggaacacatccacccaaagggctgttacagatgttcttggctaagttctcagggagcacaggtgagggaacaagtgattccatcttgaaagatgggggttgtaggagtgtgtgcaatgtgaacgtcaggaatgcactgaaggtgacttgggcttttagctaaagctcagagatgtgcaagcccatgctgaatgcagggagcagcgccaggctcagcagagctggaactcaggaggagaggttgtgggtggag

SEQ ID NO: 103777 - DNA, 2076 bp, Homo sapiens
cagcccttgggaggcaggcagggcaggtgtgggaggcgactcggccccaggcgcacatgggtaggtaatcagtgggaaagtgtccctagctgcttcccttccttccccaggataagtgactgtcaccaaaaggcccccccgagatcagcaagcttggcctgtggccttttgctttttcacacccacagaaggggtgaagctggggctctttgcaggcaacagcagccgcacccgcccgagtcctgagctccacgtcagcagggcaaggggacggatggtgttgtctttctctggccatgcatctcagtttgcatcctgctgtgcaggatgaattggagggcagaggtgagtaggagagagcagttaggaagctcatcaaagcatggtaggaaaggaggagagtccgagctggggcggtaccagtggggacagaaaggattaaccctgagaaggtgcccggggtggggcctgctggattcagtgactgatgggatttggtcggtggggaggaggaggaggcctgggcttctggccagagtgactaggaggatgttgatctggggagtgcctgtgtggctgagggacacgtccaagctgcagtcggctctgtggttgtggacacctggcagagccatgccttctctagtctgggtcatccaaacacacgtggggtgcaggggccaggtggagccctcttgtcgtttttgttatctaacggtaattacggagtccagaaagagaattggaaatgccggcagtttaattaaagctgaatggcaggagaggggcatttggaggctccctccctgccttcactccccgtcctgccgcccaggcaggatgtcagatgaggagacgttgagctcatcaaacacccaatgagaagtcttacaacatcagaagctgtctgccaatgcgcctgcgacagcttatagaaactgctgccgcctcgaatcaacctctctccccaggcattgcacgtcagtaggtaaccaggtaaaggacgccgggggtgggcagccagctggagggggcgtgatttcctcccccaacaaaatcggcttccctgggttctgagcccatgatatcatgtttttaaacccgattttccatctacactgggagctttgaagttcgctcggtgtggggaatcacgtgctcagtgaaagacccaagcggagagactggggagctggttcccctgggcctgacactgcggagctgaatgtcaaagcagggccctcagagaccaaagcggagggtaattatcacttctccacaactagattgcaggagtcagccagcaattgatttttttttctacttcagatatttcattgtttaattggtagtgacacagatggctggctcgcatcagggcgtcacagtccgactcgcgaaagccaggctgtggggactgctgcctctcctgacatccttaggcaggtggggctaggacaggccagcttccctgcttaatttttcaaccacaaagcaaaagtaagcttgtgaacctgagacatgcttctgcaaaccggtcaagctgtcctcagcgacatgagtccactctaaactggacaccttggagtgttcagaaatgagaggacagtgaactcttgcctagacagctcgtgggagataaactatcagcactaggagatggcgatcaagtatcagagccctggaaactgcattgctggtggaatgaagccagaactctgtacattgtgttcaaaccctccgtatccagcccgtgtaccttcacccttatacctaccccatacctgccctgaactgtgccagcccagctggaggactcgaaggtggttttggtttggttggttggctattttggaccccaggtgcaaagagctgattgtgcactttagttcacggcacaatgccaccagagagccttgaaaggcctcatactttacctttctccttccctcccactcctttctccttccacaggcagccacccttatgtgttcagcatatgtcctcagacatctttgtatccttgaaaagtatgcagtgttatgttatgcagtgtgcttttttgttttgttttgt

SEQ ID NO: 103778 - DNA, 1054 bp, Homo sapiens
ttctcctgcctcagcctcccgagtagctgggactacaggcgcccgccaccacgcccggctaatttttttgtatttttagtagagacggcgtttcaccatgttagccaggatggtctcgatctcctgacttcatgatccgcccgcctcggcctcccaaagtgctgggattacaggcgtgagccaccgcgcccggccttaaaaatgttttcaagtcggagcaataccacttgttgaaatggcagtaataatattagctaacatttattgtatgcttactctatgccagccttttgacatcttttcccctaattcttagcccaagcctgtggggtaggtatcgttactatactatgaatgagaaaagggatctccaggagccacacagctatgcagttccagggcataggtttagtctcaacgtctgtctggtttgagagcctacgcgtgtttcattttgcctcctccttgaattatcagagggagaaagggcactgaaaagtagagaggaatagaaaaggagaataccactgatgattaggttgcccatacctaacttaagaatttaaattaggctgggcgcgatggctcacgcctgtaatcccagcactttgggagaccgaggcaggtggatcacttgaggtcaggagttggagaccagcgtggccaacatggtgaaaccccgtctctactaaaaatacaaaaaattagccgggcgtggtggtgggcgcctgtaatcccagctacttaggaaaccgaggcaggagaatcgcttgaacccgggaggcggaggttgcagtgagccgagattgtgccattgcactccaatctgggcaacaagagcgaaattcagtctccaagaaaaaaaaaaagtttacattaagctcattcttggcttttagaaattaataacatttttgcaaaagtacatcttatttcttccctgtttaatttttataaagattgtaaaaatacattttagctcaagagttcaaggctttcagagccctttgtgcagattgctgctccagtcccgggctattgtgtattgtgataa

SEQ ID NO: 103779 - DNA, 1187 bp, Homo sapiens
aataaaatattgtaactaataatacagttatatctttatagatattcaaagtagaatattttaagtttgaggaaaagaattagttcaaattaatttacaggtattttaagaaaaaaatggtatatttcaggaaggttgacaggatcattttaataaaaactcatttttaggttcacaattccttatcagaaactcttaagggccagatgtattttatagctcagatttttttttttttgaaaactaataagatgcacttaccatatgttatacaatgcccctgcagggtcagaggcagcacttcagagtcaaatacattagtatttcagcagccaaagctatgactaaagtctaaagtgggtagactataaatagtttcatgtcagttcaggtcagaccttgccaccaattaaattcccatcaggtttcaccaccaatgaattccagaaaagttttggttttcagaagtttttggattttggaattgtgggtaagggactgtagactatttactttcttagctctaatgtttgctagcatttgttactctctgaaaatggaacccactttcctttttttttctgctacaggatgtaagattaaatctgttctttctctataggccagttaatagaaattaggacacctcttcacaaagctcaataccttaggcagttgccactgtcccctgatacctccactagatacttcctactccttgctggctttatatgaaggatctcatagttcccctcttctcctctctcctttcggaggtacctcgtgttaataaatgctaagtaaaagagatttaaaatgtacagtacctcatgtaatatctatcctatctcaaatagaaatgtttcagaaggtgcaacatgctttctctggaccgacttttcctattaccagcgaatgtggaagcttaaaaagtaacgtatacttgtgtgtcatttggactttggtattaccataagggaatatatacttatgataacatgaaactccaaatggtacagaagtataaaggaaaagcagaagttttctcttgccctactgcgcccctcactcctccagcttctgaccacaaggtttggacccttttaaaataatttttttctttagctcagacattccaggggacagtttggggaattctgattaggcattataaccccacttggatt

SEQ ID NO: 103780 - DNA, 1037 bp, Homo sapiens
acatatgatgctccaggaactgtttttacagtgcgcaagatgcacaggaacagaatagcaaactcacatgattgttggcaaggaaaacctggctacgtggctgatgttaaatttgctttttaagacagccagatcaagaaatgtctgaagactttgagactgcagcagggagatgattttgcagttagtaaacacagccctgggaagccatggcaaggcagttctggtaagccatttacagcttctcttctagcaggagagcacagtggaggctctggagaggaaaacctgacgtggcctctagagaatgttgcccagggcagtagagcctccctggtggcactgctgtcagcaccaccctgcacagcccggcagaaccctgccttgccctggccatctctgtctctgagattcaccacggaggttagcttggttataggtgagctgttaagagtaggggtttgtgttcttggaagttagggcttaggagccacacatttccttcttgcccagctcttgcttgcttagaccattttctttatctttttcaatgaacacttgtcaaagtgtgctccttcctcccatccaagaccctttcagaaggtcacaactattttaataatactaagatgctgtatgccttttaaattcattctcccatgagtgcacattggagtttttccagacatgtgatactgcaaaagattgaatgcaaaagtatatatttgggtgcagctgttgttgctcaagctagacattaaagaaatttgcaaagatgtaaaacagtgccactgtcctcaaatttttaatcctttgaaataccatttttaatttaaaaagcaatagtttattatttctaagtttcagggtacatgtgcaggatgtgcaggtttgttacataggtaaacatgtgccatggtggtttgctgcactgtgaacccatcacctaaatattaagcccagcatacattagctatttttcctgatgtctccctccccccgccacccacccccagccaacaggcccagtgtgtgtt

SEQ ID NO: 103781 - DNA, 1675 bp, Homo sapiens
tttttttttggtagagacagagtcttgctgtgttgcccaggctggtctcgaacttctgggctcaagtgattctcctgccgcagtctcccaaagtgctggaattataggtgtaagccactgcgcctggccttcaataaataattattaagcacgtgttatcatgggatacaacagtgaaccaaaaatacatggttcctactctcaaggcggtttcattttagtgggagacatgaataaatataaataaagataataattataaatgatggtaagtactatgaaaaaaataaagccatgtcatgcagggcagctgggaggaagagcgtagctagtcaaggaaggtctctctgagacggggacatttcagctgaagctaatgggcaagggagccagctgtgtggagagctgaagcaacagtgttctagacacaggaaacagctgcaaaagcccttggcctcttctaagaactctcagaaacctgtgggccaagtgtgacaggaggttagagagagagacagagaccttgcaagacctcagaggccacagtgtgcaacgtggacctattctccatgcctagggcagccattgaaggctgttcactcgaggagtgatgtgatgtgtaggatttgcattttaagaggtggctctgtctgctgtctggacagtggattggaaagaggtaagagtggaagcagggagcctggtgagaaggcacgtgcagctgttcgggtaggactacattcatgggtgttactggaagtggaggaaagacagacttgaggtgtattttggcgccaaaactgatgtgactcgaggatggattgagatccttttgcatcatagaaatcaaaaggggaatttcaagagaaaggctcactcagtaacttcagatgctgccaagaatcaaggaggttgacaagtgagaaaagacacctggatttgtttaagaactaattaaagagaaaggatatgagaaaactttctagggggtgatggagatgttctgtgtctgataggggtgcaattgtttataattacaataaaaatggttacagtgtaggtatgttttatgtggtgaaactgacaatcaaatggagtggagaatacatggaagtatagatgaagcaggaatggcagaatgttggcaactattgaagtgttgtgatgggtacataggagtttatttgtatttactttgtacatgttttaaattttctatgatagtttctaaaaagaacttactggtgttcaagggtgccatttaattggagtaggaggtgcagaaaccaaattttatgggttaaagagaaattaaatgatttttaaaaatgagttatgactatagtccaccacccaattttaggacatttggaaataaatggaagagagaacaatgaggaggaggattaagttcaagtgaaagattttttttaaatggaagaggactatgcatgtttgagaaaagagggaagaaatgggttgaggaaggcagagtgcagttagaaaaaggtttctcagattcccaggcttaacgggcctcgtactgcagtaatgcctgagctcaggcccaaatcctgctcttctgactcttgtttaatggcggagggagttttggaggaggaaagaaagaaaggaagtgggttcagcttttctttgtattgccttcgaaagagaa

SEQ ID NO: 103782 - DNA, 1015 bp, Homo sapiens
aatggactatgctgccacgaggccagattcattaaaggaaaatggctcgtcttgtatttgttgtgaatggaaaccaggatattttcacagctggtttaatttgctaaccaggcaattttaaaaatagctcacaatataaatcctagctttgctgtattctatcaaatgcacttacattttgcatgggctgatggaatcaattcatctttagcaaattagaatgccagacatctagtcccagtagaatgacaagagaaacacttcaggtgcttttctccgtgtccactgcacagccctccacccccacactctggtcaaaggtctgtcatataaaaattataactccatttgtcgagggttttctgtgcacaaggtactttgcttaaatatgttttactctgtcatttccactcattacaccatttcatctccatttcactcagagatcagggtaggtaacttgcccatggtaatgcagcttgaaatgcaatttagatttgaacccagatcttaccgactctctcacaccctttgccatccttggaagctatgctcttgaaaaatactgttgttagtaaaactgcagttgtcaaaatcaaagtctcatgaataagagggagtaggccaggcgtggtgtggctcactgtaatcccagcactttgggaggccaaggcgagtggatcacttgaggttgggagttcaagaccagcctgaccaacgtggtgaaaccctgtctctagtaaaaaaatacaaaattagccaggcgtggtggcacacgcctgtaatcccagctacttaggaggctgaggcaggagaattgcttgaacccaggaggcagaggttgcagtgagctgagatcacaccattgcactccagcctgggcaacaagagcgaaactccatcttcaataaataaataaataaataaataaataaataaataaataaataaataaagagggagttgagggagacaatgaaaatggcataagcctatttttaaaaaaacaggtgga

SEQ ID NO: 103783 - DNA, 1096 bp, Homo sapiens
gcgcagtgcctcatgcctgtaatctcagcactttgggaggctgacgtgggcagatcacgaggtcaggagttcgagaccagcctggccaacatggtgaaaccctgtctctattaaaaatacaaaaattatctgggcatggtggcatgtgtctgtaatcccagctactcaggaggctgagacaggagaatcgcttgaacccaggaggtggaggttcctgtgagccgataccatgccactgcactccagcctgggtgacagagcaagactctgtctcaaaatatatatatatatgttttcagcatattatttgaaattagaaccaatattttatttaaaatatgtttgttctgtttccaaacttttcatgcagtttgctatttaacacttacaaggcaacacatataaatatttgtatacaataatattctacactggggaatggagacttagcaaagttcagtttcataaagaaagcatgtccatcacaaattaaaacaaggtggatgttcagtctccacacatttttacaaatcgagccagctacaagcaagtaggctttcagtaactcatctggaaggtattggaaggataaaaatagactaaataatcagaatttccattctagtagtttcctgctttttcctgcatctcaattgtcagtgcagggcctggctatttcactcagtgctaggcaaagacagtggaagcttgttaagccacagctattcaggctaccagattgtccaggcattggcctttgcctgccatgaaacagctcctttcctgtcgtcatatctgagtggaaagagcaaaggcgggagactgtataaagacccagaagccaggatgacaacaagtgttgtgggattttacaagcattcgtaggttccttttcaaggaaagccgggtttctagaatccatcagttgtctgctggctggcatggcagcctagtttatgggagaagcacactagggaatcctcccttttctggcttatagagataggtggagtcgatagtcacagggcattctcatgcactttttttttttttttttttgagatggagtttcactcttgctgcccagtctggagtg

SEQ ID NO: 103784 - DNA, 3385 bp, Homo sapiens
tcggcattttagaaatggaaaagacgtggtaaaatatttagattttgaagtgatttaattgcacttttaatgtatatgcagattttcatcatcgtttctatcttgcaataaatgaagctgcgagtaattggaaatttgctatttagaaagaggtttttaaaaaacacagacctccccctccccccttaaatctgctgcaaaaatttgcataaatataaatgggtttgcattctttcggctgctaaggccgacaaaggatctgggagggcaagccctagaacgggaaagcctttttctatctttttattttttaaactgggccctccttcctagagagatgtaaaacctaaagtaagacctaatacattttaaacatcaggttgggggcgggtgaacaccaggaggtttggggtttgtagattcccctgcttgaaaacctcccaagcaatatgtggctcacccctctcctttctgcgcgcgctcatttgcactgggtctctgtgtgtgttctcaaatgtgcagccagatgcgcttttattttgatcctggattcaaccaaagggtaggactatgttgtaaacatggtgttttaaagatatgaacagctattcaccgcgattagaaattatttctttatcagttctccctgtgtattagccttcttcattcctcacgaaataaaatttttgtttaattttacacagatgcaaaactgagtttttcagcataaattcatcgtgtgagtgtgtggttgcctgtttcggccatgtatccactgcgaagtggtcatttagggtcacatgtataagtagcagtctatgtgattgttagtaacccctgaagctgtgcagtgcctgaagttaaattccattactcctaatgcaggattctggaagcctgagagcagggaggaaagaaagctgaaaacttgctttctcagagcctcctccccctatcattgtgagagtgtgatgtaatgcttctcggtctggtgggctgaaaggattgtagtttgtgatgtggcgggtaaattgcccccacccctgggtaaattactccacccccctgagcacatccctggctctgagaggccttgttttcttttctctttttttcctaatttgtatcctcctgatttatgctgtggcatattggcatgagaaagagactgttcttctaaatctgttacaaagtatagtttagaaaaggcatttaaaatatgcaaatgggttgaattgtcatatccccatcattaaatatgtagacgtggattaaagctaattaagcataaatggaataattttgatcagaagggagcagtgttttttgttgtttcctttttaattaatctaattatgagatgcttactgggcctgaaagtgttaaaaaagataaagtggaaaaaatgctggaccattttgaaaatttgacagtctggaagagggtgtgtggtgctttcaaaagctttattcactcttaaaatggattggcctcttgtgctgaaaatggcctgtttctttgggccaattgtgtgtagatgaagggactttcacgctaatttaacaaaaagactttccatttgaatacataagataattaaagccctctgtctctaacaagcaaggattttattattttaaaaaattaatgttgttatgttagtaatggtaataaatacagaagtgactgtttagattcactgtaaattttttgatgatataaattcagcttttgtgtaagaaggattggaaacattacattaaagaggtagtctggaacaaagttgtctctaaatttttttacggcttgaatttaaagggaaaagatagagaaattaccttagtgatagagaatgttgcattgtggtagacctaaaggaaaatcagctctgatttttgttgctgtttttctgaaaatgaaagcacttttttggggctttgcttgttatatgattcattttacacctatttcctaaagttggtcttactgaagaggagataaaacctaggctttccatgttttgccattatcttgtttttgtggctgtgtaaacatatgaatggcaggttaattcagtttgcagagaggaggaaccagagcagggtacctgctgtcttaggcagaacagagaatgatacaatgaatgccatttgattctttgaaatgttttttataaatattcttttcccctggataattaaaaggtgagataaataagacctggcttcacgtatgggaagcattatggctctggtgagttgatagctcgactgccattttggatctcagatcctgcagagccaatccttctggctcaccaacacgatggtcatccagaaggaaatgaaaatgagtaatcaattaagtgtgcagatggatagtatttaatttgtgccttctgttgaagttttctttctgtgagtactgtgaattgaagctttaaaaactttaaagatgtggccgatgttatgaagagcaatatccaggggtgctggaacttgcacgttgtagttttactttttaaaaatgagatggcatatgcagaggaagtttcttattggagaaagtgaatataatccctattaactgccaccccccccaccaatctatatttcctaatgctggatcaactagtgataatatcacaacattactctgtctcagaaaaaaatgtcacaggttcatgactgaaagatcacaaaaattggtagcgttcatcagaagtggtatctcaattttaaagtgcttttcagtcattccatctggttcccagaaaggaagctttggcatctttgatatatggtgcaaactcagctctgttcttcagctgtgaatggccatttgttattctgtgtggccactcggatggtcctttaaaaataaacttccgaacattgaagcagagacttctaaggcttctccagctcttcagctctacaagagacactagaagagtgttatgcgatgatgagaccttcaggttctgcagagcaggctgagcagctctggctattgaggaccaccctgaggaataagggtggtcctcaccctacccagctgctcctcaccctacccagctgctccatgactgaaaagtttggaaagattttaatttttataactcagatcatataatcattgatcatctgcagtttaagctggacacagccctgaggcaatgcagatagatgaatgtactttgtccctttcctcaaggagtaccaggtcagcattattggtaaacagatcgtcacaacttggcagtttatgtgcaatattcagagcaagttcctggttacagaagtatctgagtatctgcattaggagggtccttgttttaaaatttcttaaagaagccaaataggccagtcgtggtggctcacgc

SEQ ID NO: 103785 - DNA, 1039 bp, Homo sapiens
agcgattctcctgtctcagcctcccgagtagctgggattacaggcatgtgccaccacggccagctaatttttgtatttttagtagagacgaggtttcaccatgttggccaaaatggtcttgttctctttaccttgtgatccacccacctcggcctcccaaagtgctgggattacaggtgtgagccaccacacctggcaagattttcctttttaagttgatttctttggtaaggtgtccaaagatggcatacctgtactatgcagtgcaaggtgctgttcagtgctattaagggaatactgtactattttataaagataaggccatatactctcattaccataatgattattagaagtaccaaaggagtttgagggaggagagacactgattttaactgtgttgatcagagaaagctttgttgaggactttgtatttgagtggaaccctacagattgggcagaatggtggtgagtagactcatggcaggctgtattagctagagtaaggtggaggaggactaggtgtgtccagggaggattgaggggaggttgcacacgtgtacaggagctgagtgcctgctgagtagtttgtattgctatggtagacggtggggacctgttgaaaatttgatggcagtgcagtgagaattttgatatggcagtggtgcagaggaggacttggtgggggggcactgattaaaggaagaattgagagacaggcaggccaattaggggataaaaggactgttatgaaaggtcctgctataaggctatggccatgcaactagggaccaggtttttaaggtgaatgatgggaatcttcaaccaaaaggaagatgacgcattccaggtcagacttactgaattggagaatttggtgggacttggcaatggaactggttagcaggcagctggcagtgtggatctgcagcttgagaaagaggtcagaagtggagataaagacttggaaggcttccacgtggaagtgatagtcgaaggtaagggagaggatgaggtcaccatgggactgtaaagaata

SEQ ID NO: 103786 - DNA, 1041 bp, Homo sapiens
ataaaaagaaataagtgaaattaatttcagtaatatcgactttatttatgtaaaatattgttaattcaacatattattgattttaaaatgttaacgcaacattttacgttttttttgtaccaagactttgaaacctggtgtgtatcttaggcttacaacacatttcagttcaaacataaaattttcattggaaatacttgatttgcttttagatttcataaaacttactactttttcatggaaaagtaggttcacatacccacgtttttccaaacataaaaaagttttccagcaatggaaatgtcagtttttaaatttaaattaattaaaatacagttaaaaattcagtttgagtggcactagtctcattgcaagtgcacagtagccacgtgcggctactctgttggacagcacagggagggttatgcgaagtaaaataggctactgtacagcggatgtgcactctgaaaatacccaaaatggtttagcaccatcgcaaagcatttcacaggattagtgtttcttagaatacatgttggcttatcctagtggaatttttagaatttagaagggtcaaatctctaattttgaatgtgaggagacaaactttttatgaaaatacacagattccaaaatttgaaatagtgtttgggctacagtcagcagaatggtacattggtagaagttcctaaacataccggtttgtgccatgtttctgaaatgcttggtgcagaggcttacacttaaaaacagatccagcaggaggggtgggagcgttcctgttactgtttgtgagtttcttttgcactccctggagtcagtgaggtggtggcttcaggtggggggatgaagttaggattgctttaagtcagtgtcccagcgtccctgtgtggtggaggtgtgaggtgggagagggtgccaccaggctaattatgttgtgcttgtctctcacttttcttatctcacttttctccgtttagccccgtttagtcattgtgtactttttgccgacctgggccaattgaacgcatatttactaaa

SEQ ID NO: 103787 - DNA, 1049 bp, Homo sapiens
cagtgatctgtggctgtgcaggggttttttttccccagcaagggaaggtgaagaacacagttagttggggttggggtttgtctgaggttgcgtgaggataggcttagaaaggtagtgtgggataaccagggggcaaggtctttggagaatgctggtgaatatgcatgacagtgcgtgttaggttgagaataaaagaaccaggggcaggcaaatggtctgaagaaaaggaaaagaagaaggagtctgggttggaggaggtgggaatttacatcttggaagggcttaagatagcacttcctggggtaaaccccgggcagagcattcctgtgtgctttacctgtgctaactcatttcatcttcatgaagaccctgtgagctggtgcggagagactgtgttgcccgaggctacacaggtaggaagtgaccccgatggcctcggctgctgagcttctgtgcttgggcattatggtattctgccctaggaagaaaccagacaaaatacttctcccaggccaggtagcattgcagtagcttcctgaagttgctgggccagctttccttccagaagaaatatttggcgtggtgtggaagggggctgtgaactgtctcctcccttttagaagaaatatctgtatttcaggtagcagtgtccttgatacagaactcttagttttccccacctgctttgcacatgcttgaatgtcctttaataggaaacaaagatgcctaacatctcacaattgggaaaggctttaaatgcaatcagcctgtgaattctctgagctgtagcagcttctgtgtttacttgtcctccccccaccaatagagaagaaaagccagagtggctggtccctccaccagcttggggaaggggagggggagacttttaggcactgtggtccctaaaaggaggcgaactggtgtttcctgctacagaacactggtgcatctgcagtggtttggggaggacgtctgagtcctgtgatgtatcactcagggtctaggccctttgtaaacccaggggagacctgctttaaattttgctggga

SEQ ID NO: 103788 - DNA, 1092 bp, Homo sapiens
ttcaggaaccactgaatattctagccccatctttctaagggttcggtgatgtagaatgctaaaagggttcgggctgttagtcagagagggaggagggtgtccagcatcggcgtgggcctctagttgttcttttattgccctttatgatgtgtctattttgctttttctttcctccttcagttttccttctctccatctccccacccaaatagcatcaccttcctcagccctctacttttcatccctattcgcttcttaataaataaaagcgaatcaaaaagacagcaaagagaaaggagaaacattttataatgcagagttttgagcaaaatacttaactctgtgtctttatatgccaccacatctctttaatttttagaggatatgaatattttgtcgtttgtatttcataagccatctgtactgtgttcagactctgtgggttctttgttgtttaattataggaaaaggaggtatagggcaggaactttttacatacttgtgaattttggtcagtcctgtgaaatgtaagcctctggcatttattcacggaccattgggataaaccaggcatgtaggttcaattttttttgcctttgttgggatgctgtggccagtagccagggccagtcattccagattcatcccctgccactctagtccccagggactaacagagtccagacagtgtacattttcctggctacgggcttgaccttctgcttcctctgtcccactgcattccaaaaatgctaacaagtgactagcgagcgtaaattttatgtgttgcaaaagcagttgtggaacttgggtttcaatgtttgcaccactatttgtaagcaggatgttatctctaaatgatacatgtgtaactgacccaggggggctgcctggcctccttgatgctcttctgtgagaataattgactctggtagtgacagagctgcctgcggctactaagaagctctgctgtacttaggccacctgccattgttctgtctctgctgctgctgctgctttttctatttttaataagttgccaattacttggtttttatagtgataccaacagttcactaaaatgggcatagg

SEQ ID NO: 103789 - DNA, 1081 bp, Homo sapiens
cctgttaaatgagattttatgtcttctcgtgtataacttctgatattctccttcctttcttttatggaaaacttttctgtattaagacttaaactcctgccacacctggagtaataaacttgtgggaaaactgaataaagtactaatgccactgaactgtacagttaaacacagttaaaatggtaagttttatgttatatatattttaccataatggaaagtcaaagagcacatggtgaagggacacaaagcctgcagtgagaggccatcagggaggctttcccagaggaggcggcaccctcagtctgagaagtattgatacgagcagtgaccccgggaaaagagatgacaagtgggttctaacttggacctgaaggggctggagaacaagtggggtcaggccctggtgtggcagaccgaggagatgagacttggcccatccagtcacgggaagccactgagggattttaagcaagcaaatgacaagtttggattccatttcaagaaagatcactctggctgctctgtagaaaatgtatcagagggtggcagaactgcatcaagggagacataatcaggctaataacaatcacagtgataataatagcagctagcatcccgtggtgcagtggttcaggaggaaatgatgagtgcctgggaggctgcatagagtgcagtgatcgcacagctagtaaatgatgggctttggaaagatgccaagatttctgcttttgggggaagtctttactcattttgcagtgcactactgtataggaatagctaatccaaagtcaactgataactcttcaaatatggaaaaagaactcgggttcatatgacaaataatgagagaataatatgtaagctctcttccttaaaaaaataatgtagacaggtaccgaggagaaagatgcctgtggctataaataaaggggtagcaggctgggcacggtggctcacgcttgtaatcccagcactttgggaggccaaggcaggcggatcacgaggtcaggagtttgaagccagcctggccaacatggtgaaaccccatctctactaaaaaatataaaaactagccggg

SEQ ID NO: 103790 - DNA, 1151 bp, Homo sapiens
gattggtctcaaactcttggcctcaagcgatcctcccaccttggcctcccaaagtgctgagattacaggcatgaaccaccacacccagccttgtgttgtatttcttacaactgcatgtgtatctacaattatctcaaaaagttaaaagcaaacaaaaaaattgaataaagcaggtctcccttggtgctcctagttttcaatattttttacttacccagatgtttcttctgtaataattttctgtgcaatgatttgttttgatcaagtttgacaccttactaaagaatacttagctttcttttttttttaaccttttaacatctttcaaataaggatgtatcttaacaattcatggagacttagcattgaatcactttaattggtgtcactttttcttagtggcacatgaaatattgatgtatcttacaatcactggtgtcctagatccgatacatatgattagtgagtcattcagccatgttggaaaagcacagtagctggtgacagttttgctagctacatttttcatgtgtgatttatcagttaagtgtgtgtttctcagccccaagcccccattctctgtgtgtgcttttaaagctgggatcctgccagccacatttctcattgccatctggctcttccttaggcagtgccaacggggcaggagagggtgactgcatggccggagaaggaagaaggaacttgctgcttcctgttcccatgagggcacttgagcaatgcttttttgccccacagcagcagcagttccttcctgtagatgcacctgaatccattttgcagttttcccaatacttggaggtccatcttcgctgcatcctcaggggtgttgacactggcccaaagctccatggaagcctcttccctttgttcccccagccctggggcagctcccacctctatagtaccttagtgttctctctctccccttttcagtgactagttaataactttatgtctagttaacaattttttatattctttgtatgacaatctgtatgttaagatgatgagtgtgatttctgtctcctatgtggacctcgactaatacctcgtgaacagagccaccagctcagcatgggctgcatctcagcttctccttcatacatgctctgttctctgtagccagtgac

SEQ ID NO: 103791 - DNA, 1038 bp, Homo sapiens
tgtgccaccacacctggctaatttttgtatttttagtggagacggggtttcaccttattggtcaggctggacttgaactcttgacctcgtgatccgcctgccttgacctcccaaagtgctgggattacaggcgtgagccactgtgcccggccagttttttgttttgtttcaaggaatctctgttcacatataaaaaattgcgtaaaagccccccttttcttacgtacatgatatcatcaagtacacattttttgcatcttgcttttaaaacttaacaccttatcttgaagacttatcttccttagtacaaaaagaactgcttgttataattgcatagtattctcttgtgtggataaggtataataacgtatttaaccagtcccctaattgatggactgtttctgatcttttgccgttacaaacatattttgcagtgaatatcctttgcatatataatttgccacatgtgtaattcttttcctgtgatacatacttaaaaataggatagctgggtcaaagactgtacactttcattttgataggtagctgccaaattgtcccgtacagagattgcacccgtttatattctcatcagcaatggtatatgtgaatgcctttttctgtgttaccttggacacaaggtaactgtgtgttaccaccaaattttgtctttgccagtttggtcagtgaaaagcggtatcttggtgtactttggtgttgttttgttttgttttttttgagaccgagtcttactctgttgcccaggctggagtgcagtggtgtgaactcagcttactgcagcctccacctcccaggttcaagtgattctcgtgcctcagcctctcgtagctgggactacaggcatgagccaccatgcccggctaatttttgtatttttaatagagacggggtttcaacatgttggccaggctggtctcgaactcctgacctcaggtaatgtgcctgtctcagcctcccaaagtgttgggattataggcgtgaaccaccatgcctagcctgtcttcgtatactttgaat

SEQ ID NO: 103792 - DNA, 1051 bp, Homo sapiens
caggagttcacgaccaggctagccaacatggtgaaaacccatctctgctaaaaaaatttttaaaataaaataaaacttagccaggtgtggcggcgtgtgcctgtaaccccagctacgcgggaggctgaggcaggagaatcgcttgaacttgggaggcagaggttgcagtgagccaaaatcgtgccactccactccagcctgagcgacagagtgagactccgtctcaaaaaaaaaaaaaaaaaaaaaaaaagaaggagaagaacatagttgggatagctgttactcagattgtctattaaagattacaggggtagatcattcacagaacatttcccctgggttacctaagtagaaattaggtgttgaactgtgtgtatagagacttggatgtcattttaaatggaactgggcatcctgtaactgatcctgaagagttaaacacaggtaaatgttggcttagttgttatcaaaatgctgtatgtaaatcactttttagatttgaagtcattttctcactggtgtataattttagttgaagaattgggtcatgtaagttcacaagtcagctttactctatagtttttgattactattaaacatgcttatctttcagaaatatacattttcgtcaaggtaattcaattattcagcttgctaaatttaaatgacaactgctggcacacaagaacacgactttccatttttactattctgaaaatagagcacaaattaagagcattgagaagtagggtacgactgtcacctgtggagtcttgaattcagagttgattttcttgtctgccgatttttttcaataccaagataagtgtcacaaatagcaccctttctcagaggatttccaggattcgaataacagacacaaacttaataaaatgacagtagtgcagcataatcaggaagcccacctgccgtcagatcacttgtttgcagtagataccgtgtgatctcaggagcagagtccacatctcttccatttattttctaacataaaattcttggttttttcttaaagcgtagatctggaaaggtg

SEQ ID NO: 103793 - DNA, 1013 bp, Homo sapiens
gtatttttgtaatagaggtgaggtttcaccatgttggccaggctggtcttgaactccttacctcaagtgatctgcccagctcggcctcccaaagtgttgggattacaggtgtgagccactgcacctggtcctaaaattaccttttaatggaatttcaatttactgtgattttgatgttgaactgctagcaatctgatttcaaaggtcagttattatttattctttcaatagaaaagaaaaactgtgtcgaaccatatgtggaggaaagcagataaaaaaaatgcaacatgaaaaggaaaacacctgaatgtttagaagagctgtcccaccagttactgttataagttctcagtttttctcctgaataatatgtgcctcagagctgtggattctggttgataaacttattttctctcctgtttaggagccatatttcatcacttttctgtagagaatagttctttccaaggccatagctaagaccgctattcctcatcttctttttagtttcttcgctgtcaagtgctgacggtagagtgctgctctggcttttgtgggttggtctggcccttaaggtgtaaacatagtttttagcagttccagattataaatattagagtatgtgagccaggagtggtggctcatgcctgtaatcctagcactttgggaggccgaggcaggcggatcgcctgatgttaggagattgagaccagcctggccaacatggtgaaaccccgtctctactaaaaatactaaaaaattagccaggtgtggtgctgggcacctgtaatcccagctactcaggaggctgaggcaggagaatcgcttgaacccgggaggcggaggttgcagtgagccgagattgtgccatcgcactccagcctgggcaacaagagcaaaattccgtctcaaaaataaaataaaacaaaaataaataaataaacaaatagataaatgtatgtatgttagagtatgtggtataagccctcgttgagaagctgtttctttttttt

SEQ ID NO: 103794 - DNA, 1006 bp, Homo sapiens
aggcgtgagaatcacttgaacctgggaggcggaggttgcagtgtgctgagattgcgccacggcactgcagcgtgggtgacagagcaagactccatctcaaaaagaaaagaaaagtgcctggctcatattagacaataaatgtttgttaaaggaatgagtcagttcctggacatcctagtagaagagagccaagtcagtctgtgccttccggtctgtgcctgttaccaccctggtaaaagcagccatgccgcagaaagtcacttcaggtgctctgatgctgccagtaccggtgtcatctgccttgagaccttgagggccaaacaagagacggggcaatagttgtggggtctgcagaagaaggcaagtttctctagagttggagttactggggatggtgctgttgaagcaagtggatattgagctaggacttgccactagggtaaggtgtgatgggcattaaagaggatggtttttgtcaggcgtgcagaatgaggaaaatgtaaaagctagaactgtactatgaatggctttgaatgccaattacagatgcttcaagctcttagctttccctttgcatggtctcggaccattggagggttcagttctgggatgtagccggttcctagggatctcagcatcgttgctttttggtgttctgaacttgcatgcggggcagtcttgttatgcctcagcttaagtgaatattgtgaatattgggtattttctttttttgtttttctttcttttttttgagaccgagtctcgctttgtctcccaggctggagtgcagtggcgcgatctcagctcactgcaacttctgcctcccaggttcaaatgactctcctgcctcagcctcccaagcagctgggtagcccgccaccatgcccagctaatttttttgtatttttagtagagatggggtttcgccatgttggctaggctgatctcaaactcctgacctcatgatttgcccgcctcagcctccgaaagtgctgggattacaggc

SEQ ID NO: 103795 - DNA, 1027 bp, Homo sapiens
gccttgccaacatgaaaaccccgtctctaccaacaaaaatacaaaaaaaattagccgagtgtggtggtgcacacctgtggtcccagctactttggaagctgaggtagcaggatcacttgagcccaggagggggaggttgcattgagtggagattgcaccactgcaccccagcctgggtgacagagtgagatcttgtgtctagaaaaaaaaaaaaaaaccatagaagtcagataacccagagatgtttttgtactttcctttgcgtccgtggccacatgccctgtcactgaggttgcagtatgcaggtccaccagctgtgggtgtttgtagcattgcccctgtggtttctgggttcttgtcgccgtgcctcgcacacattgcaccctccacctccaactggagggatgtgagattaaacctcagtgaaagttttctttccttaggacactcacacatttcctctactaagttgatacaaaaatcggattttgcagtctatggagatgagtgattaataggctgggtaccaaggtacttgagcaaaggctgttaacaagaggatgccaaacagagtgatttagagagtatatattcctcttcatttttaacatacataacagtgttttcttaaactacaaatatcaatacctaaaatgattaataaaatatgcctctgtaatatgcctttgattggattccacaaagaaaaatgatttaaaataaagatggtgtgaatgtacttgagagtgaatgagattatttatgcagagaatgtagtttatgtagctggacagtctctcctatgtgccttcatctgcattaagaactgatgaagaagtgatagcaaaggggaaaattaccgtaaataaaatttttaagtgattaattttatgaacaataaaaattctatcgtttttgctcaaaaatgttccagatcagcttgacatagaatctaggctgacgcaggctgatgcgtggcctttgatcttgttttattatactgaaccattgcataatttcagaatta

SEQ ID NO: 103796 - DNA, 1079 bp, Homo sapiens
ttgtagagacatcacctcagctaggagccataaaatgtgctatgatgcaaagaatcgtggagaacgtgccagagatctatcatgtggtcagtggttcattcattcggtccgcaaacatttgtggtgcctcttctaagggcttccacatctctcatgctgctttccccagtgctttttgaccacctctttgtgtccatcttcactgttagactgactgtaagtttcttggttttattcgtatttgtatggccagtaactagggcagtgcctggtgcaggataatcactcagaaattgtttaataagtgaatggtcaagaatgaaggtggaaacataattttcttgaagaattgacacttacttaaagctaaaactaaattacctccacacagaaattaagcatgagccttttccagtgttcattggttgtagcagttggctcttcctggagccatcactgagtaaactggtagatacccattcatgagagaggtgtcaaagaagggttccattcacattcatttaggctgatgctgctaaaggagcattgtttagcgttggcagaacacatgctttgatcatccagcttctcgccgtctgggggacagcttttaacagaacccacatgataaaacatatttgacattatttgggcttgttgcttacaatgggaaggcactgacttcctgtataactgatcttcaaaatggcattctaagaaatagttacaatgatataaaacctaaattgccttcgggaattggtatgtggctgcattgtcattcattcttggataagtaaagatgtagaaaaattacacaagaatattttcagtagaattgagctctgtaacagtactgggaaacattcatttttaagatgctggattccacaaattcactgtaatagaattagcttgtcatttaacacaggaatgtaggaaacacaccaggaagttctacaggcggatcctttaactcttatttagagtctgatggtgtgctgggatccattgcgaggtgggctggtcagctacaggaccttccttccagggatgattgtgtttttgtgaacccccat

SEQ ID NO: 103797 - DNA, 3082 bp, Homo sapiens
gactcatttaacagattaagttccttggggttgtgaactctgcctaattcatactcatgtgacacccctgccaccctgggcacctagctcagtggctcagtgggtattcatcattcagcagatgcttactccgcagcattgtgctggctgctgtgtggaattctaacgttagcaagttagggtctctgcctaaaagacgctaacatggggaaggaaagttgtgaacatggtgccacagcactgagcaaaatggctctagacagggaaagattattttcaggtgatgagcttgaaaacagcttcgcagatgaaatgacacttgaattgggcccagaaggatgagtaaatttcactgtgtgaattcagcaggaaaacacagtaggtgccaacgtgaaatggtgccagagtgagaaggcacaagttgtggaatgtcaagtagtatcgaatattgacatctacataggaggtagtagaagataagactagaaaagttggttggtcccaggtcatggaacatcttgatgacattcgaggccaaggagttcagctttattcttgtgcactaaggaactgttgaaggttctccatacagcagtgatataatcaaaagtgtgctttagaaagattgctccagccaggggtgtttagagtaggttgaagatacagagcaagtttagagtgccattgctattgccttgtcccaagatacaagaaggcccttctctgtcaataggaatggcaaaggacgtagctttgagagagatgaagttagacttaaccggtgtaacacaaggcaaatgaaaaaaaagagatgactaagacagttgtgatacaagcaactgggttgagagaaactggcatgtgatcagctctcctaagggcagagctcaaaggagagcccctttgagggattaatgggtaatgaatgcatttgaagctgtgattaataagatgatctgttccccagactcaacccttggaggtgctgctgcttcaaattatgcaaattccacttggggctcgggagcctcctccaacaacggcacctcccccaacccaattcacatctgggacaaggtgattgtagacgggtctgacatggaagagtggccttgtattgccagcaaagacactgaatcttcttccgaaaacaccaccgataacaacagtgcctcgaaccctggctctgagaagagcactctgccaggaagcaccactagtaacaaaggaaaagggagccagtgccagtctgcaagttctgggaacgaatgtaatcttggggtctggaaatctgaccctaaggctaaatctgttcaatcttccaactctactacagagaacaacaatggactaggaaattggaggaatgtgagtggtcaggatagaattggacctggctctggcttcagcaactttaacccaaatagcaacccatctgcctggccagcactggtccaagaaggaacttctaggaaaggggcattggaaacagataatagtaattccagtgcacaggttagcacagtaggtcagacatccagggaacagcagtcaaagatggaaaatgcgggtgttaattttgttgtctctggcagagaacaggctcaaattcataacactgatggaccaaaaaatggaaacactaactccttgaacttaagttcaccaaaccccatggagaataagggaatgccctttggaatgggcttggggaacacctccaggagcactgatgccccttcacaaagcactggagatcgaaagactgggagtgttggatcttggggtgcagctagggggccttctggaactgacacagtctctggacaaagcaattctggaaacaatgggaacaatggaaaagagagagaggactcctggaaaggagcttctgttcagaaatcaactgggtcaaaaaatgactcttgggacaacaataacaggtctacgggtgggtcctggaactttggcccccaggactctaatgacaacaaatggggtgaagggaacaaaatgacatctggggtctctcagggagaatggaaacagccgactgggtctgatgagttgaaaattggagaatggagtggtccaaaccaaccaaattctagcactggagcatgggacaatcaaaagggccaccccctccctgaaaaccaaggcaatgcccaggctccctgttggggaagatcttccagctccacaggaagtgaagttggaggtcaaagcactggaagcaaccacaaagcaggaagtagtgacagtcataactctggccgtcggtcgtacaggcccacacatcctgattgtcaggctgtcttgcagactcttttgagccgaactgatttggaccccagggtgctctcaaacactggctggggccaaactcaaattaagcaggacacagtgtgggacattgaagaggtgccaaggcctgaggggaaatctgacaaaggaactgaggggtgggagagcgctgccacacagaccaagaactcagggggctggggagatgcacccagccaaagcaatcaaatgaagtctggatggggggagctctcagcctctacagagtggaaagaccccaagaacacaggaggctggaatgactacaagaacaacaactcttccaactggggaggaggacgacctgatgaaaagacaccttcctcttggaatgagaatcccagcaaggatcaggggtggggaggtggacgccagcccaatcaaggatggtcttctggaaagaatggttggggggaggaagtcgatcagacaaaaaacagcaattgggaaagttctgcaagtaaacctgtgtctgggtggggtgaaggagggcagaatgaaatcgggacttggggtaatggtggcaatgcaagcctagcttcaaaaggtgggtgggaggattgcaaaagatccccagcatggaatgagacgggccgacagcccaattcctggaataaacaacaccaacagcagcagcccccacagcagccgccgccaccacaaccagaggcttctggttcgtggggaggcccacccccaccacctccaggcaacgttcgaccttccaattccagct

SEQ ID NO: 103798 - DNA, 1631 bp, Homo sapiens
tagacagttgtcctttatcatacctcgtatttatagtgtccattgtatataaagtacatactgaatggaggataaaaccagggctacagtaaaccatgttcattaagaggaacagatttatcttaattgagatgtgaaatttcttgccaggaatgttgtgataagttcttttcagttttgaaattcctgtccaactttgtgcaagggaaaaagcattgatccataaatcaggaggccttgattctatggtttgttaactttctgtgtatcattgaagctttatggattttagtttcctgctctctaaaaaatgagtaataatatttgtcttgccatggagatggagtagataaaattacaaagacacgtaaatgctgcatctgcaaggaattattattctgatgattgttttatatagctgttgcaaagagttaattcattctttccttaaagattccaaatctatgcaagacggctggggggagagtgacgggccagtcacaggagctcgccatcccagctgggaagaggaggaggatggaggagtctggaacaccactggctctcagggcagtgcttcctcccacaactcagcaagctggggacaaggaggaaagaaacaaatgaaggtagcctgcttagaaatgttcgcacttgctcattcgctctgagaaggcagaactgaggttttgttttgtttgtttttgttttgagacaagttctccctctgtcacccagactggagtgcagtgggacagtcacgactcgctgagcaacctcctgggctcaagcagtcctcccacctcagccttcttagtagccggaactatcaccatgcctggctaaattttgtattttttaatagagacagggtttcgccctgttgccaggatggtctcaaactcctgggctcaatcctcctgccttgtccttccaaagtgctgggattacaggtgggagctaccatgcctagccagaactgaggatttttaaatgaaaggtgtgaggcaactggggtcctcaaggtcctaagtaaggggaaaaatattttcttggaaacaaataactacttcccttttacccttcgtcttgctttcccatgaccttgaaaccttgaactataaaactgttgctgtgggtaaaatgaagttttcaaagatacgagatatttttcatttttagtttccacattataataatcttttggaggctctcaaggcatactttataaatgcttttgcattctaaagccagagaagtccttccagtaaatccccatagatatgtaggagggaatccagaggaagataatgctggcttctcccgcggcaatcagcacgtcttgattttatctgatttgggaaattccaagacccagaacccttctcccgacaaatgaaataccagtgagtacttgtgtgctatagcagctaaatgattaatgatatctcttttttttttttttttgagacggagtcttgctctgtcgcccaggctggactgcagtggtgcagtctcagctcactgcaagctctgcctcccaggttcacaccattctcctgcctcagcctcccgagtagctgggactacaggcagctgccaccacgcccggctaattttttgtattttta

SEQ ID NO: 103799 - DNA, 1059 bp, Homo sapiens
gatgactctttcttttatagcataagaatacagtctgtttctgtttagagatgttttgcttaagcagtcacttacgggttttcttctattaagagcttttatttcttcagtcacagaaggaattattcagcaaacttttcagcattccttgcactcttaggttgtctagtgtgattttggctttcttttggttatttacaaattaacaatgagactaaattaactgattgaaagggactaataaatacctctctaggttgacaaccaagatttaattaagttaattgggaattgactctttcagccccagtaccagtgattctgactttatataccgagggcgttttttttaaaaattgtgataaaatacatataacatataatttaccatagcgtacatttttaagtgtacagttcagtggcaataagtatattcacatacttatgttgccatttaccaccatctatccgcagaactctttctatcttacaaaactgaactctgtacctattaaacagtaactccccattcccccctccctctagtgagggcttttttgaccttaaaacctgtactagctggctgcggtggctcatgcctgtaatcccaacactttgggaggctgaggcaggtgaatcacctgaggtcaagagttcaagaccagcctggccaacatggcaaaaccccgtctctactaaacctacaaaaattagctgggtgtggtggcaggcagctgcaatcccagctacttgggaggatgaggcaggagaattgcttgaacccaggaggtagaggttgcagtgagccgagatcgcgccattgcactccagcctgggtgacaagagcgaaactcagtctcaaaaaaaaaaaccgccccccacacacacaccaaaaaaacctgtactaaacttaagtacttcgtcactttcaaggataataaaattgatttgatgactaccatcacgggctgggcacggtggctcacacctgtaatcccagcactttgggagaccgaggcaagcggatcacgaggtgaggagatggagaccatcctggct

SEQ ID NO: 103800 - DNA, 1079 bp, Homo sapiens
aaactagtttgtcccattaaaaaattaaaacctacctctgccctactttgcccaggagatcagcaatggtgtcttccactaggtctctttaccaccaggaccaatgtcttttatgctgtgaaacaaacagaggaagcactatgagttccttataatgcccagtttaaataggctcctttccaaatgacacgcactgacatcaaactgttttctcctaacataaaccagtttgggttacgaggagagcagcctaatgaaagtgaaagtagtcgtgtgcaaaacttctattttagaaaatcatatcagacttctttctatttgaaaagcaaaagtaccagctgagcatgtatttttccagttacttctggttcagtgtggtgaattttataaaaatgaaaacatagatataactagggcttattaatcatttaaactaacataaaatatcaacataattttagttaaagagaaataggacttaaaaaggtaaactcaagtctacattttcagtctgtattaataaaactcaggaggctgaaataaattatttggttctgaggttccgtgtttcatttctgtagtgctcactcaaaggaggaaacaatgattcatggatgaatcctcttgccaaacagttttcaaatatgggattgctggtaagttttatttttttcaaatgtataacgtatcccaacttttaggtttaatattaataccaattttaagacaactgccacatatagtacaaaattaaagatttaaaaactagttaagcaatgttcttgaccttttgagttaagtaatatttctcttctattcttattaatgacatactccaacatttaaaggttatggcttttaaatgtgtagtcattttgtccttttccttaggaggatagagaagaaagaggcattaaaaatttatacaattgtttccaaccgcattactgtactagttttcatattatgattttttaaaaaggcaacgataacgaaactagaaaaactatactgggactaattacatagggaattcttgtagaatttctgatttctttatctctcggcaacgttgtggg

SEQ ID NO: 103801 - DNA, 3571 bp, Homo sapiens
tgtcagaactaattcgggtctcttaaaatgctctatggggccaaacaaattgtgtgccagatgtggccctcaagttgccagtcctgtctgtaccaggatgcttcgttattgacaaactctcacattgcaactggagtggaaacggtgttagccactagtctgtggggttttcatagtaatgctcttgatcaccctgaggaacttgaaaagaatcaaactaagaagaaatgaaaataattctgggtagtaaaggaagtaggtagtctttgatctatgatatttctaaatatgagaataattaaaacataagtttcctggggcagcactggttatatcagcagacgacagcacatttatagagttgtgaaagaaaagtggtatagttatggcacctgggaaattgcaccgtgtaggtaatgtggacacatcttctgtgttcagctcttaagttctaaattttagggcaaccactgtgcctctttgatctttttattccttgtaactatgtttcacccagaccatttatctagatgatgctaaaatagcaaaaacagacaacttctctccctgaggacatttgaatttatgagcaagatgtgttcatcagacacatcagtatccagtctaaatgttttcttagcgagatttttgccaggttatccctaaggctctttcagtcttccatggaaaacaaactacaacagatacatgttttgttttgttttttaaaataaataaataaataaaaaggacccatgtgtgttccagggacaaacaccagcagcctggaccaatgagagtttgtctcgtcttatccccagaaatagaaatattaatagcttatacccagcacccccatgaggatagtggggcaggtcactcttggttcatgggggaaacattgattctggaaattttcactctgtgtatgctacttttcaggaagcctttcagataaaaaatttgatgtggacaagcgagcgatgaatctcggggattttaatgatatcatgaggaaggatcgatctgggttccgtccacctaattccaaagacatgggaaccacagatagtgggccttattttgagaaggtgagttgaatcctttgtttaagataataattcatgagaaccgctttggttcccatttgtcttttgataactgattctagaggaagcatagaattactgaactagatgagcaaaacacaaacatcacctgcattaacgtggtgacctgaaaaccattgatgtcaacaggtgatcaggcaagagcaagaaccatctgtctttagcatgtgtgtattagaaaatctgagttttgagaaattcatgaagtgtggaaattttagagataaacttactctgcattcttttttccgctgctgtgcagctacaaaataaattttgggattttgtgcaaatattccatgtctcctaaggccttgccttcttctagttttgagataactctgttgttatctttccccagttcctagcgatctgtgtttagttacaatggtatacttttcaaattctcatctacctaatttaaccaagcagtttctacctattggttttgatgtttaacatttctaatggtgggaattatatcttgatccagaataccaatttgctgtgttcctgatcttcagaaagcagttaaaaccaaaatttttaaatctggcacgttttgacactgttgttgctggtccagacagcaacatattcacaagattggcctggcttctgtttcagcagccacattgctagagtaatcaatattagatgcgtaaaaataaagtgtctggcaatttttattgtaatgcaatggacagaacgtgttactaacttagaggaaaagaaaaatctatatcaaagaagatgacagatggtgtctgttgggccaagtgtaaagattattatcagatccaaattccatccttggttattgctaatacactctaactttgtttattgctagtgtttctctcttttcccttcttgcattctgttgcttcactaaccaacactcgttgtgattggctaactcctactacttttcagctgactttgcctttctccaatcaagatgggtgccttggggatgaggctccctgctctcccttctccccttctcccagctacaagctgtctccctctggttccacactacccaacgtcagccttggagcaatcggcacagggctcaacccccaaaacttcgctgctagacaagtaaggaggcctctcaaatttataactgcttggctatggcctcgccttggtcctggtctgcagtttattgcatcatttgtctgtcttgggaaatttgttgattactgaatgcacagaatgatattaagtgtaggttctagatctttcagcccatagaacccatctctcttcatgtttttcaacacggattttattttaaacctgtatttttttttttgtctcctcatttttgatcataagttcatatttaataagtaataactgactaaggaaaatgttaaagaggctacgtaagtaccttagacaatctaacttaatgcatttgccattttaaacattagattggatatgtaatactttggagatcttttcaatttaataaacctgctaatttaaaaataggaaaactagtatgattaagtatttgtgggttatggcatcttgaaatctagtgtctttaagtgtaaaatatagtaattacccggagaagggtaactttaaatagtaaacggtgaagctttgggaagaatgggtattgctgagacacagcagtgtttcattgcacctggggttggatctggcaaccctccagggaagggctgtgcagtagaaacaagacaggcaggcctgggaggatcatgcctcctcaccttgccaggcctgagggtgcacagcatgaccctgcctgccttcccacaatagctctgttgtagtttttgtggagaaaaccaggactttggagtcacaattcctttgcaacaataaccccagcagtgatagccatacttctgtgaccacttacttgtcactgtgaccttcacctcaggacgttgtgggaggacgttaattatacaacttgtaattattagttgcatccacatgatgcatacatgatgatgttctgtctccatatgataacttccacatacacgttacagggtgatgtgaagcaatacctctgacaccagttaagttgcacataggtctcttatatgctttctaattgctgccttagcacattttaaaaaatggattatactatatccatgtgttcagttggttatttctggattgggagttacaactgattttttattttcttcctttatatttcatcattttccttactgcttccacagaggacatggatatatactgtttatataaatggaagaaattattatattgatgttttgggggttcttttattttgaatcgaggtatagaaaacatgaaataggcataacattcacagttaatggtgattgtaaatgtggtggatcacatgattatcaaatgctgttagtacataaattagtatagtagaccagcca

SEQ ID NO: 103802 - DNA, 1229 bp, Homo sapiens
aggtgatcagggtggcgaagctactgactaccacgatctgaggaaagttagggctgtgtgttggtaagacagcagcagcagagatttagagtttctagaattaaaggtcttctcatgtttcaacaacccttggggagacataaaattcgtgatgaatctttgatttatgagatacacagattttaattgccatttcgactttatgtttagaatcatttttattttcaatgcttttaagttcactaatttccctacagcagtcccttaatctattttttaatcattaagccatcacagtatttttagtgttgtaggttttaatgaagccattacaaaattctttaaaattaccttaatccatgtgattccagggttatgataatggtggtgatttcaattcagggtatatgtataatactcagtataagcagtgatgcagctgtctttgctgaaggtattcagtgggacattttccggtgtgtggaattggtgggtcatggatatttacagatgatatattcatcctacagactggggatttattgagttctgggaatacgaagagggaaagatttaacagtagaaagacagaatggaaaataactatagtgtggtttgatgagttttaaagcgttttgagattggagaggtgggcccagttaatctgaatgtgaaatcaggaagatgttttggggaagacttccttgatgaggatgacctccaagctgggccttgaagaggtcaagtgaagatggtatcagaaagaacctcaggcagagagaacacagtgttgcattattatcaaatatggtttcttcgctgaaggacttttctcagctagaaaccagtcagaaaggaagggccaccatataacccaactctcttagttatctcattggaatagtgtagaagtgctccagtgagttgggcctccagaaaggagggagttccgcttatttttaactagactgatatgtgtttgaatgagaagttacaggtgagtaatgtttattttggtgtccctgtaatggtttttactttctccctttcttccttttctatctcactgggtaattgagtcacatttcctcatctgtcaaagaaaggattgagcagatccaggacaaggaagggtgctaggctcactcttggacggcagagaaatcacatcataatgttttataaatacaactgataactattcataaggctgcatttttactcaggtg

SEQ ID NO: 103803 - DNA, 1010 bp, Homo sapiens
cccatgagtcaatctgagtaattgccccaagccttctaagataaggaacttctcagttacaaaattctgttattccatcgaacacagcctgtgattcttctgagggatctaaaagaccagaactgtttcttacttgcattttcttatgttaacaaaaagccttactgctgcttttctgtttacagggcggtagtcatggtttgtttggaaacagcacagcacaatcgagaggtctgcacacacccgtgcagccactaaattcttctcccagtctccgggcgcaagtgcctccccagtttatttccccccaggtaagcaattttacgttcctgtgattcaaaatgaaagaccatttcacatcattaccagttgttaactgatttttgtgggcataaaaagaatgatagtaagtagcataaaatatgaaaaagccatcttttcttgaccttttggctaagatcaagtagagtaaaatatgaaatatctagctgccaaagatgaagacttttagaacaaaatctcaaatctcattttttatttcatcatgcataccaacaaagtagatatttttgcatgaaaagcttattattctattccttttagatctcctatttttctaactatattttttgaaactgcatataattaaaactgctttataagttctgatgtgtcaatgttcagaggctggttgccctcaaggattcacccaaagataaaaagagaattcagcctggcacagtggctcatgcctgtaatcccagcactttgggaggccaaggtgcttgaggccaggatcacttgagtcccggagtttgagaccagcctggccaacatggcgaaaccctgtttctgccaaaaaacacaaattagccaggcataaagaacaaaacaaaaattagctgggcatggtggcacatgcctgtaatcctagctactcaagaggctgagacagtagaatcgcttgtacccaggaggcagaggttacagtgaaccgagatgatgccact

SEQ ID NO: 103804 - DNA, 1050 bp, Homo sapiens
cactttgggagaccaagatgggcagattgcttgagcccaggagttcaagaccagcctgggcaatatggcaaaacctgtctctaacagaaatacaaaaaattagccgggcatggtggtgcatgctgtagtcccagctacttgggaggctgaggtgagaggatgacctgagcccaggaggttgaggctgcagtgagccatggtgacaccgctgcaatccagcctgggtgacagtgatatcctgtcttaaaaaaaaaaatgaaaaagacaagataaccacacacagtttggatagcggagaaacaaattcttaaagaaacctccaacccaaatacaatgacaggaattatttttactaattccctattcagacactattcatatacagggatgcttttcacattattgcactcagggtcactagaacctgatgttaacattgtgtccttgaattttctgctgttgctatgtagcattcacggtgatcataatgatgtttcatcaggtagatttaccttgatttacttaacattcccttcccccactgttgagtattaaattgtttttaatttttccctgttacaaataatgctgcagagaaatccttatacataaacccttgcccacattttttctaaatttagttgcccaaaatgaaatttctgggtcaaagcacattaatattttaaaaggttttgataaataccagattttatattccttttgaccacattataggggcaatcagtagttaatgtaaacatagaagatactgaggccgggctcagtggcccatgcctgtaatcccagcactttgggaggccaaggcaggtggatcacctgagatcaggagtttgggaccagcctggccaacatgctgaaaccccatttctactaaaaatacaaaaacttaactgggtgtggtggcaggcgtctgtagtcccagctgctcaggaggctgaggtaggagaatggcatgaaccctggaggcggagcttgcagtgagccgagatcgtgccactgcgctccagcttgggcgacagagcaagactc

SEQ ID NO: 103805 - DNA, 1048 bp, Homo sapiens
accctttaggtgtcctcagtaaatcaatctcaggaaactttggttttctgtctttcccccttgttttgtaggcatgtcagcttctcttgcagcagcagcaacagcagcagttgttacagaaccagagaaagatttctcaagctgtacgccaacagcaagagcagcaggtacgtgggtaggcagggtccctccagtgctgtgttggaggagtacatcccggcttagcctctgatggcaaagaaccgggcacagtcttttcctgggaagttcggggccgtgcttatcacgtgtctgtctctcttggccctcagctggctcgaatggtgagtgcactgcagcagcagcagcagcagcagcagaggcagccaggcatgaagcactcgccctctcatcctgttgggcccaagccgcatctggacaacatggtacccaacgcattgaatgtggggctcccagaccttcaaaccaaagggccaatacctggatatggttctggtaagttgttggtagagaaaattacctttttagaaatctacctctctaggcctgtggtaggggttgcacctgcattaccctccttttttatgtcagctgtacaaggtaggtaaatattcttatccctggtttacagatgagacatctgaggcttcttgagtttcagtgggtttccagagctcaccacatggttactaaatagcagagccaggcctctaacttctctggctccaaagcagtcttccttttttttgtgtgtgtgtgtgtgtctggtttattttatttaacacagtaaaggctcatacatgctatagcacatatcagaattcatccctttctaaggctgggtaatactccattgtgcagatataccacagtgtgtttacccacttttctgctgaaatggataaacttggattgtttccaccttttaactacaagttgagcatcccctaatctaaaaatccaaaatgccccaaaatctgaaactttttgatcaccagcatgaagccagcagtctttcaatacgtgtgtatgaatggcaaactgctct

SEQ ID NO: 103806 - DNA, 1578 bp, Homo sapiens
ttctatggtcatttattattctccccctcccctgtttcatcattttagtcctttattttacttttttgagagtttttatgaacaggtgtcacacacattctgacccaaatggatgacggaccctgttagactccgtcatccagattctgctgtgtggcttccagctctccagctctgtgcagtgggaacacattacccaccaagactcttcccctgaagcttacctggggctcttggcaaagtgagctcagaatctcgaactacccacctactcaagctttggtgtcttcctcattgcttaaagactactttcaaatttatctttcagattctgccctgacctccacccaccccacactcaggctgccaattctcttcctaaaatacatactagttatcctcttacatgcttaaaatgttcactatcttcttatcctagagaaaaaaagatccgaactccttggcctaatatataaagaccctacatgacacaacttcatttctcctcatcccccaccactctccgcctcacttcatcccagagttagctaaccattggagtcatttgaatgtctcaccattccctaaacacacttgattatcaagagtcagagctctgtacttggtttgcttgacttccccaaatacctccctgaggccctagatcacatcttccttctgcaaaccctttcctcccccaagataccctgactacagctttgttgctgctgttgcgctacattggctggatgtcgtcttctccatctcagtttgagagtggctggccccagcctcctgtctggcacaaatgtcagctaaatgaaaaagggcgtgcaggaatgcactgagacagacctgatcgatggcagtcatacacatcttcacgccttcacagagagacatcacttatttagcgagcaagagccaagatcaaagcttggaatcaaaaatacctgtttctgagtggagaaactctgtgaattagtctttgaatgacacttgaaggcattcctggactctgcttcagaactcttgatactgatgctggagacttataaaatgtggtcttctcctttttaggcttcagctctggcggcatggactatggcatggttggtgggaaggaggctggaaccgagtctcgctttaaacagtggacctccatgatggaggggctgccctctgtagccacacaggaagccaatatgcacaaaaatggtaagagaagcactgaaagctagagcccccaacccacagcaggtcttgatgaaacatcttataagactattttgaagtacagaacttggtattcattttccttgtgaatcctatgattgcctgtggaggaaggtcagagtcatgtgtatgttgaattacaagaaatataaagtactagttctaattaaagggagcagaatttttcagccaccatgattgagggtggtagcagtgaacttgggcacccaccaaggtgaaaccctaataagttggctgagggaacagagtcagcttgttgagtttgttttgcggagcaagggatcataacaatacctatcttgttggttgtttgaaccataa

SEQ ID NO: 103807 - DNA, 1662 bp, Homo sapiens
aagtgcatgttctgttagttcaaggtaattttaagcttttaattattttcctgccccatagcatataaaatgcatgatgggggcagcgacaaaaccactgaagtgctctcaggaaaccagttacaaaggatttgctgttcttcatgtgtgaggccacggatcccagagctgcagagttcattgctggtcttgtgctggcaaagaccctaggcgggaattccatctcattgcgttggaatttaaagcaattgcagatgcttttccctccaatggactctctgtttacactgctgcttccagctaatctaagcctgatcagccagcccttaagaacctgggtggatagcatcagtagaaatttagttaaaaccttcttatgtgctacaaatggttagaattttccccatttctcactcttgagtcgttagcatagaaactagggataatggtcagattcctagtatgtgaacgtttcattaatttcataagaccatggaattttaaaactgaaaggaacattcaagcatgagaacaatcctgtgtgcctaagtgaggaactgagaggctcagagaggcgaaatgacttgttgttggtcatgctgcttagtaattctgtgctgagtctcgaatgcaacctcttattccagtgctgtttgtatatactccatcagcttcagaagactgtttgcattccagcgaataaaaaatagacaagttctattcataggagttattctggatgatttaatttcctctcttttctcaggcgctatagtggcccctggtaaaacccggggagggtcaccgtacaaccagtttgatatcatccctggtgacacactgggtggccatacgggtcctgctggtgatagctggttacctgccaaatctccaccaacaaataaaatcggaagtaaatccagcaatgccagttggcctccaggtattgtctaggaaatgcttttcccaggatagcatttgttttgtaattgtcagtttcaggttcagaatacattgcttttgtgattcatgttactaaggtacttgcttttatttttttcattcaataattgtctgttagaagcaaggcatgtgctgtgggaagatagaaaattttcattagatggggaatctggggataagtgacattgtaggtgggactttgcattcgtcccatgcataggatgccttgtaacatgggttcttttgaagtgtctgttgaattgatttgttagttcttaggcaagtgtgtattaccagttagcttctaggtatgcagtagcgattgcaatgagattatttgttaattcttttctttctgtccctcccttttgttggatatagtaatctattctcatgatagaaaaatgagaacatttaataaagcaaaaattaaaatcagtaattccataaatatatatcctcctagacctctttctgtgcatgcgtatttgtgacatgaatatgtatagtttcgttttattaaggtagaatttttttttttttttgaaagggagttttgctcttattacccaggctggagtgcagtggtgcgatcttggttcactgcaagctctgcctcccaggttcaagcgattctcctgcctcagcctcccaagtacctgggattacaggcgcctgctaccacgcctggctaatttt

SEQ ID NO: 103808 - DNA, 1040 bp, Homo sapiens
catttcttatgtcaaaaaaagtactatatcatttttttttaacgaccttccttctctaatatttgttttccttgtctcagaattccaaccaggagtgccatggaaaggtatccaaaacattgaccctgaatctgacccctatgtcaccccaggaagtgtgctggggggtacagccacatctcccattgtagatactgaccaccaactgctgcgggataacaccacaggtacttgagcaaagcatctcttatatgttcaacacccagcattttcatagttgtcagtttgtgacttcatttgtacttgctggtacctaaaagtttaaccaaaaaatgtaaaaagattgcttttcacttttatttgttagacatattttgtcctccattctattgaagtttaaacaaaatactctcaaggtttcactggttatactgacatttatcttcagtattttcttcttgttctttgttacccaagggtctaattcttccctcaacacctcgctgccttcacctggtgcctggccctacagtgcctctgacaactcctttaccaacgttcatagcacttcaggtatgagtgtgaattttttgtttccctttggttagcactttttcatcaggttcccttttataaaggaaactggcatgtatttcataagatatactcttacagaagttcagtagcataggtcagtatagatggaagcacatcttttctgtttgctatgtctttgaggaacttctagtctcaggaaggatgagccagatacagctttgggatgaggccggtagtgacataactgcagggagctggcatatccagagggctggagtcacgtcctaatgacacacatgcttctcttttaacaaggctgccaagaagtcaagggtcatgagaagaaccagtgaaggccaggttattattcctaagatagccaataatagctagcttttctctaaaaatcctcccacttatagacaaaggctaagggcagatggccaaaggaaaaaaaaaaaaggaccttgattcattttacc

SEQ ID NO: 103809 - DNA, 1054 bp, Homo sapiens
atagttgactgaaatatgaagaatcttgtatgaccatcctcaaaactatgtatacctcctattttctaagagttgtcacacaatgtgattatgttatgatgagattgagagaagcagtaagagatgcactgttttgaaagaagcctgggcaggccaatcggctgttcacttgttctatcttatgaaaaatgctggccagatgtggtggctcatgcctgtaatcccaacacttttgggaggctgaggcaggtggatcacctgaggtcaggagttccagaccagcctggccaacatggcgaaaccccatctctactaaaaagacaaaaattagccgggtatggtggtgggtgtctgtagtcccacctcagtcgggaagctgaggcaggagaatcgcttgaacccgggggtgaaggctgcagtgagctgagatcgcaccactgcactccagcctgggtaacagagcgagacgctgtttcaaagaaaaaaatgttaattatacacatacatccatataaaatgaatatgggggtggccgtgtttgggttagaactaattttaaaatgaaagcttcctaaaagcagactaatctctatcatagcttaaaaggttataagagcaagtcacctgctctccagcctgggtgacagaagagtgagaccccccccatctctgaatttaaaaaaaaaaaagcaaatcttgatacaattgtcacccccttacccatgatttcttacccttggtcaaaccatagtcaaaaaatattaagatgtttttagagaaagaccacattcacataacttacagtatgttgttataacttttcttttctttttttttttttttttttgagacagagtcttgttctgtcgctcagactggagtgtgcagtggcgcgatctccgctcactgcaagctccgcctcccgggttaatgcggttctcatgtctcagcctccaagtagctgggactacaggcgccagccacaatgcctggctaatttttttgtgtttttagtagagatgggtttcaccatgttagccaggatggtcttgat

SEQ ID NO: 103810 - DNA, 4583 bp, Homo sapiens
gaagtcagccgctttctggcacaagctcagccccctacacctgcagcaaccccaagtgcgccagctgcggggtggcagtcgctggagaccggccagaaccagtcagatcccgtgggacctgctctgaatctttttggtgggtccactgggctcgggcagtggagcagcagcgctggtggcagcagcggggccgatcttgctggcgcttcattgtgggggcccccaaactattcttctagcttatggggagtcccaacggtggaagatccccataggatgggcagccctgctcctttactacctggtgaccttctgggaggagggtcggattcaatctgaacttagaactttcaactctgacctcgtgaccttttttggaacagcagcagcactaacttgaccttttcgttttttttttcaacttgcaataaatacatttttaaaaggaaaaaagaaaacggagagaaaaaaaggtgggtcattgacagactgtctgagcacatagttgcctcccttataacttcagttttttcgtttggaatatgaatccaaaaagagaacatatcactcttgaaatacttgaatcatgaacgccaacctagaaagacaatgtgaagcaagtacacataccatttaaatttaaacacaaaaaaattaaaaaaattagtttctagtttttcacttttttcatgttatatggaagttgttgctaagaaacatatatactgaaaaaaaatagctttttaactttgtttgcactgggtgtgtttccgtccttaggtctaccatgtttgggagggagggaaattcaaaagaattgttgggggaggggggagggaagacttgacggagcctcactttaaaaacaaaaacacaaaaaacctaaaaaaaaaaaaaaggaaaaaatttgtgattggctggttgataaataccagtgtgttctggcacatgtaactgcccaggcatgctcgttctggtgtgtgtgtgcacgtgtgttcatgtgcattcgcgtgcatccttctctgtctctgtgtgtgtgcctgtgttcttcccttctcccctgccccaccctgacttctcagaaagctgcatcgctgacagtctgcaggctggctggccggcccatctgctttttattttatttttttaactatgagaacacacaggcccggagagccactgctactaaagcaactccattgggctgcattaagatgaacagagtgctttttaatgatgaaagcagggagctcctttccatttgcaacttagcctgaatgtggggtttctctggctgttcttttgacctagcagtagagtggagcactgccaagtccaaaaaactagagcaggaggtacctcttggagcaacggtgtgtttatttctgtttttttttttttttaagtgaatggccaccaggcacatctgagtatctgttaagtttcatgcaggccttttcgttagtttgaaatgggaacggaagataacttttgatgatgcgatgtctcaaaaacagagaaactttgttccctctttccttatgatcaggtttgagaaattcttcaaaaaattaggtgaagttgagttacatatttctgttggttggttctctttttcattttatgaaaacagaaaagaataagtggtgagcagcctcctgaaagcatctgcagctactccctctgctcctttctcgccgagcgttacctgtgccaggccgtggcgcgttacagcaccaggccatcactgacagaaacgtttacttaacgaatgttcttaaaccagtgtgtacttcaagcgtttccttttgtttctctgtgttgtgtatttcctgtgtatgtggttttgcttaggcaggtataacttagcgaagacttttaagtattgcacctttttttgatttttgacctcttccccccaccttgtaattttgcttttttaatttcggtatttaaatacttttttttttttttaagcatcaatgtagtagtactctgggccgaacaggggtcaacgtttaatctacagttatcaccaacatgtatgtacttatgtcggaatcaaaatgtatcaaactgcttattgtgaagagaattatagcagacctgaagggggcgaaaaaccagatagggtggggggatggatgccggtgacgtgctagcacttgtgtggacatcccagtctgcattatgctgtttaacataaagtgccgacattttgtaccagcaaatacctgcccattccaacccttggtgggagcagacctctactgtcctctgtaacttgctgctattgaggacaagggagtttttctttctttagcgtcttcagtgaaggatacaatacaacaatgcctaatgtatttgactttttagcttgtgtctgtgtgtaggtgggtgggtgggtgtgtataggaaaagcctaaaacaagttatttgcatttcagtggttttgtgagacaaagaatgggaaattctgtagcccttctggcttaccctgttgattataaacctagcctcaaaagagattgacaggcatgactcaagtgagtgttcacatatacaagcctgcatgagccctctgtgggtaggtggtcacacttggcatctgcagcattgacgtggccccgctgggtgccttgagcatgccctcttcctgctctgcaatttgaatcaccaccgtgccccttccaccactgttccccatgcaaaagctctgcttccagcagcccccactgaccgctctctgtgtggagcaaagtgctgtcgtgcggtgaccaccaggtgaagagcagcttgtattcagacatctagagaaggttaaatcttagtgtccctgggccaggagcatatcccaaggctcctgcgagccagtggcgaccctgtccactgccgctcttggttcactgctgtgtcctgccccaccctcctctcctcctgcctgttggttccttgacctgcactatgggttagttgagttccttacgatactacggtgaaagccgggtgctagagcccctcttgtttacaagacataatgagggatttgaaatatgtaaaaataaacatgagaagctaaaatgttcttccatcataagcttaaagggaaaaaaactaaaaactttaaaaaaaaaagaccaaaaagtgcgtatatatatacatataaatatatattttagatgaagactaactctgggagcatttaacagtgttttttgtttctgtttttaacatttgttttcctgctttaaaatttgcaagcattctcaggaattctagggtaggaagccagttttttgaagatggtttatttaaccatatcttatcctagagagatggctgtttctttcctgttaataaacttttacaagttcctgaaacttcagaaagtttaaacaatttttacttaaaaaaatgtaaaaagaaaagtctccaaacattattgtcatactggggatcacacattttaaaacacatagaaatattttttaaaaattatcaatttagcagcaacaggtaaattcattatcttaaaaatatgggagaaggattaagctttgtaagagctcgatcatggattcttttgaaattgtgtgtagtttaatgggagagtgtttggtgtatatagatgagaatgccatcactttgttcctttccatttgagactgaactgaaatctcccctagtaatttttatttttttaaaggaacccttctccttgtccccacaaccccagcaacaaaagaaaggaaggaaggaagaaacaacagcttaaaaaaaaaagtaatctgtaaaatagtacagttggattgctgagaatctatgtaaagagttaggaaatataggttaataatttttggaacaaattttaaatataggcattactagaggaaaattatctatggactgtcctattaatgaagaatgtctgtcttacctccgtttgttttgggaggaggagaaaatatagaagaatctaataaggaacaagtgattttacttttttagctcccagctactgttgtgctcgttttaattgctgttttgaagatctgctgcttaattatccccatcccttagccggagatgtggagtgtttcctttcagtttttggtgatgttgaattcttttgtattccctcctggggccaggggtcagaattcccaagcatgaccacagcttcttttaaacattaagcttcccagtgggaaggaaactccagctcgacaggtaaagggagtgggtggggttgctgcctgcaatttctctaaaaccgctttagtgccttcgtacatacacccagacatcctgagcaagggggacgcacatgtgtgtgtgtgtggtccagtcactccacagatgtaagatactcacccataaaggaaattggagtggttctggacaggccccaaaggcagtgggctgaatttaaaataaataaacaaacgtcaagcaagttaatatgcttatgtctcagtaatgtagaatgccaagttccttcctgtgtcgtgtgccctccattactgtgcattgattcctccaggtgtgtaattgtgacaactgcagtgatttggaaagtctct

SEQ ID NO: 103811 - DNA, 2001 bp, Homo sapiens
taagaggttagatgacttcagtatacttataaaattcagtgagagtgccttcttctcttctaccacactctggcatagatacaggcttgctggtcacctctcattacatagatttattttaaaaacattttgattatgttaatttgagctttcccttttttttttttaactactttttaaaacacttgattactagtggcttagaggtgtgtacatctcctgaacatcacaaacttggtttctacctaccacacgagtagccaaaagaaaagaagcactaatagagaaaggggtgtctcacaccagacagaggacctctgctgtcaattagatccagtatcatgacctaactttaagtgtggaaaagagttcagatctctgagacactgtgaagaaatggatggctcatgtaacatctctgatccctcagtccccaaccctggacgtgtttcatttacaacattcataggagttaacttagcagtgttgcaagttaaggttccaaaccaaattatttaatcagtgtccccccaataaatcacttatccatttattgctagttagttttatttatagcaacttgatttcctatgagtatggctcctgttgtaagaattttcccacctcttctgacatgaatgtagcataagttagcaatcggttcttccaaactcctgtgggttgaatatggtatagaaggtatgcaagaggaaaaagaaaggaaaagataaaactcctgcctgagaatttggaagcacctttattaacacatatatctcgcagaaactagaagctcataggctgttaactttttgcaactattcactcatttttaccacttttttttttgggtgagggggtgatttttgtaaggttaacagccagattccattttgacctcagatgctgtgtactttttaatttcattttttatattctgccatcttgactcttctctaaaacagaatgaaaatgtctgcatgctgagcaaaatgcttacgccaagcctgtttttctctgcagagtaaacaggatgttttcagcagacttggctctaatagccatctctaagattagggaacaattgagtctttatgtagaaaagatccattttttccccatcctcagagttaaaattcaacatttaaagctttatcggttattgttttagatttgagatttttgtttttaagtatctataagatctttagaagtgagataaatttttcgctggttaaaaaaaatcaaactttcctctgcagtgtttttgccaagttttgtcacacttcatgtgtatgcattaactatacttcttagtgttactgcaaaaaaaaaaaacaaaaacaaaacaaaaaaaagccttgttctttaattgtgtttttcctcctgtgagtggacaactaaagccgcgtgatgatgcggatgaaaatattctggtctgtgtgtatacaatgaattgtcagtcttcagacctcatggtcgttaagaaaatagggaactcacaaaccctgctgcgcactacatttacttctttatctgcaagtacagggagtccatacagtcaagaaacacacagatacacataatgctattgaggacattgtcattctgtaagaaaacagaatattatctagatttccagagttagtgcagaccctgtgataacagtctgtgggtttgtggccagcgccaaaggtgtgtgtattttcagaaatggtccctatttgtcagtgatagtgttttttttttcttaagtttgacaaagggggtggtaatatcacattctttagatttgaaataattatcagctccaagaatctgtgaacatagtaataacaataaaaattcaacatcgaccctccctaacctgctcaccatacctccccaccccatgcctctgaagaaagaggccatgaacctacgaggtggtaaagggggacacaggtcagggagtggagagctactcctccagcagctcagcacccacactgcccgcatgcg

SEQ ID NO: 103812 - DNA, 3052 bp, Homo sapiens
aaaagggaaattcctctttactgctcacagtaagctgcaaaagaaagttgtcaaggtggcttatgatgctgttgtagcagagctgtgaaaggaagtgctttgctttctctcccgccttccggaatctggcgttccttccccttcggctactgaaaggtgtgtacaactcccagaggggtggctgtaaaagttgactggaggcaaagtggagtggccttattgccaggactagccctacagaagagctttacagagaggaggacagtacatcctatgtgtgttcgccaaaaatgggaaaggtgggtatttaggcaaaacaaaataaaaacctttggaaccctttaagaagttacataccttttaaaggtagtatagtttctcaccaagtgatgcattttagcatgacacttcttgccagaaattttgggataagttggaataaatgtgtttaaaacatcatccaccgccctttttaaattttgtctaaggaattacttaagtatagtatttctgaatgtgcctttgtgagtacagagaccgtccgttctaggaagaagctatccgttggatacaaacaaacagacggtcagctttagtcattagggaagtcaaagttcctcctggaagtcccaggagcagctgttgagatttcattagcatcaatattgcacagtgtagagttgagtggaagagattctgggacttgggagaggagacaggggaaggtacccaggcgacgcagacccacgttagtccaagagcgcaggtttacacatctgcattccctagttttctccgtctgtatgtttgtgctcatgtggctttggctgttttgttttttgtttttctgtaagcactggagaattggaatatggtgatacttgtgacacattcatgcatgtaaacaaggcattttccagcttctgccgtgtgcagagcgggcagcacgcttttaccctttgagtctgtgtcctgaggcggccattacattcccacatgggcgtcacatcacgttgctgttgatgcaaacagggtattacacacaaggaaaaggggttttgaagagttaagattgaagtgtttgagaaagaaaagagaaaaatctgaaatcatattttatttcttcagagctattatagttgaacacagaaatctgcagtgtctttatttgtttttatgttttaaacaatttcacctcttctccccactcctatcttctaaagaaatatcaagcaaatgctaagggccatttccatgattcctcagagctcccccaaagaggagaacagtccctcccactcgattccttcagcttcattcaggaagacacagggaggagagatgctgcttctgcgctttgctctcattcctctctcatggccttgaaatgtattattatgcaaatgtgaattttgatactgaatttaagaagaggttgttggatttttttttttttttttttttttttcaaaaaaaaaagtcccacatgtggtcatcgtcgcttctttatgttgtaaggtgaattgtaactatgcattctgcaaagggggtggggaggagagggcagaaaggggaagggagtagcgttgcatccttgttcttcagtttctgtgtccatggtgtccccgtgtcctggaggggaaggggagtgagagacgaatgtggtaaggtcagcacagtgagatagagacctctgagtcctcttgccactgttgctggcaggtctgatggccaggtaaattccagggggcctgcagttcctgtcaaccaatgtggttcaggattcttgatcctagccgtgcagtgttaatccagtgcagcaatggaactccacaggctccagtgttctctggaaaaagtactcatcctttcctgaattcagagcccttcaagctcaggaaaccacgcttcactcgtgctgacctgaaagttaatctttaggtcgattttgaaaaactccgcctcctctctcctttttaatatttctttcttcctttttaatcatgtttaagtgaacttactcttagttataaggaactgtcctgctttgtggggaagagggctgttgcttgtcaggcaaaaaagttttctcttcctacccaccatccctctctctgcttcccttgcatttggcaggctgtatgaagccaatgagctgcgaggtgttttgacaggggaggtctgcatgcagcctcttctttgtcctaacaattcctttgttgatcttgcctgtgatgaatcatagcgcctgcattgctctggtctaggcattatttgcaacacacagtatcgtaagcgagagattgttctgcctatattcagtgttttccatgcagcaattcttcttgttgacgttcacagtactgtaacgagtaacagacttgatcacagtctcctcgtgcctgtgcagggctgcacaggcatgatcttatcagggttccaatctgttagattgcctttaaacaaaaaaaacaacaaaaaaataaaatcctgacgtttcaactgtctcacacaaaataatacctcgaggtacatttccccctgcaatgtaaacccttaactcctctctcctttctgacatcagtggattatcctttttaaaatatgaacatgtaaatagcaggataactttaaaaaacattttctttgctgtgaaagtaaccctaaaatatgttttcttcttttgtatttttttggtttttgtttttaagccatcagaagtttcagatctttactctttcatgtttaagaagaaagagcagaggaggtcgggggagccggtttgcatttgtgttggaggggtgttatctccattgcctcccacacagtgacagcagaccagtatgtaaaccctgtcttggctgggcgcggtggctcacaccagtaatcccagcactttgggaggctgaggcaggcagatcatctgaggtcaggagtttaagaccagcctggccaacatggtgaaaccccgtctctactaaaaaattagccggacgcagtggcgcgcgcctgtggtcccagctgctcgggaggctaaggcaggagaattgct

SEQ ID NO: 103813 - DNA, 1283 bp, Homo sapiens
tcgactcaaaaacataaaataaacaaaagacacacacacacacaaaaaccctgtcttaaatagctgccatctcttccagcaatctagtgccagggtaagaagtgtctgaatttctctcttccagcagatccatcccctgcagggactccagaatgttctccacacaatacctggagctctcaacctttcttggttcagacacacacatacacaccccttgagtaactcagtatcattttgtagttcacagaaggatgtagtccctggcattttggtttgcactgtagaatccatagccttgtcactttgttatgctctggaaatgtactgatttcttacttgggaggaaacttgtgtaaggagatgtgcaaaccaccctgaaagccatgtgcatcctcacctcttccattaccccctccatgagctcgaagcgacattaagtagagggaaatgcttttaacaaatgctgctcatgtggatctgtcagctattgcttgcctagatttgggcacccatgaagcagggttggaatggatcattttgaattgcttctttgcagacacccccttcgcccccatctttaagataaaccctttactagtcaagaagcccttttcagttggatctcactgatcttgtatagtgacgacttcctttgaaggaagaagcttgattataagtgcatgcatattatccacccaccttctgatttgggcactgttcaccttggaattttatttattttgtttatctggaggccctttttctatcagtctctgatccctcatgggttctgcctgcccttgtatctcttgtacaatgctcccaaagggctttgctgatctctgcacttctttcctgggacactccccccaccaccaccctttgcacacaccagtgaccaaagtgtatgcagtgatctcacagaagacatcaaaaatggtgcatgcaccgtgaatgtgctcacagagacacgtgcacaagattctgcacccttggccttaatctcagtatgacttaaggtgcaggaacatttttaacaggttttaaaaaaacaaaaaacccttctgggaggaaaaaaataaaaagcagatacaacagctcaactgttcccactcctaactctccactatgtgcttataacttcacattctatgccctccccgccacccacctcatccctgttctgcgtaaccaaaaaacagacaacaaaagcaacctgaggagaggtttctggactattttatctgtctccatttagatggagatataaatgctgcttt

SEQ ID NO: 103814 - DNA, 1016 bp, Homo sapiens
agaaacaaaacctgtaaaaatgactaatcagctgcacatattgatgctctctgcaagttacctttaagtgttttttttttcttatacttgaagttgcttttacgatattattttggtggctttcttttctctctttgatgggcaatagaggaagtagataatgggatttaaggacgcctgggggagaaaagggaggatgtggcattgtctttttttttttttttttttttttttttagcatagaggtttaatcaaactcccatatgttgaaattgctcctcatattactggttttacatggacacagaaactaggcactttagaggtgcacttgcatggcaggctgggcccccttttctatattttattttcctttttagtatagtggtacttaaaatcactggttcacttaaaaaaacaaacaataaaatgttaaactctactaatgtacaaataagctgaaaagttgcattttatgtgtattttttgccatagcaggtactgtatttctcatgctggatttcaaaaaaaaaaaaaaaagtatcaaaaacaaaaaaaactaaagggtggtgttttattggattgtgacaggttgagtaataaggaattaagtcgtcgtcatttcattaaaactgagagatgatgtaatgcatatataagagttttctgaagggttttttttgggcttttaaacagcttatttttgtttttgtttagtttttttattttattttattttggaaagatatgattgtattatgtgcaactcagttgcttacattataactacaaaatatttttgggttcctggaaaaaaaagaaaaaagactaataaatgtgtttggctgctaagcatttactattgtggtttcctgttttattctgccagtttaatttgctcatttgttgaatgtttatatattttttcttattcttctctccctgctccacatgtaaaagctgtcagaaattcaacatttgaatttgggccgcaactctgtctaccttgtcttgtc

SEQ ID NO: 103815 - DNA, 1046 bp, Homo sapiens
tcctgcctcagcctcccgaacagctgggactactggcacccgccactacgcccagctattttttttgtatttttagtagagacggggtttcaccgtgttagccaggatgatctggatcttctgacctcgtgatccgcccgtcttggcctcacaaagtgctgggattacaggcatgagccaccgcgcccggcccaagcataggcttttaaacgaagagagtgcaaccaaaggcatgttgctgggatatgtgggtcaggattatgattttgttctgtttttctgccgtggtcttaaaatagttcatgacattttaggtagtcaactcagttttcaaattttggttactgtgaactcttccaggcactttagggtacaaagatggaaggatatggctgctgcctttcatgagttagcggtctaattttatacaaaattatctgaaagttttgttcctaattatgtaatgaacacaacctgaattcaacctctttctatcacatgatctttcttgtagcttgccagagtgatctctcggcttgccgactttgctaaggaacgagccagtctacccacattaggtttcacacatttccagtaagtgataagattacttcttgtttatgtgcatatggctttcagctgcttcttgagttctctgttttccacagtaaccttgaggtgaagaatctgaaaacatgatttaaatataagtaatttgggatgcttataaggaatgagcctgatatccactgagagagtaaatctaacagttcatttgggaaacattgggaaatacatatcaagagccttgaaaaatattctttatgatagtaaacattagaaacaatctaaatgggccgggtgtggtggctcatgcctgtaaacccaccattttgggaggtcaaggtgggcagatcccttgaggttaggagttcaccaccagcctggccaatgtggtgaaacgctgtctctactaaaaatacaaacattagccagatttggtagcatgcctgtaatcccagctactcaggaggctgaggcaggag

SEQ ID NO: 103816 - DNA, 1640 bp, Homo sapiens
tgaacaaaagggacattgtccctgcccttataataaattgtctcttgccgtgcatcacagtggttcatgcctgtaatcccaacactttggaaggctgaagtaggtggatcgcttgagacatagagtttgagaccagcctgagcaacaaagtgagaccccgtcactacaaaaaatttaaaaattagccaggcatggtattgcatgcctgtggtcccagctacatggaaggctgaggcagaaggatcacttgagctccagaggtcgaggctacagtcagctatgttcatgccactgcacttcagcttgggcaacagagcaagacccagtctagaaataataataatttaaaaattgcctcttgatgaagaaagtactatgctaatcgccttttagtttcatactccttgactatttgtaaatgacattgaatctccgtaacgattatttggttaaacattttatctcttgttttatctttaccagttactccctctcttacttaaattgttctccctccaaggggtaatggtggttattaaaagaagcaatgaaaccttgatgatttaaggtctcggtctgagactttcgtgtgttctctttgggttttcaggcctgcacagctgaccacagttgggaaacgttgctgtctttggattcaggatctttgcatggatctccagaacttgaagcgtgtccgagatgacctgcgcttccggggagtaaagggtaccactggcactcaggccagtttcctgcagctctttgagggagatgaccataaggtattctgaaagtgacctgcaggacacagaaactcaatggtggagcctaagagacaaggctgcctttgaggatgataggagagattgactgtgggatgggtggggtctttcgactagaaggaagttgtgggggttagggagcgagacctgggtaggatgacaggttgaggcattctcacactggacacatggattattataaggatgtgtcttttctttccaaggtagagcagcttgacaagatggtgacagaaaaggcaggatttaagaggtaggtaaatgggaatgtgttggcctccctgttaagttgatggaagtcctatattcagtatacctgcagatttgaccttacaatttttgcctttttcttcctttgttcttctacccatttttttttttcctgtctctatcctgggttttactttcttactatctggattctttttttttttttttttttttcgcctaatcgtcttgctgacatattttctggatttcattttattttattattgtttttgagacagggtcttactctgtcacccaggctggagtgcagcggtgtgatctcggctcacggcagcctccgcctcccagtttcaagcagtccttccacctaagccccctgtgactacaggcatgcctggctaatttttgtattgtttttgtataatttttgtattgttttgtagagaccatgttgcccaggctggtctccaactcctgagatcaagcgatccacctgcctcagcctcaaagtgctaggattataggcatgagccaccatgcctgacctgcattctctttttgtataatctataggaaaaaagaaaatgatttacttctggtttctttaga

SEQ ID NO: 103817 - DNA, 1033 bp, Homo sapiens
aagttgagagtgcacgtttggtcctgctctcttctccgtgaaggagagcagatgaaggtgtttatgtcattaccttcagtcacagtaatggtacagagcagtggccataatctgccatctatggagggtgattttggtgaactgaatttgttaaagtgaattacttaatcacttgtaggaaaagtccactcctagtgaaggaatgaggtctgacattctgtaggaaatgagcaggaaacgagcaaatgattcatgaggctttacagaagagggccagagcaaggtgggcatccatttcaggcttgtcctaagatgtgggcagagagttgagaagaccctggtacagatagacacaggaaccacctcagcctagaggggttttgtgtagagctgtgtagactgcatggatgggaagtatctgatgactttttaaaagtgttcaaacgccctgttagtagggaactgacaatacttcactgtcttcccaggattgccatgagaaaatcagagtgctttctcagcaggcagcttctgtggttaagcaggaagggggtgacaatgacctcatagagcgtatccaggttgatgcctacttcagtcccattcactcccagttggatcatttactggatccttcttctttcactggtcgtgcctcccagcaggtaagcttccaagaagcctcttttctgctgggctgcagaacctggggtactctctttgatgtttttgctttataggaggtatggtgggaatgggctagttagaagaaaatcagagcaggttgctggctaaaacttagatatttcggttttgtttctgttttgttttgtttttttgagacagagtctctcatccaggctggagtgcagtggtgctgagtgcagtggtgctgggattataggcatgagcccccacaactgaccaagataccgctgttttgagctgcctttatttctttgtgtagattttttggaattatcttttggtcttgagaatgtggtataatggacaaagaattaggttttattgt

SEQ ID NO: 103818 - DNA, 1005 bp, Homo sapiens
tggaccttttggtcctgagtgggctattgggaagtccatctgccaggccagaactgtggctaggacattttaattgactgcaactaatcaccttcaggtcactcacgtttccaattctgacaaaagttttccttgttcttctgattcgtaggcaggtatttgcaggttaaaggtttgggttgagaaggacacagggaacttgctggtatgatggaagtatctgtgtttggctgggtcagtggagtcagagtgttcactgttacaccttggaactgagactgcttgatgcggacaatgttcagacatttgtttatgcaccaaaatgtacacctaacatttgtgcattttactgtaggtaaagtcattaaagttggtgtctttgaaagctgggctgagggattggcttttgggtgaataaggacgaggctgtctgtggagctcacccaggggttgctgggctgccacaggagagcttgacctcattcattcaacagatatctcatggacccaactgtgggtggtgcagtctccacagctgcatccctgcaggcccccgaacaaaactgaaggtggtctcagctgcatggagttctcattttagtgagggagacaggcagtaaacaagcatgtaatattctggagcaagaagggctggaaaaatacttccagggatagagaagaggggcagtaaatcatatataaaaaggtcctgaagtggccctttcagaccatgtcattggagtggagagagcaagaggaaaatggcagggggtgaggacagagtgggcacggcccagaggaagcagctgagggagcgctggaaagcccttggctttaagtctcagctctgagcagagtgacatgatctgacttgcattttggaagggtcactgtggctgctgaggggaacagcctttgggaggtgagggtagcaacagggaggtcagcaggagggccactgcagtgatctggatgaaggaccatggcttggacaagggccatggt

SEQ ID NO: 103819 - DNA, 1035 bp, Homo sapiens
tcaggagggtctgagcttcatggctctaggccagctctctcccaccatatccagattcccatagctaatggctttctgacagctccaggtgagcctctaacatgtaccccatgaggagcaaagctcttcaccttctcctcaaagccactcctaccatagtactacccggatccagaaatgacacctccattctcccgatgctcagcctaaacctcggagtcacctctggctcctccctcgcccagaccccacactcagtccatcagcaaacccacaggattcctttacgtctcaccacccctgaccatggcccttgtccaagccatggtccttcatccagatcactgcagtggccctcctgctgacctccctgttgctaccctcacctcccaaaggctgttcccctcagcagccacagtgacccttccaaaatgcaagtcagatcatgtcactctgctcagagctgagacttaaagccaagggctttccagcgctccctcagctgcttcctctgggccgtgcccactctgtcctcaccccctgccattttcctcttgctctctccactccaatgacatggtctgaaagggccacttcaggacctttttatatatgatttactgcccctcttctctatccctggaagtatttttccagcccttcttgctccagaatattacatgcttgtttactgcctgtctccctcactaaaatgagaactccatgcagctgagaccaccttcagttttgttcgggggcctgcagggatgcagctgtggagactgcaccacccacagttgggtccatgagatatctgttgaatgaatgaggtcaagctctcctgtggcagcccagcaacccctgggtgagctccacagacagcctcgtccttattcacccaaaagccaatccctcagcccagctttcaaagacaccaactttaatgactttacctacagtaaaatgcacaaatgttaggtgtacattttggtgcataaacaaatgtctgaacattgtccgcatcaagcagtctca

SEQ ID NO: 103820 - DNA, 1102 bp, Homo sapiens
gggctgcgcagagtaaggtctctctcctgggccacgggatgcctcctgctctggcacagggaagccagggggatgctaccctagttgcttaggtgctggctgcttgagctccccggtggtgggagatgtgggcagtggcccctctccagcagccagaggtcaggtggaggacgacgctggccatggctgccttgcagtgggattgcaaacgtcactggcccagtctgtattcatttatttggagcagcctgtttttcttgagtatattcagttctgtgaccttttcattgccttctctctttcctagctcctccttgctcctgccaccctgggggttgctcttctcctcctccggtctctgcccaccatttgccctctgacaatggtggcgtctgaggaccctgtgtagggtcagggcaggctgggcacaccctacctggaggtggccatgtcctcacttccctttttccctctcaggttgtgtctcaacttccgatgggccgggattccagagaaatgcttttcctggcagagcagcctcctctgcctcccccacctctgctgcctcccagcctcaccaatggaaccactatccccactgccaagtccacccccacactcattaaggtacatttctgccagtgattgtaccctccccttccctgtgccctttggagtcctgctgtgacttcattccagctgtggggacagctgtagagggtgtggtgcgtgtcttctcccattggtctgggagtttcttcccgttctgtctgctgtccatcatgacactggctgttgcaatcatagccaccaattattcgtggctatgggctggccttgggcattccaggtcctcactcctgctctcatccatgaagtcattcccacacattatgtcttgttcactcaacaactccgcaaggcagaaatagagccctgtgctacaagagaggagctgagaagtgaagtgacgcggccagagtcatgcaggaggtgccactgagtggtgttcccctccttcaaggcctggcctgaaatgcctgcaggaggcgggggttaccactgtcggtgtgggggacctgtgctgggcattgctggcctc

SEQ ID NO: 103821 - DNA, 1019 bp, Homo sapiens
agttgagtaggagagaaggaggtggtgatggcaaatgtagctcatttgctcaatagttctgtggagaaggaaagcagaggcaggtgctggcttaaggagggattttcaggctggatgcaatggagcaggtttttgggctgagaggaaagagtcaaggagatgagaggatgggcaccttcagaggaagaggagggaggaggacgaggaaatggaaccctggctgaggtggaggtttggctcaggagaggcaaagctgggaaggaagtttggctcagatgagtgggaaggaagcgggcagtgggagaagggggagcggaccgttctgaggcctgagaaaagggctgatgggggttggggtcttccccacacatctaagctccccatcccacccttcctccaggcccctcagttatcgtcaaggttcactttaagtcctgtcctccaggaagacttctctgagtctctcctcagtgtgcccttagcttctgtgttttctctctagcagagcattcactgggctccaaggcaactggaccataaactcctggagggcagggaccccatctttgttcccaggatgtgactgtgagtggagagagaaatagtctgtagtgaccctggcctgtaccagccctgggttttccacagtacggccagcagcttccttgggttggactaatctgggggaagctacagttcctccacccttgctcaccgttgtcagtactggctgccatggggctgctgtcccaaatcagatgccgttgccggaagtaggagattgtgggggaaatctagccgtgtgtctggcatgaagtacacatggtcagcaagccctgttctgtgtgttgcatacttgcccctgctgggacagatgaggggacagaggagcaagccaccaccacagtcgccagtaaggaagaagctcagatgcatccttcccaggtcctgagggaggagagagcctcaggtcctggccctggccctggagggcaagagctcctaggagagccactgca

SEQ ID NO: 103822 - DNA, 1557 bp, Homo sapiens
aagacttgcggcacctgctctaccaatctctgctgcagctgaggcagtacttctgcccactgcacgtggggtgatagagccagagcccacagtcactttaaaccatctcctggattgctcagcctcccctgggctggcacagagctgcccagccagaacaacaaggcagcagatggctaggtgaggacaagtctttttttttttttctttttcttcatttttttccagtctttacctttactatatataatgtcctctgaggcttcattgcctagtgtcctttggcttgtcttatcctatgctggtcttgatccactaatgttctgtggtttgaaaatgttggtgcagaggttaagagcacagactctatagagtcaggtccaggggaatatatatatattataattagccccgtttggtgggatggctctgtgactgttgagggactggtttagtttgcccagagtctcataaatgcagaaattaggacattggactttgaggaactagagctttgctaccatgtgtcaaaattcatattccatttggcagccattcaaaatgaatggaaaatgcccatgagatcatgcagtgttacaggtttttggggtttttttttggtttttggttttttttgtttgttttttgagacggagtttcgctcttgttgcccaggctggagtgcagtggcgcagtcttggctcactgcagcctccacctcacgagttcaagtgattctcctgcttcagcctcccaagtagctgggattacaggcgccagccaccacatctggctaatttttgtatttttagtagagacagggtttcaccacattggccaggctggtctcaaactcctgacctcaggtgatccacccaccttggcctcccaaagtgctgggattacaggcttgagccaccgtgcctggcccaatgttacatttcttaaagcaggatataaaatcatattcagtgtgattacagcgctgcaaagttaagcctattttctgcatggaagaataactagaaacagatatcccagaatactaagagtggctgattaaagtttattttattttatttttctttctagttttctaaatgttttttgctggacatatattacttttatggtagtagaagtaatagttttttaatagatatattgtcagtccagcctcagagacacagatggtcttgaaggatggtgcccttccttggcaggtgcagttggattttggtgtgctctccccaggcctactcttgcctccgaaccctgcagtcaccaagttaaggttgtgggaactgcagaggtggtcagcagctaccatggccaaggctgctgttgtgatcctgtccatgccataagcctgtgacctggatttgagagtttcttggtgtgttttttctgtagacagaggactatctcaaacggaagattcgttcccggccggagagatcggagctggtcaggatgcacattttggaaggtgtggagattggaattgcttttccatctagatccagttctcactgtgtgtactcactactgcactac

SEQ ID NO: 103823 - DNA, 1061 bp, Homo sapiens
ggcctgtaagtgaatcaagccagtgattcaaccaaattacagcatttggtgacagcaacacctgaatatatcgacacatataccatttggttcagggcactctcactggtgtttcttccttacaagggttctgagaggtgggcagattctcactctggaagaaaattagacccagaaagcagtcaaaacccatgtcacccagcagtaattggtagcactcagtactagaacacagatcccttgactgtctatccagaacttctgtgaggtttcgaacccggttgagaaccagaattctggctgtttagatgaaagtttagagctctgccgcagaatcctcctgtcctcctgtcactagtcaccttgtgtccgtttcttacagaatactcactaattcatcgagtgaataattattgagggtatactgtgtgcctggtattctaggcacttggggaatgctgtgagtgactaaaaaaatagacaaaacccttgctgtgctctgatggggacatgttgtaaatgtaaacgtgggagactgagagtaaacaagaaaagtatgtagtattccgccttttttttttttttttgagacggagtcttgctctgtctcccaggctggagtgcagtggcactatcttggcgcactgcaacctctgcctcctgagttcaagtgattctcctgcctcagtctcctgagtagctgggattacaggcaccctctaccatgcctgtacaaaaatgtttgtatttttagtagagacggggtttcaccatgttggccaggctcgtctcgaactccttacctcatgatctgcccacctcggcttcccaaagtgctgggattgcaggcgtgagccaccatgcccagccagatacgtagtatttatataaagactgtcaagacagtgatgagtgctgcggagaaaaatgaggcagaaaaggaagctggggtggggtggacagtgtccgttttctcttgattctttgtacttactgtctcatgcatgtgctaagctttccaagagccaaggttacgtgtgatgcatcacacccgggttcct

SEQ ID NO: 103824 - DNA, 1070 bp, Homo sapiens
aggaaaagattgagcatcctgcgtctccacttcttacattcattcttgggagttggtcttcctgctggtttgggtgggggtgatagccggtgccaaaacgggtggtggcaagcgtgcataccaaaacaggatgtgtatgaagaaccctttatgactgctagtttggatcgttgcttgccccagaatatgcagtcccttctccacaccccgccacccaaatgctttcattgattcacatgaacttaattttggtgctcatttatcatggtcagtctctcgaactgttgacaactctttggttgatggtctttgttaaaggatttttgtaggcatttttagtgtgtcagctaaaaacagaaagacaaaaaatggaagtcaagcccggtccaattagctctcagcatttgactccatatacctgctgtttcttccagaatggtaataaaggaaaaaagctacatcagtaacagcccttaaacttaacatagcttctagcagatggcaaagcactttcattttaatgctaataattacccagtgcagcagttagtataattgccattttgcagatgaggctactgagcctcagaggggtcatgggacttgctgtaggttacacgggcactgaaagataggcagacccaatccgggttttctggctacaaaccctgtgctaattcctgaaagtcacagtttatactggttcttgtccacattggaatttttgtgatgacagcctgctatgctttcgccaaaatttcaactttaaaaaatctttgaaaattgaggaggctgggtgtggtggctcaagcctgtaatcccagcactttgggagattgaggtgggtggatcacttgaggtcaggtggttgagaccagcctggccaatgtgatgaaaccctgtttctactttaaaaaaaaaaaaattagccagctgtggtggcaggcgcctgtaatcccagctacttgggaggctgaggcaggagaatcacttgaatctgggagatggaggctgcagtgagcccagattgcaccactgcactccaggctgggcgacagagttagactcca

SEQ ID NO: 103825 - DNA, 1041 bp, Homo sapiens
gagccctcaagccgagggaatgggcacgttagttatggctgtattttgtctcatcatttctggttgatatcttttatcaaattcttctcctttgaattttgctgcctccaggaaggaaaaaaacccatctacctcatcttccagaacacttgcacatagttaccacgtaggactggctgtcagtcctgacatcgtcatatctgtaggacacagtgtgcttcagtggttcccttcccttcagggttgttctgtttctatatgtcattcagtgttggggtctgacctttccataaagttgaagggattaaagaatcccctaattcctatatacctctctgtactgcttgatatgctctgatcatagcatctcaactgtgagatacagaagttggtttctgatgtgctattaaacagaatcattttgcagtattctttattctcatcatgtaaacataagtttcaaatttaacgtcacttaactctaccaaatacagagtgccagatagcagaggcttgtatggtctaggccctaaattttcactaatgatgtctcgcacatatcttgagggataggacagatggcagagatagggagctggtcttgaaatccaaagattaagaccaggaatgccactgtatccaggatgaagactcacagaagaaactggtcatatttggtacactttgttctcaaagcttcccctgaagcctttctctttgatgtttaaaggtgtacaaggtcataaggttaaggtgaaaatttaagaaaaacgttctggcatgagagctgttgcagaggataacctttcaaaggaaaacatggaagtttttctgacctagacaaatcagaaaagggtctcctcctgtattctttctggatgtgagagaagcttgtttgtctcttgtcagtcttttataattgagaatccttgaaataaagcatatagtaccatgtttctaatgctacagttaaccctcaacttactattttcccatgtgccagtagtagaaaaaccttgaataacacgtgaggaaataatt

SEQ ID NO: 103826 - DNA, 1018 bp, Homo sapiens
gcctgccaggttgaaaagctaccactggggaggcatggctgtgctctagcaagaacaagaacatgcatttcatgtagcatttggtccttcccagttgagggagatgccttaggactacgttaatctctgagtccacttagggcttgggatgtattctcacagcccttgctcctcctccatcttagagtttatttttaccatcattgcaacctcctctaagtgattcttccagacccatagttagcctttgagattccgcagttctcctccctactcttccccaccatgtcttcattgagacccacatttttaggtttgactaaaccttccatctaggaataggtaggaggctaagcaatttaggccgcattcatgtatcctgtcatttgcttcactgcatcttcttggctgtggtaaaggaaatttaggtgtgatacactccttaggcttccctgccctgcccccctttccttttgcccttttgattttttttaatctgatactcaggctctcctcccgccttcacacaccattggagtctcctaagctatttctgtcagtttaatgatccccagctgttgccacagttcaggctgttttcatgcccaggagaagcatcgaagaggcagaggaaaaggggtcttgtttgttgtctgtcccacagtgtgtaaaacaaatcaaattcatttttctgaaactactagtgagattccttagggatggatgttaatactgggatgatttgaaaatcaggaggaggaaaagtacatggtagtatcagggacatttttaaaataagcattctgctgataggtgtggcactctgcatcactcagaattatgctagaaaattgaggtatgtggtatggaggaattatttgatcactttgcattcttttagattttttttttttttttgagacggagtctcactatgttgccaggctggagtgcagtggcgcaatctcctctcactgcaacctcctactcccagatgcaagcgattctcctgcctcag

SEQ ID NO: 103827 - DNA, 1039 bp, Homo sapiens
ttttgtagagatggggttttgccattttggccatgctggtcttgaaccccagccttaagcgatcctcccgcctcatcctcccaaagtgctgggattacaggtgtgagccaccgtgctcggcttctttcatagtcttatactgcaggaaaagaaaatcctttgggagtagaatggacacatttgagttatttagaaaagttcacttttaaatttgaggaaaattcttttagaagagttctaggttatgaaaaaaacgacaataggagctttatccaaatcctgtcaaatatgaataaaagagaattgtcaatattttcttctcctatcttggaaaccctaattatctactatcagaatttatatacaatgtataataattatgtaaatgctacttttctaaacacttagacatttcttttgagttttccagatttctttgggattttaataattttaacaggatgatttgagcctgtggagtcagcaatgaatggacacatcgaagacgagatggagtgattatcagtgcccagtttgcagagagaatattttttttcttcttttcttttcttttttttttttttgagatggaatctcactctgtcgcccaggctggagtgcagtggcgcaatccctgctcactgcaagctccgcctcctgggttaataccattctcctgcttcagcctcccgagtagctgggactacaggtacccaccaccatgcccaggtagttttttgtatttttagcagagacagggtttcacgtattagccaggatggtcttgatctcctgacctcatgatccgccggccttggcctcccaaagtgctaggattacaggcgtgagccatcgcgcccagctgagaatagttttaagaattggttgagaggcagttgctttttctttgaatatctagaactgttctggactaacgtcaaagaaacaccatggcaacattaaagggaagattatttgagaggcgggggatagtatggcttaggacttgggctgctacctttgactttgtaattcaaaa

SEQ ID NO: 103828 - DNA, 1092 bp, Homo sapiens
tttgttactttaagctttctaaattgtctgtgttacctagaaatttcttttcatagcaaaatagttacataaaataaaatttagagaatttatagtttaacaaatgttcataactaatcatgataaagatggatcagttaaagtttacaaattacttttaagatgcacattgcgaagtggtggtgttatgggtatgaatttcttagcttttcaggatgtcatccttttagccctgtagctaaaactcaagaggctacatgttcaaccataaaacattagcctctgccaacattacatcagctccacaaaacctcactggctaattatcccttgggactaggacatggatttggcagcttgtgaaagctgctttttccaatttctcccttactggctgtgacatatcccaaaggaatgaagttgagaaataatcatctttcgaaagctctcaacctctcattcccacagtggttctcatggttagggatagatgatcctttcttccacttgaggaatccctttagcttatgatgtattctttcagtagtaaccaaggtaccctgagtggaaggatgatggcaaggatcctcattaggtatgtttctaggtgattgtctataaggaatttaatgcttctgttaggatcttctttatattaccaaaattgaagaagctggaagaccagcattgggacccatgtgtggttatcatctgtgtccattgacatttgctgtaagaattagtattgctcatttaacatctccttttgatgagcacctgtaaaacaacttttttgaggacactcttggatagcaaaaagaactgtatgatcttaatctcttttagcctcagtttatttatcctaaaataaagatatggtacttggccttattttcctcacaagggaccgtaaggatggaaggagatgacacatatgaactaatttcatagtgacctactagtcaccctatatagtgggcccattctaggcctcatctcacctgttctatgttccctcctcgttctgtactactcaggatttttcacataatcttggttcacctaagcataaaataaatatattggaaaagt

SEQ ID NO: 103829 - DNA, 1114 bp, Homo sapiens
tcgatcttctgactttgtgatccgcccacctcggcctcccaaagtgctggcattacaggcgtgagccaccgtgcctggcctgttttgtttttttctgtactctactactcctttcaacactccacctctgatgacatcagatgtgtaggttttgtttttttttttccctcaccaacaaccaattctccaaccatctggtcaccaactggatattctacaatttaactcaattatgacattaattccctggagttagtgcagacccccacaggttaagggctcaggcccacaagatttccctgaacttcagatgccgatcgatagtggtgggtcctcaggttatccacaacttctgtctgagttggctacaaatcagaggtttccacaagcctctcctcaggttggatcatttgctagaacgactcacagaacttatgaaggccctttacttaaatttgtcaatttattataaaggataaaactcaggaacagccaaatgggagagaagcatagggtgagctatgagggggttatgtgatgctcccatgccttctctgggcatacgacccccagagcaccatctgggtttatcagtctggaagctctccaaaccctgtcctttttggtttctatggagtcttcatcatgtaggcatgattaatgacatcattggccattgatgagtaggtcaatctccagcccctcttgcatccccagaagtcagagtatggtggggctgcaagttctaatcctctaacacatgattgttttccctggcagccagccctcatccataagggctttccaaagtcagctcattaacataaactcaggtttggttgaaagggacctgttatgaataacaaaagacgactccttttacctttgttattcttaggaaatttcaaggtccaattttaggacctcggtgccaggagtgaagacaaagaccaaatatatatttattataaatcacaacattgcagtgtggcagaccgtgtaccaagctccttacgtatattaactcttattctttgcaacaactatgtgagatgggtgctcttatcccattttacggctaagattgtacccagctggcctgggttaagaatct

SEQ ID NO: 103830 - DNA, 1010 bp, Homo sapiens
tgaattttatagtatgtgaattgtatctcaattttttaaattgtgtgaggaaaaaaattcaggtttctctagagtgacagcagatcagtgattgcctggggctggaagtggaaggagaaattgaatacaaagggacacaagaaaaccctagggatgaaaatatatctctttattgtcgtggttatacaggcatatgcaattgtcagaacgctttgaattgtacactaggtgaagtttattgtgtctgaattgaagttcaataaagttagtttttaaaacttataataaaattatctctagttgttgtaagcttaaaatgacctttaggttaaaattatcttatctcttattaattataaggccaacaactattgcaaaaattacctcatagagtctgacttccgttgctagtttctatccagtttccaaagtgaaactagattgatcactttcactcagactttgctcttaggcgtttgtactagcctgactccattattgtgcttttcagaacccatgagtgggtgtgattgttataacattttttttaagtttatggaacattctattgcttttatttcttttttgcttttatgtacaacagaaaaatgtctcaaattgggtataacaaatcagcgtgattgcctttcacctccactttggagtgctttgagccagtttggacacaaggaggttggagttaaaatgactcctgaaggaagtaagcaagcatgagaagagagggcagcactggtaggtaacgctaaaacaacatcgccttcatctctcaaccctgatctctttccaagaagtgagctgactaaatgaaatattacacaaaaccctccaaggtttgagaagagttctagagggtagtctctaagtgagaaggaccatctctataggtggccctgagttttatcctcaaatttccttctacgccatgtacccatcctcactcatttttcgggtcccaccaagcctaaactcaggggtagttttccatttaa

SEQ ID NO: 103831 - DNA, 2184 bp, Homo sapiens
tcttctgtgcaggaatcttaaagtttatatttattttcctgtaaataccgaactgtgaaaacttgtttcatttgaaaaccctcattactagagagacaaagtaaatttaacaaagaccaggtgtggtggttcaggcctgtaatcccaacactttgggtagctgaggcagggggatcacttgagcttaggagttcgagaccagcctgggcaacatggtgaaaccccatctttactaaaaatacaaaagttagctgggtgtggtggcatatgcctgtagtcccagctacttgggaggctgaggtaggaggatcgcttgaacttgggaggttgaggctgcagtgacctgagatcatgccattgtactcagtctgggggacagagtgagacctagtctcaaaaagaaaaaaaaaaaaaaaaagaaaaaacctctcacacagcaaattatacagcccacataaggaccaaggaatgactcaatcttctcaaccttttagggatgcttttcccttagttgctaacctttgaccagactgtcatgtagactcaaagttgaaatttacccgtttttcctaagtcagtttgaaaatttggttgccagaaggggccagtgagatgcttctgctttcccagagcagcatttagcccacactggctgctactcattgcctgttgagtcattcccacagttctatatagagcttttctggcttttcttttaaacatgatgttcttggagtgagaaaggaaggaagtttttctctcttgtactgagtctccctcaccccaaatttgcattgcttctctttactaataacaaaatattgccttcagtcattctgagactattttctctcttaaggtctcctactgcttttatttaccatttgtttactatgtaagcattaaggtattcgctgggctattggcagcagccagctttcacatacaggctgatagttaacgagaaagattgaagaattctagataaacacaccaaacatggattcttagtttccaactttaaaaaattcagtcagatagactgaaagtaatcttaatatcattgttatgaatatcagttaatgaaaggtgctgtggggagcagtggctcatgcctgtaatcccagcactttgtgaggctaaggtgggcagatcgcttgagcctaggagtttgagaccagctactcaggaggctgaggtgggaggagcacttgagcctggaaggtcgaggttgcagtaagccacatttgcaccactgcattccagtctgggcaacggagtgagaccctgtctcaaacatacaaaaaaagtaaatgaaatcaaataacatcagtatactgtctattcacagaccgtatgtctaatataggcacaagtaagaggctcttttaggggactgacagatctgaaagacagattacagctctggaatgtattcagatgactttttgaaacagatattttaattggagtgggggtggagaaatagttgagcttctgtagttaaatgttcaacttccttagcctgttatctataaataccacatataaaaaagccgttggaattctttttcagaaaatttatggagcttacattttgtatatatgtgtttatatgtgtttaatcttcttccccacctctcatcaatgggtcagtaattggactgcttctttcatgagcttgagttgtttggattgtgtttaatctgttccactaaactgcattaacagcagtctcttatagtgggattttgaacaaaacctcatcttctcttcttgagaggaaaaaagcagttgatctgttttctgaaagtctctttatatatgtctctcccctcccccagagacgaatagcaaggggaggagcttgctcactgttctaaccacacttagtatgtcttaactggagagctttttggtttcctgtcggcagtaattcaaatctgtgtcatcttgactcgcctgaagggtggataaattggtaactgcactgagaaggggatattctcacagtctgatttgagcataaggcatcagattgaatttgtgaaagctttcaagacagcttttctcctgtgactttgactttcttcattatatttgtggatttttgtttctggaagaatccgtcatgactctactggaacctgagatgttaatgatggcagtacagtcaggtaattc

SEQ ID NO: 103832 - DNA, 1088 bp, Homo sapiens
gaagaactgatatttttataatattatactgtaaatacatattttccacatttatttagatcttttgtaaggcctcccaatgggtttttaaaatttttctctgtgatgatcttacacatctttagttagatttgtttttagacactttgtgtgttttaatgagattgtaaatgttgccttttacaaaaattttattttctaaatgttgttgttgatctcagatattgttctgagagatgtaaaggtgcagttctatgtgtgtctgtaatctgaggtgctggataggattggaagagctatgtaaagaaaagtaagcaggaaaatgggagtgaaaagggcctttcctctttcacagtggtttttctcctcctttatgtaagatttaagaagtaccagtttgttttcacatgtgcagcctgtggaataaaggacagatcatgtatttttttctgtaagggtacgaactgtatcctttcatgccacaatgttgcacaagaggttctaattaattgctgggagaagtaaaaattttgagtgggcagtttctgatccaaattacagtatttcttggggaaaggaaagagttttgttaattatattcctcagaaagcatggttttcaaggattttctagattaggtcgcccagttgaaaatcctccaatcttaggcatgtcaattgattaaatgattctgtttataatgtgacttagagaatttcatgacctacttcattccagtacttagagataatcaatttctcattcttacttattcatcacatgttatgctaggcccctggagaatagataccagatagagttcctgctctaacacaaaacaaaacaaaagcaaaagcccaaattctaatggatctcatctcccagagaaaatcactgttagtatatggtttatatccctctagtgttcttgcaaatgtgtgtttttaaaataactgagctaatactacagacccaattctgtgtcctgcttttttcatattactgaaatatttttataagtagccttttttaatggggtacataacattctgttctgtgccatcatttatttactttctccttagttg

SEQ ID NO: 103833 - DNA, 1088 bp, Homo sapiens
cctggcaataaatatttattgaatgaatcaatgaatggtttacatgtttgttccactacaggtaagaactctgttttctcagtggagtagaaggcagctgttgctgttggacccaaggtgtttgtgtatcttcggcctttttctctgaagtgtttccacttagcatataaattaactgaaatctttcccagcaactctaactttcccttagtgtttaagctcctgaaagaatagtttacagtcattgctttctctactttctcatatcccagagactcaactgctttatggcttctgtcactacctgtcttcagaaactgccattgccacagtaatttgtgttctttttgttgcagatcaaataagccctctttagtctttatgctacttgacctctttgcatcatttgacatggttggcttctccctcagacttgaaacttttcctccacggatatctacgacttacctttttccggctttttaaactctacctttccagcgactccctttgccattcagagcttttgctatctttctctgcctacctcttaaattttgttactctccagcattcagctctggaggaaagaggctggtaagaagattgttgtattttacagtaggtttttgcatggtcatttgtttgggaggtaatgataggagcagaaatgaaaaatctttgagaagattgtgaaattggaaagtgtggagttctagaacagaataaattctagagttagaggaggtgctttttcatgaatgggtgtaccgtgtgttgagagagtggagtgagaaatgtacttctttgatctgtttcacatagaagcatgtatcatatagaaattcagtggtggccgggtacggcggctcacgcctgtaatcccagcactttgggaggccgaggtgggtggaacacttgaggtcaggagctcaagaccagcctggccaacatggtgaaacccctcctctactaaaaaattagctgggcgtgatggcgggtgcctgtaatcccagctacttgggaggctgaggcaggagaatcgcttgaactggggagagggaggttgcagtgagctgagatcacac

SEQ ID NO: 103834 - DNA, 1012 bp, Homo sapiens
cccccaaactactgcctgtctttatgctaggtgaggtttgtctcaacaagtttttcattccaaagttaatattttcaaaaatagttttttttatattattcatacctgaacagaattattattgtagattttctgtgtggtagattttcttactgtggcaggttttccgtggcctggcaacatttcaggttgtctaggctgattgctgcatggagttttgatgtaagagtagaatcgactgaagaattcctaacttgaaaattgtctcataacagattacataattttgtaggtgaatacacaaaatatgtgcagatgatcatatttaaatttattcaggtctcttatacgtagcgtgtggacttctaaatatccgtcactcagtctcttagagaagaactctagaagacaaatagaattccacctttaaaaattggaacacatttgaacaccatagaaaaaggattgagaatcataaggaaagcatacctgtagtgtttgtgggcatgaataaagttcaaggaatgtaatgaagtcatcttgtcaaaatagtgctttaattttcaagcagcctttttggaggtgggggaggagtttaaggcaaattgtcaaatttctgttaaatgtttgcaagaaaatattaccttgtagttaatgtctctacttttcagagtaccttcttataagacccttcatgataggacagataataataacaaatgtttattcagagcgacttactcaaggtcacatcaccaaactcagtgatatattaagacacaggtcaaaacaacattattacattttcattaggggccaggcagaatagtaaattataccaaactcagagtcaggtggcacgctaaggtgaacagctcccttgtcattctttctctacacacctgccaaaatgattatttatttatttttatttattttttgagacggagtcttgctctgttgcccaagcgagggtgcagtggtgtgatgtcggctcactgcaacctccgcc

SEQ ID NO: 103835 - DNA, 1099 bp, Homo sapiens
ttggcaaaaaaataattgcagttttgctattgaaagtaaaaaaccacaattacttttgcaccaacctaataacctatggtcatataccctggtagtaagtggtggtgttggcttgtaaaatcagatgctttgactaaaataatggtgctgttcatcaccatattggctgaagaaaagtcaccatggattgtttatatcacctaaatttcaaatagttgagctatggagatatacaggttgtgaaagccttttgattcaaagatgtggaacagtgtgtcttttaacatataccatttcactttttactgctactcacctggaaagcaaataattttttaaatatttgactcattttataaaagatttttttaatttaaaatttaatctgagtataatatttttctgagaaatgcctgagcatatctcaatattttatatctaaatctagcatttatattttatcttagaactttgacttttgtagatctctgtgaggtactaattaaattctacaaatatttactgagcgtttgagtatcttctctatgcaaggggctgaacgagctggttgagaacaaaacagggaaaggagttaacatctattgaacacctgttaaattttagatcttcatctcatttaatctgtatagtaaatttgttagtaggtacgatcctcattttataccacaggaaacttaggcatggaggagttaagctctcatcacctaaatggcagttctggaatttgaacctaagcccatgctacttttctaacacacaatactgcctcgtgtgtaaatataaattggattcctatttctagcttatagtctagtccaggagttcacaaagtggagtctgcagatggactgctggtggtccctgatttcacttttggttatcacaagttcacaactgtagtcgttcatcagtattcatggaggattggttccagtacccctgctgtgggtaccaaaatccatggagctgaagtcccttatataaaaaggtgtagtatttgcatataatttacatcctcccatatacttcacatcatctctagattatttataataactaatacaagccaggcatggtg

SEQ ID NO: 103836 - DNA, 1717 bp, Homo sapiens
tgggcgacagagcaagactctgtctcaaaaagaaaaaaaaaaaaaagaaactaacagcttttactcaggtagattatggagatcactggttccaagaatcactttgttctttatctgttttccaagttcaccagatcatgacattagtaaaatttattttgaaatctttattatggaacatttgaaacacatataaaaacaaggagaataatgcaatgaaccaccaccatgggcctgtcacccagtttcaacagtattcaggggctgggtgccgtggcttatgcctataatcccagcactatggaaggccaaggtgggaggatcacttgagcccaggagttcaaggaccagcctgggcaacctagtgagacctcatctctataaattaaaaaaaaaaaaagtaaaaaaaaaattttttttttcaacatgtgaccaatcttgtttaatattactccacacctcctccttcatattttaaaataaaattcagacattttgccatttcatctgtaagtaattcagaataatatagtcgatttaaacactagttaactcttggaaaaaccagaagcaaaaattccgtttgtctccttgaatctcagtgtagatgccggctggtgaatttccatgtgctaagccactcccaagacctgactcactatcaaaagcatatactctattgtaattgctgaaatagcagcagtttgttagaatatgttatggtagttaagtatgtttctattggatagagagaggttaccaataagaaaaaactcctatgtcagagataagtttttccatttggagatctgatactttttgatgttgtaaattacaggcctttaagatttgtctggaaaatgaaaatgaaatgtggtttgtggattaatagggtaaattcctgtagttctttatgggtgaattcctgagagtcataattagcagtaaaatgaagagctgaagtgtcagaagcctcggagctagaaagacttctctaagcctagggaggtagacagtttagagcttcggccagagggaaagtcacatggcattagtagtgattatagttagttttattctggaagttaaagttgtaacctagacctctgtaaatagcctagtgtgtacataaaattttctggaggaagggaaggcactattttttcagcaaatattttaaaggattaagtactgtcttgtaaaaattagagattggcactgagtgaatggttggactagaactgtgctttcttgtgatgccagttttttgtgaagaagaaatgaagggggacagaaatgatcataatcacctttaactattgttttttgagatggagtctcgctctgtcacccaggctggagtgcaatagtgtgatcttggctcgctgcaacctccacctcctgggttcaagtgaatgtcctgcctcagcctcctgagtaactgggattacaggcacatgccaccacgcctcgctaattttttttttttttttttttaagtggagatggggtttcaccatgttggccaggctggtcttgaactcttgacctcaggtgatccaactaccttggcctcccaaagttctgggattacaggggtgcctttaactattttttaaaccaaccacataggagagcaagaccttgattctaggaggctacaagtcctagccctgctgtgactgcagccttactttctctttatcctgaatcacca

SEQ ID NO: 103837 - DNA, 1027 bp, Homo sapiens
tcatcagtaaagtggaaatatacttaatcttgttggggtgtggtcaagataaagtgaaatatatgtaaagctcatgagtatttaacagatgtaggcattgtttcctgttactccttccattctgtttttcaaatgactgagtaaaatctctttgagcataactaactttattaagtttctttattaagattatttggccacatgccccagagattgatggtgaaatttattttcctttccttatcaattacaaacactactagaaatttattcttgttcagactttggaatgagaattttttttttttcagagagaattaaatgagtttgctttaggcagctttctgagagctggcagatttggataggagtattagaattgctttcatagtggagtccccacctggaacatagttggcaggaggaagaaaggttatataatcacattccttatcagattttccgtagagtttattgtctcctgaaacactcaaggaagtcccttactcctttcctttcaatcaagaagctgattgtggaataggagatgaataaatgaaaattaatctgactttagcaatttgagaatgaaaagaatgctaaccaccaggcatgtgggcctgttttagcttcccaggaacctcctcagagggcatgacatgttggttgtaagcattaaaacaaacaatcccaacccaaactgtagatgaagcctggactaagtaaggcaatttaaaagattttaggttggtaatggaatatagagatgattttccctggccaaaatcagttttgatgttttgattttactcatttaaaattcttcttggtaaaaaattattctcgatcaatccattctttccagagtaacaagaatgatcttcttaaaaacataaatggaatcacatcacttctctgctcaaaactcttacctgcggtggtttttccattgtgcttagaataatatccagatttcatcccatgacctacaaggtgcacacatactgtatctttgctgatctcacca

SEQ ID NO: 103838 - DNA, 1049 bp, Homo sapiens
attcctaccaacaacgtaaagggttccagtttctccacatctttaccaaaacttgtttatttgataacagtcattctaatgggtgcgatgtggtaatcttacatttttagtattttcatatataagggataacatagtgctgcccctgtggttattatcacattactgtgttccccctgccaacaaaaaagtacctcatattgaagtacttttatttttattatgcagaagagcagggaccttgtccatcttcatcactagtatccctagggctcagacagtacctgacacattatacttgcttagcaagtatttgaatgaatgaatgaatggaaagtagggaggcatggtgtagtggttaagaccaaagactttggcatcaaacagacctgaggttgagtcctggtttcctcatttgtaaaatggatttgatagtgcctccctcataggattgtggtgggattaaatgaggtcacatctacagcacctggtgcactgtaattatcccataagtggcagctattatttaaaaaggtcacctggccaaaggggcatcagtagacttgaagtttaaaatttttcatctgtcactaatcagctacgtaatactgaacaaattgtctaacctctctgggtctgagttgtttcctctgtaaaattaggaccttaagttagatgacaggccgggcatggtggctcatgcctgtaatcccagaactgttgggagggctaggcaggtggatcacctgaggtcgggagtttgagaccagcctggccaacatggtgaaacaccgtcccgtccctactaaaaataaaaaagtagccgggtgtgtagtcccaactactcgggagtctgaggcaggagagtcgcttgaacccaggaggcggaggttgcagtgagcagagattgtgccactgcactccagcctgggcgacagagtgagattccgtctcaaagaaaaaaacaaaaagatgacccctgatggcctgtctatgattttcatttgatccttacagttgttactgtattaactgaaggaattattacc

SEQ ID NO: 103839 - DNA, 1094 bp, Homo sapiens
acctcgtgatctacctgcctcagcctcccaaagtgctgggattacaggcgtgagccaccgcgcccggccccaaaattcttaatttaatcatgcctgcaaagactcctagccctttttgctgtaaaaggtaacattcacagattcccggtattaggctatggatatcttttgggccatttttcagcctatcatagtctcttctctgctcgtctgttccacaggcaaaatacacccatctcattccaacatccccaaaagtctcaacccattgcaacatcaactcaagcccgagatctcttctgtcaccaactctgaagtttaaagtctcattatctaaatcatctgttatctgttcccaaaatacactggtcagacatgtatagtgtaacagttatagataattccggtttcagaagggagaaaatgcaaggaataaatgggttactggtactaagtaatttcaaaatccagcagggaaaatttttattatgtttcaaagcctgtgagtaattttcttttactcgagactctgccctctgagtctctggctctagcttctgctttcatagttatccttcctttttcttgaagagaagcatatatttgcaactgagtagagtttttgcccacggtgtttaaaaattgtgttaaaatttaccatcgtaaccatttttaagtgtactgtccagtggtgttaagtacattcatattgtgaaaccatcaccgccgttcatctccagaactctttttatcttgcaaaactgaagctctatacccattaaacaatgactccctgttctcctctccccagcccctgtgaaccaccattcccttttctgtctctatggttttgattactcttaagtacttcatacaagtggaaccatacaatatttgtcttttgtgactagcttatgtcacttagtataatgtcctcaagagtcatccatgttgtagcatgtatcagaattttctttctttttacggctgaaagagtaaagagtatttttattagcctgattgctgcatgtagaattttggtagtccaacatctttcagtcttcttcttcttttttttttttttttaaagacag

SEQ ID NO: 103840 - DNA, 1045 bp, Homo sapiens
ccctgccaggccttatttatttatttatttatttatttatttatttatttatttatttagagagagggccttgctatgttgcctgggctggttgtgaacttctggcctcaagcagtctacctgccttggcttcccaaagtgttgggattacaggtttgagccaacacacccctcctatttttattttttttttagggacaggtgtctcactctgttgcctaggctgatcttgatctcctgggctcaagtgatcctcccatcttggcctcttaaaatgttgggattacaggcatgagccactgagccttttattctattttatagattcattgaactatttaacattatcttgttgatacttcctttccgttcagatgtttttttggggggttaggagtcctggaatgggaacagggaaccaagaacataatgtatcatatgctagtcatttgagataaatttaaagatttcttttacccagtagaagttcataggatgttatggttcatttgtgtgatatctgtcatgagtctttatataccctgagtcagtggattaatcattttcctagatcagacactctgtagcatgaatgaccctttttaaaaagttaatgttttgacctttacctgaaagctgattcttaaagtgtatctggcaggatcaatatatatggaaaccaggcatgacttatacaatttggacaagctaatcatgacattttattttcaacatgtctaatagcctgttggcttcccaaataacgctgagttaattatagtgtaaccttttattctatttggagagtgtcaagggattttttgaatgccttccaaaattcactttcatgaggtgagcttagaaagcttagaaaacgctttctagagcagggattctcaaaactttaccttcatgatccaccctgcctcttctgggtacttatttggtttccctactgtttagagatagtagtgatggggttgaatgcacctgtttttaatcctggctctattgctcactagctcagtgatcttagacaacaagg

SEQ ID NO: 103841 - DNA, 1134 bp, Homo sapiens
tatcattttactacatctattgcaagttactttctgtgaaatgtttcatatttgatttagtcactaaggcgatataataaataaagcttatctttataagctttatatatggcaatataataaataaaggctatctttatttatatattttatacttataaatttggtgatatttcctaaaaagtatggcctgtgggaacattcagtaaaaatggagtacattgatatatacagattccatatgaagcactttactaactttgttaaacaggtataaactttctttgagagtgcagcttaaatacttatttaagtgtatttaaaaaacgatttgtagatttacagccatttaatttacaaagggaaatttagaatttttaagttgtattaacaaagatcgttgtattatatttcgagaaaacactgtggcaagctcatatactactgtaagctccccaggggtgaggatatttgtttttcttcccagcttcaaaggcagttcttgggacatagcaggtgctcagtaaatatttcttgaatataagatgaacatgaacaaatatatatttactccgtgttcttgtgtgtgtatatatattcacataaatgctagggttgatagttgcaattgacaaacataagaaacatttctttactgagaaaaagctttggtcaggaggttatatttcaggtttttgaaagagaaaagagaaaacattgatgggttatggatgaagtggtataggcttggggagtagttttttataaatgaatacattttggaagaagggggacattgaacaaagagaatgacccactgacacaattcagcaaatatgggcgctgtttatgtctaaggctttaatagagttttgagaatcaaggaaatagtctccgctctcaaggaaattagagttttggagagcgggtgtgttaactgtcttcctgtgtaacagattacctcgaaagttagtgtttaagacaacatttcttatttttcacagtttctgtgagtcaggaatttggaatcagcttggctgagtgattcaaactcaggtctctcaaaaaattgcaataatggctgggcacggtggctcacacatgtattctcagcattttgggaggctgaggcag

SEQ ID NO: 103842 - DNA, 1133 bp, Homo sapiens
gtatagcaaacctgaatgctgccaggtgtacagggctctgcaaatctgaaacttgatggccaagaactttacctcctaagaaagcgtctgtcaggacgctgatgcagtccaccctccccgcttcgggtacctttgatactccatagtgcctagggctggaccttttgagtcgactcccaaacctgccacttgctagctgtgtaatcttgtgccttggtttcctcgtctgaaaaatgaggataatagcaccaatcgcatacggttgtttgttgtaagtgtcgaatgaaataattcacgtgaagcgtttgacacagtgcttggcccatagtaagggcccaagaaatgtttgcttttgggatgttgagaatgcctggtttgcctgtgtgcctttaagcactagcccagcttggcattgtcaagatttctctctgttgtctccctgttatgcagcataacgaaagggcagttgaatggttaacttgcttgccagcctctgtttggcatgaagtgtgtgtatatacaggaatgtggaatacatcacttaaatataataatggaattaccccatgcttcgtatgtttttacatagttttaaactcataagacgtctggaatgtccccgagttgcaagtttttgagatcttttcagggtcctttctacatcaagccgaagcctgtaacgttaagacttattgtcagtaagaagttagacctacatgttttacttcagaagacccccaaaactccaaatgtcacttacgcagttttactgttgaaaagcagtcatctcccgggggtgaggtggtacagccagctggcccacagccctatgactgcagggtggggaacctttggctggaagttattaaactaagttttgcttaatgtcgtttgcatttttcatagcgaaccaaagggctttatgttactgtttcttattgaaatgatttagaaagaagcaatccattactgcgttctttaaaaacacctgcaaagaaaaaaatatctgtagtttagctctagtgtttgtttcagtttttggccaataactattaagaagagcccgtttttaagaaggcttccaaaagtcacatccacttgaataagttatttagagtcaaatcaagagaggt

SEQ ID NO: 103843 - DNA, 1265 bp, Homo sapiens
aagtactttgacaacagaagtctgtgttgaaatctaaaacctctattgcttgttcttatcaaagtagctatctaggtagcatgttctctgatgcaggagctgacttctgttttttcaaacctctttccctttagacgttttggaataatgggactctacaaaggccttgaagccaaactgctgcagacagtcctcactgctgctctcatgttccttgtttatgagaaactgacagctgccaccttcacagttatggggctgaagcgtgcacaccaacactgagacgccttcccatgaaaaattccgaagatgctcaagagggaggtttcctcctgagtgaagagaagtgattctcccttgactctggctcctgccaccacaaatgttaccctcattggcttgaaaagcatccaagggtgcacagggagtatggccaactggacctgttgtcaccttaattgtcatgctggctggttggattttggggtggcagttggactaatgtgaaaaaaacattgctgaaaacctaaaaatgaaagtttgtgagtgtttattggttttcttaagagaaatggactattttgctctcatgtgtaatgttttctatttaaatctttcttaaatataccagctgttctctttccctgaactctcccccaggttctaggacaaatttaataacatgtaattctcctcaaatacttttgtatgtctcagtgttggtgttttcctccctaaaactaacattagggctgtgccacgggcatgactttatttttgttgggcttttttttccctgcttaaggagaggtgtcttttttggatatgagctatttattttgtgaaatgaaaattgttcacccaaatgattctcttataaactatttgtaaatgtcacttattcattagtgtttgacataatttttagaatatttattttgaatcaatcctttcattacgaaagacttgaagttttgtgtccattcttacaagccctggtcagtcaagtcccaataaatggtcagcacaaaaaagatattcttgaaaattgctctttattaaggtattacgttgagtttgcaaccagatgggaaaaatcacaaaaatgagaaggggagcagatatcttgttgaggtctggatattatctccctttataaacttggtgtaggccgtatattttgaaaataaacatctggttgaggttatttcatttggaaaccttccttagagtcctgttgctcagtgtggtccatcagacggtag

SEQ ID NO: 103844 - DNA, 1986 bp, Homo sapiens
acccaggaggcggaggttgcagtgagcggagatcgagccactgcactccagcctgggagatagagcgagactccatctccaaaaaagaaaaaaagaggtaccattttagatagtatggtgttaagtcaagttaaagctgtctctacatattttaacttcagtgctgggaatggtaaaaaattaaaaataaattagccggcatgtgcctgtaatcccagctacttgggaggctaaggagggaggatcacttaagcccaggagtaggaggctgcagcaagaccatgtctcaaaaaaacaaaataaaataaaataaataattgtaacagctaatggaataaaacaggtgtgaaagtgaattcctgtgttttgaaattgtaaagaataaaaggaataatcacttggtgattggattagattagtggttctccactgaggctgattttgacccacagggtcaaatgtggcatctagtgggtagaggccagggagactgctaatcatcctacacaagagcccacatacacacacaacaaataattttccaccccaaaatattagtactgtcacagttgggagactctgggttaaagaattttacaatcctttgttaattgtgagattctctgattgtaggtcttctctttttctgaaggttgagagttccttgaaaattacttttgtgagttttaaacttctcttcataacaagtttttatatcttaatatgtacatatttttataataattataacagctttcttcctgctgtgagtattataatcactgtagaaatgagttgtatcatctctaaggagaactaggaacagcgttgttgctcttcaaattcttcttgaaacttagaaatttattatttattgtattttcccagaaaaacaagcctataaagcttcatatcttggggaataatgtgggaacagaaccttaacagataaatgaagagacacttatttttatgaaattggaatttttagcaataactcttactgaatgccaaaggtattatcattgttgtgatagttcaaaatgtatttcctgccctctggccttaaatctggcaagacaggtttgttcctgttgtgtgtaaagtttcattccttcctacggagtcaagtgagatttgttagatttgtgcctttgttttgccattttcttatatccatggtcattgcacatattttccagaagtgcatacccaattagcctacttcgtttgtgttttctctccgtaacaaaggagactcactgctgataaaactaattgttttcaagatttcaggagtaaatagctgtgttctaattgttccttgatttagtgaataattttagtgtgttcaattactgttattcatctcttaattttggtttattctttcttgtaaatgatttgttacataaaagaaagaaagaaaatagaattatagacattagaattagaaaaaaaacagtcttctgccctttggtaggtaaagtattaatttgtatttctactttagagcggaagtagcatccacagcttggaactggcggaagagttgttgttgttgttgttgttgttgttgttttgagatggggtctcgctctgacacccgggctggagtgcagtagtgcgatctcggctcactgcaacctccaccttctgggttcaagcgattctccttcctcagcctcctgagtagctgggactacaggcgcccgccaccgtgcctggctaatttttgtattcttagtagaaacagggtttcgccgtgttggccaggctggtctctaactcctgaccttgtgatccacccgcctcagcctcccaaagtgctgggattccaggcgtgagcaaccgcacccggccggaactggcagaagagttacacgggcttacaaaaaagcagacaattttctttatcctttgggcctgtcaggagttggaattggtactcacgaatggtttgtggcatgcttctctcagtggaat

SEQ ID NO: 103845 - DNA, 3838 bp, Homo sapiens
aggtaagacttggaagaaaaactttggactttgtatcattaaggcaattctttcataattctgtgtggagacaaaggttactctcatagctattttttatttatcacagttaccaaatagctaattatgcaagagtgacatttattttctttatgcagagtgagtaacttaaatttttaaaactaggaaatacttagcaatcggcaattatatccagttgtccttttctttgtatcaaaattgtgcttttttcatcatacagttcaaatgacttaattcagcttgattttgatacttcaagcactcatctaaaccccatttaacttaactatcaccaaattacaggtctaaataagagatggaatttaggataataaacttactgacccagtaggacactttttaaatactaatgaaccctttcttttcaggatccagaagttatggtggctttccaggatgtggctcagaacccagcaaatatgtcaaaataccagagcaacccaaaggttatgaatctcatcagtaaattgtcagccaaatttggaggtcaagcgtaatgtccttctgataaataaagcccttgctgaaggaaaagcaacctagatcaccttatggatgtcgcaataatacaaaccagtgtacctctgaccttctcatcaagagagctggggtgctttgaagataatccctacccctctcccccaaatgcagctgaagcattttacagtggtttgccattagggtattcattcagataatgttttcctactaggaattacaaactttaaacactttttaaatcttcaaaatatttaaaacaaatttaaagggcctgttaattcttatatttttctttactaatcattttggatttttttctttgaattattggcagggaatatacttatgtatggaagattactgctctgagtgaaataaaagttattagtgcgaggcaaacataactcatttgaggataaagtttgtgttggatatgtggttcctgatgcattttgacttgtctttttaaatgctttatctttttctttaaagatttatttcaataaaactaattgggaccacccgtatttcagtaggacctgggtagggattggaagtacttggcagggcagcagcaatcttgctgtgtttgatataacatgcatccttgggcaggttgcccttaaatcttacactgtggtgaagggatgttttttttgtaatgctgcagtagagttggagtacttagttctcttgttgtccagtatatctaataagtgtttttcatattatttccacgtaagggaaataaggtagtacttttctttttatatttctatgcttaaaattctctttcctagtcaaaaattgcccaaatctgtgtttgctttctgcttgctacatttgtctcccttacttttcttgagctaaagacaggctttttccaccggcatcatcactgctatcatcattaacagcgtaattatacaagcatatttaatgctgagtttaatttaatatgtaatacatatggtaattgtagggtaatacccacaacaactgtagtttcttacttggccaagagaatgcttatttaagtgttagacttccattctggcaaaatcttgccttatcagaagacattggaaagagggattccctttggtgtttggtcttctacttagaaaaacctattgcagttagtttatcttgtagtattcatctttgtattctgaagataaggtttgaattaaattgatacacacagaggggaaccgattttttttatccaatgtgaattataaatgagataatccacagttattcattgtggagttgttgagactatgaaagactcattgtctttgtattcagctcttaaatagtgtaactatatccccacctctgcttgctttctttccctcccctccaatgataaagaaaatgataaattttctgttgtgcattcaattcttattttaaataagactaagtataggcattgtacctgacattgctacgtttctaccagtgtttcaatttaaagtgctagtgtttaaaaacattttcaagggataaggccttctgtactttgcttatttgaagaatcagtggtaggagcagtgaagtaaattctatggagtacatttctaaaataccacatttctgaaatcataaataagtttattcaggttctaaccctttgctgtacacaagcagacagaaatgcatctgttacataaatgagaaaaagctattatgctgatggagcatgctttttaaatcctttaaaaacactcaccatataaacttgcatttgagcttgtgtgttcttttgttaatgtgtagagttctcctttctcgaaattgccagtgtgtacttggcttaactcaagaacagtttcttctggattccttatttgatttatttaacctaattatattctaatattgcaaatattaccataagtgggtaaaagtaaaattcctcttctgaaaatgtgtcctgtgcttttagatttttaaattccataatatacattcttaattttcaactcaatattctaaaccagaaatgttttcttgtactgatgctatcagaaggaagttttttctgcttaaaaatatagttatatttctagctgtctttaaaatacggtttcaaactagatattgggcaggtgcggtggctcacgcctgtaataccaacacttttgggaggccgaggcgggcagatcgtctgaggtgaggagttcaagaccagcctggccaacatggcgaaatcccgtctctactaaaaatacaaaaactagccaggcatggtgttgggcacctgtaattccagctactcgggaggctgagtcaggagaatcacttgaacctgggaggcagaggttgcagtgagctgagatcacgaaacacagtctcaaaaaacaaaaactagtttttaatttccccccccacccccgactttttgtagcatatgttctattttatgtctctggtactcaggttatttactaggtatattaggctgcagactattaagtgctgcaaacaagaacccctaaaaaacatgtactttattttgggtagctgttcagaggcaggcattctgccatacttagaaggtagcttccatttctagtccaaagttgcttgctctggtgctcattctccaattgaggaaataggagaagggggctctgggaaacacgctgagatactgaagataatatatgatgttaacattttattacttctaatatcccattggtcagtttgtgtgttcaggctatgtttagctgcagggaaagccagtttgtcatccataactgtgtgatcacatgctcaagaaaaaacttaagagtagaaacaggaaagacgacttggggtgacacctagcagtctaccatactaggaaatactagtttgataagataaaggagaaacaatttcattttagagatttgctgatgactaaaattaatgcacctgagtaggcacaggtaagtagtgtttgtgccaagccctgttataatcagtttgcaagtattggatcaattctgataatgaccataagggtagatactgttagcaccactttacaattttatagataaggaaactgaagcacttaataagtaaattgcccaggataacacagctgattatttgtaaagctgagattcttgaatacagaggtttgtggcttcaaagggctttctcccaaactctgtactgtgctgcctctgtgtacaaggttgattcttgcagaattgtttaaggaactgaaaactaaaatgtacatttgaataaggttggttaaataagg

SEQ ID NO: 103846 - DNA, 1424 bp, Homo sapiens
aagtagaacattccagcttttaaggatgatttttatctaaaattgttggttaaaataattttaatgtgtttacatggtaaatccttcattttgtgggaagttcagctgtcaagaatttactctcagagattttaagatagtgggaattgtattgaatttaattatttactgccagagagttcatttggttttctgttttcttcttaaaatagggcaaagttgtaactttgtcagcaaagtgtaaacaagctaaagtgacagttgaatatgaatctcttaaatgtattttattctctgaggaaataacatccagagcatttatttgatactagtgtctggtatacatatttacatttttccctcttaatccctatagcaatttgataatattaaatatttcttcctctcccattttatggatacagaaacttaaatatactgtggcatatacttggggtatgagttcccagtctctgccttcccacggcagacatccgtaataatactcttcctactgaattcagctgtccgtctgaaacctaaacactgtgtatctgatagaaactagcaggcaagaattgtcatgcacttagaaacctgtttgttaatctttgagcttaattgtttgagattataacatttctaacttcaaatcccaggcccctttactctgttttacagtgcctcatgcagttgaggttggttttcttaaaggcttagcttgtgttaggtctttttgtacaagacaaatctgtcatttttctgaactgcatgttgaattaaacatctctctacaaagaatatttgtgttgatgttattcagcttttggagcaagcttattttgctatggctcttttttctaggcacagaaaattgcagaacatcggagaaagtatgagcgaaaacgtgaagagcgagagatcaaagaaagaatagaacgagttaagaaggctcgagaagagcatgagagagcccagagggtaaatttcctatagctaagccatgaaaggaaaatacggcaaattatgtagaggcattaggacactaaaattttaattcctggctcttttatttaatgctggctacagttctatagagtaatgatattacttatggggagtctcctttcactgtatctaatttgggggacatttttagtcttaaattattcagtgagcttttatttcaccattttatattcttgtttgtgtttttataaaatcagttgtttttccaggtcaagtaattgaaatgtgacagtattattgtttgatcttttgaggatgcttcgccagattaattaaatttatgattcctcctctcttccaacagtggatgtgttgctatttaaaaatgattctagcagggcaaggtggcaagtgcctatagtcccagctcttgggaggctgtggtgggaggttca

SEQ ID NO: 103847 - DNA, 1222 bp, Homo sapiens
gccacacagcttcttatttctgtttgtattcaggtttaggatttgctttatttccatttttctgattttattttttgagtatgtaaagcatttaaatgttcgaagagttacacctgagttaaaaggtatacccagtgaattctcagttttcgttgctgtctcctctgccccattctcacctactgtcaccaacctttagtttctggtttacttgttctgagtttttcgtaaagcctgtacacatgtattattttctcttctgtcttacatagaaggtagctaaaagctaacacattatgttagtcctggtttgggcgagttgaaagttactggtctacatacttagaaaattacgatattctgaattaagaaagattttgtttgttttttagcttttagtagaaaagcagctttaaatagaggaaatttaaatgttttcaggtttttatagagttaactaaaatgggatatagtaattgaattggttagtgaaagtttatagttaatatttaacttaagcctgttttagaacaatccttttttgtaaggaagaaagatatcatgccacataggtgaatatgtataaaaggctcctaaaatgagtgtaaatctgtttcagacttctaggccactgggaagaagcagcccatgatcttgcccttgcctgtaaattggattatgatgaagatgctagtgcaatgctgaaagaagttcaacctagggtatgtcaaagtagagaaagggaaagtcattagttaaatactccatcgctgtagtgcttagcccccgacagctgtaattcatctgaaaaacaggcaaagaaacaaaccattggaagatataatctgtaattgctgaagtttgtgctcgactctggagatctcattaggttttcatgctttcatttctcatgcattattagagcaaactctgttactttgtttggaagcctgcagtggaattataaccagaaaattagaaaagggggtatcaggtttacaacaaggaaacaaatagaaaatctataattagcattacccaggattgaatctgatgtgtccttatttatcataggtgtgtacaaccactttataaagcaagaagaccttgtggaagttaagaagtttcaggctttccggccaggcgcggtggctcatgcctgtaatcccagcactttgggaggccgaggcaggtggatcatgaggtcaggagttcaagacca

SEQ ID NO: 103848 - DNA, 1056 bp, Homo sapiens
cgcccagctaattttttgtattttttagtagagatggagtttcaccgtgttagccaggatggtctcgatctcctgacctcatgatttgcctgccttggcctcccaaagtgctgggattacaggcgtgagccaccgtgcccgtctactttttccttaaacaagatcaatatgggtcatactaagaatgtgctattctattgttagttaggggcttacgtactcagaaattgtcttacctcgtgagttacagtataggtgtggtaagatttgctttcaagagccagttttagtataacttagttgtcttttttatttttacttgattaaaagaaaaatgtaaaagacttaactggataacagatcaaaactttttattaatatttttatcctctgaatatttctcgataacttttgtttcactttaggtgaactccagaaagccattgacttattcacagatgccatcaagctgaatcctcgcttggccattttgtatgccaagagggccaggtgagaactctaaacagaaaagcatcccctggcaaataatttctgcacatttgtttaaatagagttgcttctgtgttgatcccaaaacttttactgaaatgaatactttttaataacacacttatttttcagtgtcttcgtcaaattacagaagccaaatgctgccatccgagactgtgacagagccattgaaataaatcctgattcagctcagccttacaagtggcgggggaaagcacacaggtaaataattgaatttaattattttcagaactctttacatttaaatctgatgttttaagatgctttgtttaaacaaaaacacaaaagttcctaatgacttaattttcaaattagtgtgtacttagtatcaagaagtgagatagcttgtagacagctgcttaaaaggtaaaagaaaaaaaaaagaaatttaaaagaagaagtgagaatataggaaggaagaaataaaaagtattttcatttttttcattcaaataaagctactcttaccagtttttgactacatatggccaaatataaggaaag

SEQ ID NO: 103849 - DNA, 1009 bp, Homo sapiens
ccaaagtgctgggataacaggcatgaaccactgcgcccagcctctttttttatatatatttatttttttaactctccaaggtaacaataggttattatttttttcttttttctgtttttcagttgtattttattttattttttatttttgagacagagtcgtgctttgtcgtccaggctggaatgcagtggcgtgatctcggctctctgcaacctccaccccaagtcgagcaattctcctgcctcagcctccctagtagctgggattacaggcgtgtgctaccatctccagctaatttttgtatttttagtagagacggggtttcactatgttggccaggctggtctcaaattcctgacctcgagtgatgtgcccgcctctgcctcccaaagtgctgggattgcagacgcgaaccactgcgcccggcccatggtagtattaagtgtaatgtttgatcggttataatttgtaagaacaaatcatgtataaacttgggtactgtggctgcttgagtaatatttcactctttataacagtgatagtgtgtcacaatgccatagttgactagatgctattgtatagtgctcatgtgcatttggacttcattattagatttagaagatgattgaagttatttttagaatgagttcagtattgatgttccgagttagtatatattttaaacattttgtgattctaccacctgattaatttagctccttaaaacatgtttatactgttttatactgcagttgccttaatagtttaccttcctgaaaaatttattcctttattgctttctgtttactttccctaggttattcttagagctgttttttattctactcttgcttgtaacctgtgattaacttttgcatatatatttaagatcttcatcagaggattatagacctgccagactaagatcctgtattttacttctccaatcttgttttctccagtcagactttactgttctagaattttttttttttttttatttatgcta

SEQ ID NO: 103850 - DNA, 1228 bp, Homo sapiens
tcacccaggctagagtacagtgacacaatcaagactcactacagccttgacttcctgagctcaagcgagcctcctaactcagcctcctgagtagctgggaccagatgcatgtgccaccatgcccagcttgtttttttttttttttttcttttttttggagagatgggatcgccctctgttgcccagatgcacatgtttttgttcttaactaatctttatactgtcagcatcttgtacagtgtttggtctatctatatagcataggtgctcaatagttgtttgtgggaacaaaggaatgagacctttctcttctgaggatttaaacctaaaaggagctagttatctttttgtgaggagattgggtttaatatttatggatagctaggtaggagctggtatgctttggttgggacggaaggttaagcaaaggttatgtctcgggcagagtgtaggagtgaaatttgtttagtataaaaggttaaaactcgtatgtaatttctcactaatgagttatcataattgtctctttgttctctggagactacagaagaatgaatgaaaatgggtattgtgactgcgcctcatccctaagaaagtatgaattgcttccttctctctctctctactaattctaagatgatttttattttcttcctagataacggaggagatgatggatcaggcaaatgataaaaaagtggctgctattgaagccctaaatgatggtgagtaatctttttgctacatttctatggtagtcagaatatttattgcagtaacttaaatagtggtaaagtagaagagaagttacatgtacctgtcctatactggagaagatagtgtcctattatccagtcaccccttcctcattgataaaagaggctgaaatcacttctctctgcaaggacagatccttatttgattcagtgtctctgatttcctgaccctatcgtggtgtttttctgctgagaagaggctttaaagaggtgaaaggctttaaaaaaaaaaaaaaaaagtagtagtagaacagtgacccttaactttttacatactaatacccttgacagatgatgttcataggcataccaatcttcgtcctagtcagagcatgttagattctcttgagtaaatcccctcagagtgagaaagtggtgatagtattcggttttgttttttgtttgtttgtttggttggtttttttgagacggattctcactctgttgcccag

SEQ ID NO: 103851 - DNA, 1019 bp, Homo sapiens
ttatttgtaagtcttttgctctttactcattttcagaatttacttttattaaacacattaaattccttgttgaactcttcgctggtcttactcttatttttcatggctcttgctcattaaggtaccttgtttactttatgatgtgtttgtgtgttgtgtgtgatattttgaaaatgtgttctttggaacttcacctgtagaaaaattttgaggcctaggtaagaaggtgattgcttccatgaagtctctgaattggtgctaccaactcaaggaccccttgaaagtctcagcatggtgtttttttgtttgttccaattactttggtaatacagaattccagatgaaaggctggctgtggctctgaattttcaggggaagttcttttaatctcactactcaactgtccgtttctgtaggacaggtttataccattatgcttgccggtattagcatttggagttgcagatttattttggaaggtgtctggttagaccacatacattctcttcctctgaatatagactttgtatcctgtgtcctgcattaccttcaaaataaaattgcagccaggagtggcggcttatgcttctaatcccagaactttgggagagtgaggcaggcaactcacttgagtccaagagttctagaccagcctgggcagcatgatgaaaacccgtctctataaaaaaaaaaaagcaaaacatttagtaggttgcgagcatgtagttccagctacacttgaggggaggctgagcccaggagatggaggttgcagtgaaccgtgattgcaccactgcaccggagcttgggtgacagaggtagaccctgtctttaaataaaacattatttttatatttaatatttattttttctttttattttttgtagagacgaagtttcgccatattgcccaggttggtcttgaactcctgggctcaagggatctacctgcctcagcctcccaaagtgctgagattataggcatgagttgtatatttttttcctgtggttaaagatct

SEQ ID NO: 103852 - DNA, 1180 bp, Homo sapiens
ttggacaacatagtaagatcctgtgccccccccaaaattattttaattttaaaaaaggaaagtaatgaatgtaattatattaaaatattttgatttacgttgaagtatcactgtagcttacctgcatatttttgaaaaacatagtacatcagtgtgtagaaaaaaattatttgaactaaatcagtttgttgacaatggtgtatttatatacaatgactaaatcagtggtgtatttatgtgtaatactagaaactgcacatgtcaacaaccccactacaacctgataataaatatcttacatgatgtgacagttaacgtaaagtgtagtcttaccaaagtaacgaaatgtttaatgggaacatattttaaaatgcatcaatacttaaaataattaattgtagtagtcatagtatgtcagtttttaataatcttgggagtggctactatattgtacggtgcaggtcttattgtcattttctcgactttggcagaaattgataaagaaggtgtgattgaaccagacactgatgctcctcaagaaatgggagatgaaaatgcggaggtaagttcggtgacttgatttcctgcttgttctaagaaatgtgaaaggtcctgctgttgcaatgattttatgacacgattcttccaggaaaagcgcatagtaaatctttctctgacttcaggcgttttaggcaagcattgtattttactacttaaaatactaatgaaaataaatactgttactttctgttttatctgttttttaagtttgcatctggtgtgactgcttgcactgtaacgcagaattcacttaaaatacatacctattagtggagttgctcttgatggaatatctaatgccaaattgtattacagaatggtttgtcataacaggccctcaagggagtgaaaattggttcttgggaggagggcttaaaaaaaattctatatattacaatggttagtggtcctccaaagactcatagaatattaatatgtagtgtatctgtggtattaaaattggggatatggaaatgaggaaaagatgtctaaaaaggctccttagtgtctgataaaaatttgagaaacactctaatatagtaatagcagttttaaaagattggtttttatcctcaaaacttgatattatcagatttcatctttgccaagtattgtggga

SEQ ID NO: 103853 - DNA, 1053 bp, Homo sapiens
ttgtaaagatttttactaaatttggcaataaaatataatgtgagtggacatgaggctatttataatctctaaactgtttattgtcaatgttcaaactttattttgaacagttgtttttttatttttgagacacagtcttgctctgtcgcccaggctggagtgcagtggcatgatctcagctcactgccacctccgcctcccaggttcaagtgattgtcctgcctcagcctcccaagtggctgggattacaagcgggcaccaccacgtccggctaatttgtatttttagtagagatggtttcaccgtgttggccaggctagtcttgaactcctaacctcaaatgatccacccaccccagcctcccaaagtgctggaattccaggcatgagccgccatgcctggccatatttgacagtttatacatagatttgtagaaattagtataaatattcggtatgttattaaatactgatagtactgtttgtcttccctttgctaggaagaaaaacctgatagtaagaaggtggaggaagacttaaaggcagacgaaccatcaagtgaggaaagtgatctaggtgaggagacggtagttagtttgtatttgaaaacctatgatgtgatactttgttgatttttattaaagtgacttaaatcagcactgtgtaatagaaatataatggcacatatgaaacttagaatgttctagtagtcacattttagaaagtaaaaggaaacatgaaataaattcagatattaatggcatattggttgaaatattgacatgtgtaatcaatatttttttttgtttttttgttctttttgagatggagtcgtgctcttgtcacccagactggagtgcactggcacaatctcggctcactgcaacctccacctcccaggtttaagccattctcctgcctgagcctcccgagtaactgggattagaggaacctgccaccacactcggctaatttttataattttagtaaagacgggctttcaccatgttggcaaggctggcctcgaactcctgacctcgtgatccacccacct

SEQ ID NO: 103854 - DNA, 1142 bp, Homo sapiens
gccccgagctgggaccgaccctccggctccacgcccttttttttttttttttttaggtcccgggcgttgagctctactcagtgcacgcagccacacaatatgctcttggacgtcgccccctggaggggatgttatctcccgcctccttgaagtcgcccatttctggggttgccccatccagggagctggttcctagttaagaatatgagaatgtatgcgcagggaggcaggcaacagcacgaacagccacgcttctagaagattctagggagcgcgcaggagcagcgcagagggagtaggaatgagcaggcggaggacccgaggtcacgagaccgttgggtgggaggagccagcggccggggaggttctagtctgttctgtcttgcggcagccgcccccttctgcgcggtcacgccgagccagcgcctgggcctggaaccgggccgtagcccccccagtttcgcccaccacctccctaccatggacccccgcaaagtgaacgagcttcgggcctttgtgaaaatgtgtaagcaggatccgagcgttctgcacaccgaggaaatgcgcttcctgagggagtgggtggagaggtgagacccaggcctgaggaccgttgggggcgggggaagcacggccccaggggggagccaggctggacctggctcggtccggcgggcgaggcggggtcgctgccccttctttgcccgggaaagggaggcaacttcgaggggtcatggaagatcgcgagccttgggtagtacaggagccgcggggagcaggaggcagagctgggttcctcgcaccctgaggttgcccaggggtgtatcttgggcgaaatacaaaaacaggactgcggatgcgtggacactggagacgcgaggagtgaaaactgcaagacttagattttgcgtggggttgtttttctttcagtcttgtgtgccctgctcaggtctcattggtacatagcagttcctttacgcactattcctttacgtcgtgttataataatataacactagtaagttaaaagttacaaaactagtaagaataaaaatgataactgtaaaaatgattgtttttaccttacagcgtttgtagctgcgtaggattaattatcttgagaatcacttattatacctccg

SEQ ID NO: 103855 - DNA, 1046 bp, Homo sapiens
cattcaaaaaaactactaaccaaatgtccacaatcctgctaaaagtgttgaaaagctcttagtatagtattaagtgttatctacaaaatttgtgattaaccaaaacacacacaattgtgttcaaatgttatatatttgaagagtcaatttaacaattccttttggtagacttcttttgcacctctttacgcttcttttttttcctcttaccaccctctttgactcctgctgagaaaatagggggatctctgttgctggtaacccaagatatacctccctcatcattgtccacgaaagtatattgagatacatgtttggagctgtgagaatttggtgaatagttgttgaatgactgtgttctccagctgcattcttttgcaaagccctcttcattggccacactatttacaagaaaaaatgtcaactctccattatcttcagcttctctttcttgatcactttcaataattttctttgtattaatatttctgccattaacgattttgtctgaagttgtaacagatatgtagttgtccatcccactattatcaaaagccagggaagagaaagaagtaaggccttcatgccccaatgaaccctgtgatgtatatcctgtatcatatgaagaaaatttctcaaaaattggatattcactggcagtggagaaaaagtatcctgcatctctgtttctgtttccataggagcttcctggacgatttaacaggtcctcaagcgagtcttcaaagaagtgaaaagaaaatggatccctttcatgaaaaatttctttaaaaacatcatctggcttatggaatgtgaagccgtactcacattcatcatcaaaatgacttccacctccgtttaatccttctgtgccatatttatcataaatgtcccgtttctcatcatttgataatacctcgtatgcctcagctacttctttgaattttctctctgcttcttctttattttctggatttttatcagggtgccatttaagtgccactttatgataagcttttttaatgtcctcaggtgaagcatatctt

SEQ ID NO: 103856 - DNA, 1080 bp, Homo sapiens
gactttctagatctattgtttcatttcattctctttattcttcattcaggatgtatgttgtgttcacagcgaaggtactcccttcagcctgtcccagaaaggaggattccaaaccgatacttaggccagcccagcccctttacacacccacacctcctcagaccaggtaaggccttttaactgtgctatctccccatttaggttctgtctagagcaatgctatgcaatagaacttcttgcagtaagctctggatctgtgctgttccataaggtagccactaacctcacatggccattttacactaataaggttgctagtacagctgaggagctgaactttttattttatttaattttaattaatttaaatttaagcttaactacatgtgggtactggtgctttattgacaatactagtctagaacaaggtttaaatatgatagaccttataattcagaataattaatgaaaggtatgtatttcaggatgtttttaaagcaaagttctatttctaagtcagcttttagaattgtatactattgtgaattactgtgttaaagacattttagaaaacatgttttttcttgaaattatcaaatatttactttaaaattataacctatttctatatagattaagcaagatttccagatttgtttgtcacagatttgagaggtagtatcccagttgataaaggtgatgcaaaaaaatgataaaggtttgttttactaatttttttttctgctataagatcccagcgttgctgccagaagatgtcttataactattgctcaaatttagacctaaaggttttttgttttgatttcttgcacttaaggggtgaactatgactaatgaatatctcagagaggaaggtagggtaaaagcaaacacattgtagaaaaagcaatcaggttttcaaggaaaattaattgttctttctgccataagaaattaaatatgtatttgccatataagcatatatattactaatggaaatttacctttagaaatatgttcctttttcactatccccactcagtgaatgataccagtatgtttctcagtgagggcttcctt

SEQ ID NO: 103857 - DNA, 1050 bp, Homo sapiens
attatctcatttaatcctcacagctttactaggtaggtaccataaagatccagtattacagaggaaggaattttaacccagaggttaacttacttgccccaaaccacccagttactatcattcctgaacagcatgttcttctttctacttcacaggcatttatattccagaggatgacaaagatgccccagagaagtttcggggtcttggtgtacgaattgaggatgatgtagtggtgactcaggactcacctctcatcctttctgcagactgtcccaaagagatgaatgacattgaacagatatgcagccaggcttcttgaccttcactgcggcccacatgcacctcaggttcaaaatgggtgtcttctggcagccctgcacgtgtgctttctgagtgtctctgtgtgtgcattaatatatgcattccatttgggagcatagcagctgtgtgaatgtatgtaattgtgtgtggggggttttttgttttaagtagttagaagtctgggaaaatgaatttttgaatagtatgttactgcagctttggtaacattaattctatagaattaatgatcagagcaagtttaatttttaaacataaaggtcttggttacacatgtccatgcattccagttaacacatttaaacatatagaaaattcacttcttctttcaagtccttccctttctatacttttgctgagatcaacccaatatcataagaagtttgtgtgatgcctgtatttttagctaattaccaaggtctctgcctatgcaaaaattcatctttcggtgattgtgggcggccaatacataccttctgtaactcctccctacctattctagatcctgcatatctactggagccatatgagccctcaggggcactggtgtcctgcagtcttactagtcagccacagtccaggttccagcaacactagctacctaccaaacaaaacacttctgagcttttcttgccatttggttgcctgggacctggaaagtgtttagattcttgataaagatggaaatggaagagaaagaaaattata

SEQ ID NO: 103858 - DNA, 1058 bp, Homo sapiens
aaaaaaaataaaactataaaacaatatagaggggtatggtgtgtgtgtgttactttagaatctagagtttacggtctatttagtataaacagtataaacgtgagaccatctggttttacaaaataatttacaaagtattcattagctgctgtcacaaaatcatgatagcaaacttgaaatgattttatcagtcttatagaggaagaatctggtggatttgatccagcctattaaaaggttggcacaaaactgactgaaaggtctccagaaagtccccataacactcaagactgtaaactgtagccatgcacattttatgaaggatgaattttgtggggaaataggatcaagttgcaaaattatgaatatttgacctttgtcaaccatataatgaatcgtaagtgtagccatctctctctccctgttaggaaccatctttaaaatctgagactgtctatgaggagtacctttaacatttctcacgttctggcaggcacaaaaagatactttgtatggcacaatggaacaaatttgagggggctgagtggtaagtacatatgacttgtagaaaaaaaattattatacatcctttaactatgataagaaaaatatgtacagtgagccaccatggctgaccaacaaacatgaaatttcttataatgggaatggatttctaatccagttgaaatattttatatcaaatatttcaaaataagctataatttgcagcatatacatgtattgttagaacagtcaccctgctcacagactccactaagaagtacttcatccacaaaagtcgtaagtatccagcatatgtaaagcagagatctgggctgtctgaggctgcatctggaagcagccctggcccagtcttgagcccccatgacacctatggctagcagcccttacacatctgaaacaccaaccactctagctaaattccatgacatccttgtctttcatgtgacactgtgctcaacagctgccactgaagtagatgaccaaatggtaacacctctccttctccatatttcagtgagctcttgaaaaataat

SEQ ID NO: 103859 - DNA, 1989 bp, Homo sapiens
tcctctcacttggagggatcctcgctgaaccgaggcctcacactgcctggttagagtctggagtgtaatgcttggctcttctgagacgtctgttggcttttcacacaaccaccccactcttgggttctctgtcacgtccagaatctcccccttccaaaataataataaaaagcatggtggaacttgttaagaaaatccgagcccaaatcctgtggcagttagggagggttgagtactagtcgcgaacgacttggtaagcgtgggaaagcaaaaatggaacgtgtctttttgcatgaaatgccttttagtggtttgccacagtttgggagaacagtatcgattctcacctaacatgaaagctgttcaaaatggagattctaaaatagggaagatattcctagaacatctggctaaacactgacaatatcccccgtcctagtgctttttggtgtctcattgtggccactgctgctcagttacagccagcagccatattgaaaaataatagaagtaggggcttttcctccaccttgaagctgtgatgtgaaaagtggtaaagaagttactaggcactgagaatggggtttgaaagcgaagaaggtttgggagtatttgtaattgaggaagccagagttgaatgaatgaaattctgttaaactcttactggaattattatcttaatagaagagtctaaacatataaaagttgagaacatcagtttattttatggtaagaatcaaaattctagtgaattgtagaatttgttatgaagtaatctaagatttaagtgatgaccttgttctgtgtactgacacgggtatttaattatccagcttatcccatgattacccattttatgatccagtcattatcttagttcattctgttctctagctttcacttcattgctcatgcttccagagctgtgtagagcagatacttattcagattttgagctcttctgcaactgccaccaaaacctgcacagaaattcaagtttgtgccctttttttttttttttttttttttttgagatggagtctcactctgtcgcccaggctggagtgcagtggcacgatcttggctcactgcaacctccgtcccccagattcaagcgattctcctgcctcagcttcccaaacagctggtattatagacacccgccaccaggcctggctaatttttgtatttttagtaaagataggattttgccatgttggccaggctggtcttgaactcctgacctcagtgatcggcccgcctcggcctcccaaaatgctaggactataggcgtgagccactgcacccggccagactaaattattttaaactataggaaacaaattaaaagatgacattaatttctgtgttcatatactcagccttttggagaatagaacatacgtgtagtctactgttgtctttggtataataagattaacgtaatatccaaaaacttttgtttggtggttccctgtggccaaagagatgataactgcagctgcagcctgaggtcctaaagagtatgtgtgtgtgttacaagcagaatgcactgttccctctttttgtctttgcagtggaatgcagtagccctctgggcctgggatattgtggttgataactgtgccatctgcaggaaccacattatggatctttgtaagtaattggaggaggatgggaggaagttgagaaggttgcagagattgtggctatcttgatgtgactgattttcttcttcacacgaggagatagcaagcctactctgagcactcggtcttctgtatctagtctgttggtgtgtttgaaatagagtagtttttttatgatgtcctggaggcatacccagctctcagaataaatctactcaatctaaagatggcagggacacatttagaattaattgtggacgacaggcactgttgatttttcctgcatatcttccatcttgtacctagactcaaaggtagaaatagtgaaaggaggaaaata

SEQ ID NO: 103860 - DNA, 1101 bp, Homo sapiens
acgtaaggaagcatctttacctgtcagcatggcttgtaaacatatttccacttttcctgctttgctagtcttgaaaataactagggaaaaaaatgactagtccacctttctcccaaaaggtatacaaatagtaaaaaagattttaaatcataatactattcacctgttacagggtaaaaattacagttactgcaaagaggcacttatttgtcttaattataaagtggacccaattttgttagcagtattttggggcttcatctatgggaattgccttcaaaacctacatgcaccctttggaatattctcgtggtagaactttgtacctttgaaacaggcttttttaaagaccaggtgtctaatggaactaagtttgatgagtaaattgagtgttgaagtctctgtgtatgtgtgttttaagtgtggcgtatgtactgagataagattattttttaacatggcttatgccagaaatgttttgtgtagctttattggactgaatggccttccaagagtgtgacagctgtgaaggataacaaatatcaaatatgttagttctagcatgtgttaaaaattcattctttaagctgtaaagtcccagtcacatgagctaaaattgtcttgtcagggcctcctgtgtcatggggacagaatactcacagttcccagcatgacacagggataagagattctagagtcagaccaccattccctgtctttgtgacttacttgctaagtgacgttaggcaaggcatttaacgtctccaatcctgggttccctcataaaatggggctgatagtggaccacataaaattgtaatccggattagatgatttatgttaaaatgtgattaaacaactcccggcacatagtaagcacaagtgcttgttaaaaaaaatctaaataggccggacgcggtggctcacgcctgtaatcccagcactctgggaggccgaggcgggtgcatcatgaggtcagcagatggagacatcctggctaacacagtgaaaccccgtctctactaaaaatacaaaaaattagccgggtgtggtggcaggcgcctgtagtcccagctactcgggaggctgaggcaggagaat

SEQ ID NO: 103861 - DNA, 1065 bp, Homo sapiens
gggaaaggggaatcacagcgacagccaagctagtgtcagtgtcgtcacctaatcctggagcacactgtgatcacttaggttctaactaaagttgcttatgtgtttaagcaggttttatgtctcaaacaggaaattatcttggaattaatcagagtaatttactttgtctttcaggtatgggcactaggaaaagacttcttccatcaagcttaattgttttgttattcatttaatgactttccctgctgttacctaattacaaattggatggaactgtgtttttttctgctttgttttttcagtttgctgtttctgtagccatattgtattctgtgtcaaataaagtccagttggattctggaacggatgctctctcttgtgtatgtgaacaaagtgaacataaatgaagagtctccccttccaaggctgaaaactcagcttttgaaagtgaaatgtttgttcatcggggccagagcagggttgtcctctgagcgcatcacttagtgacgaggaatccaacagctcaaggcagagtgtggatcaccggctcccgaaaacagcagtcagcccttctttctcctgtgtgacagcagtgggcagctgaaagagggaagaatgtgggattcagtcatcaaacccagttctgagtcctggttccacagcttgggtactgatggcaatcttggccaagttgtctctctactctgaactttcctcctctgtactgtgggcttctgaggactaagtggcatcatgtgggcacagagagaagctttgtaaaatgtaaaaccgctatacaaatgtgacctttggttgtgtatgacagcagtccccaacctttttgccaccagggattggtttcatggaagacgatttttccatggaccgggggtggggcgggggtgtgcttggggatggttttggaactgttccacctgagatcatgaggcagtagatggaccgcgcaacctagatccctcacatgcacggttcgccaatagggttgaagctcctatgagaatctaacgctgccgctgatgtgacaggcagagctcaggcggtaat

SEQ ID NO: 103862 - DNA, 1311 bp, Homo sapiens
aaagattttggttaaaggatataaaatttcagttagacagcagcacacagtacaagagatctattgtaaaacatgtaactatagttaataacaatatgttgtatacttgaaaattgtgaagagtagattttaaatgttcttttcacaaaaaagatgtgtgtgagttaatggatatgttaattagcttaacgagcttgatttagccattccacaatgtatgcatatatcaaaacatgggcccggctcagtggctcatgcttgtaatcccagcactttgcggggccgaggcagaaggatcacttgagcccaggagtttgaaatcagcctgggcaaccaagtaagaccctgtaactataaaaaatttaaaaattgctctttctcagtgaccgggttctaggcttaggcgcagacgggttaggggagccaacatgccagtggcccggagctgggtttgtcgcaaaacttacgtgaccccgcggagatcctttgagaaatctcgtctcgaccaagagctgaagctgatcgaagagtatgggctccggaataaacgtgaggtctggagggtcaaatttaccctggccaagatccgcaaggccgcccgggaactgctgacgcttgatcagaaggacccacggcgtctgttcgaaggcaatgccctgctgtggcggctggtctgcattggggtgctggatgagggcaagatgaagctggattacatcctgggcctgaagatagaggatttcttagagagacgcctacagacccaggtcttcaagctgggcttggccaagtccatccaccacgctcgcgtgctgatccgccagcgccatttcagggtccgcaagcaggtggtgaacatcccgtccttcattgtccgcctggattcccagaagcacatcgacttctctctgtgctctccctatgggggtggccgcccgggccgcgtgaagaggaagaatgccaagaagggccagggtggggctggggctggagaccacaaggaggaggattaagcccacctgtccctcctgggctgctgcattgtctagttttcctgccaaataaacaggatcagcgctttaaaaaaaaaaaaatttttttttttttttttttttttgagacggagtcttgctctgtcgcccaggctggagtgcagtggcgcgatctcggctcactgcaagctccacctccggggttcacgccattctcctgcctcagcctcccgagtagctgggactacaggtgcccgccaccacgcccgactaatttttttgtatttttagtagagacgaggtttcaccggattagcca

SEQ ID NO: 103863 - DNA, 3039 bp, Homo sapiens
tggtgaattcgaccggggttttgggggacccgccacccaagggccgaagagcagggccgccctacgggcgctcccatttggccacctgagtggcgacttggcgccttcctcggagcagctccggggttccgtcgtcccggttcccactggtcccttacgcagagaccaaaggcaggaaccttccctcgtaactatccaccgactgaaaatagattctgagtccgcccccgcccctccccccttaaaatcctccccactcttaaaatcctcccctttaaagggagccacagggtgacgccgggggagtttgcggaagcgctaaccgcgttggggcctagggcggatcccgtgattgggacaggccccgcccccggctccacttcccccattgtgtgagcggctcgggcctaggccccgcccccctccggaggcccggccactccccttttccacccccccttggctcatttccggccgccgccgctaccgctagcctgtaaggaggattcggcagagggaagaaacaacagccgccatcttgtttgtgtgctaggctgggggggagagagggcgagagagagcgggcgagagtgggcaagcaggacgccgggctgagtgctaactgcgggagccagagagtgcggaggggagtcgggtcggagagaggcggcaggggccgagacagtggcagggggcccggggcgcacgggctgaggcgacccccagccccctcccgtccgcacacacccccaccgcggtccagcagccgggccggcgtcgacgcctaggggggaccattacataaccccgcgccccgcggcgtcttctcccgccgccgcgggcggccccgaacggagccccggggggcgggcgctcccagcacctggccgccggcggtgggggccgtagcagcggccgtatttatttattttccgcgggaaaggaaggcgaaggaggggagcgcggcgcgaggaggggccgcctgcgccgccgccggagcggggcctcctcggtgggctccgcgtcggcgcgggcgtgcgggcggcgctgctcggcccggccccctcggccctctggtccggccagctccgctcccggcgtccttgccgcgcctccgccggccgccgcgcgatgtgaggcggcggcgccagcctggctctcggctcgggcgagttctctgcggccattaggggccggtgcggcggcggcggcgcggagcgcggcggcaggaggagggttcggagggtgggggcgcaggcccgggagggggcaccgggaggaggtgagtgtctcttgtcgcctcctcctctccccccttttcgcccccgcctccttgtggcgatgagaaggaggaggacagcgccgaggaggaagaggttgatggcggcggcggagctccgagagacctcggctgggcaggggccggccgtggcgggccggggactgcgcctctagagccgcgagttctcgggaattcgccgcagcggacgcgctcggcgaatttgtgctcttgtgccctcctccgggcttgggcccaggcccggcccctcgcacttgcccttaccttttctatcgagtccgcatccctctccagccactgcgacccggcgaagagaaaaaggaacttcccccaccccctcgggtgccgtcggagccccccagcccacccctgggtgcggcgcggggaccccgggccgaagaagagatttcctgaggattctggttttcctcgcttgtatctccgaaagaattaaaaatggccgagaatgtggtggaaccggggccgccttcagccaagcggcctaaactctcatctccggccctctcggcgtccgccagcgatggcacaggttagtttcggcagccccggccttccacgttccctttaatcttttctactcggtgcgcctttattcttccattttttttttcttcctctctctctagttccctgccccttaattaattttaaaggtatttgaatgagctggtcgaagacgtccagtagcccaaccattttctttgcctcctaatacattgattgcaacactatgtcatatcggtgtgtgttctggaattagagctcgtaagtgggtgctatatagaaatggcctgtattgttgctctcatgcaatttaatttgggaaatgccaatgcatttgtgtgtaagagctcctatgcaatttaagtttcattttttttgttcttggcaaatgaatttcgaatcctttctctttactgtacttactgtgtttcctctactttccactcttcgaaattttctctcctttgcagaatattttctgttgaggaatagggtgtaaaaaaatcttgattttgtgtgtgcgaggtccaagatttcaggttagaggtgaagtttaacaattcttttatcttacctaccattcttagcttttttttcctttttcttcttatttgctttaagaatcaatatggagcgcagttcatttcacatctcccagttctttggtgtgagaccaaaatgtctgaaactctgggtttttaggttgggagaacaggggcatgttctttgcagtttgcagtcactttctcattttaggggaaataagataaacaattttgtggagttacgtacctggaaatcaaggttagaagttgaaagagttccaatcatgaactacaaacgtgaactgattgtacaaaagtttaaaatgtgcattaggtttggtgtttgtgtgtgtctttgtctttttacacttttaaacatacttggagatcaagattttcgtttaaaagctttacgaccagttcattcagttgtggactagctcctttgtcaggagaagttcagggagacttcttccatcatcccttcattcttttcttacagttagtttaatggtgttatcctgatgggtaaggaccttttctttgctgggataatgaagatgaagaatggctggccatctgacagtccacaagatgttcccctttactacggagcatctctttaactccctgagagcaggctcagcgtcatccctccatctgccagtg

SEQ ID NO: 103864 - DNA, 1014 bp, Homo sapiens
actttcccagaagcgcttaagaggataaataataattgaggtgttaagcctcttctgagcaatttggatataatttgtttttagatctagattcttttttataaatgtcccaaagcaattagaagtgattgttttttttgagacggagtctcgctctgtcgcccaggctggagtgcagtggcgcgatctcgggtcactgcaagctccgcctcccgggttcaagccattctcctgcctcagcctcccgagtagctgggactacaggcgcccgccaccacacccggctaattttttgtatttttagtagagacggggtttcaccgtgttagcaaggatggtctccatacactgacctcgtgatccgcccacctcagcctcccaaagtgctgggattacaggcgtgagccatagcacctggccctagaagtaattttgttgagagagagagagtaaaactaaaagtactgaaaagagtaagagagtagctaagagaatgagtattggagtcagactgctagagttcatagcccaggcttgtatttattaactgtgaactttgggccaaatacttaacctggctcaacctcctcacatttattcctaaccacagccctgtaaggtgggtgcgcaccttataggaatccaccttacttacccaccttacaggattgtggttaggaataaatgagaattctctttatcagatgcttaggactatgcttgcttctgtgtagtatgtgttcattgttaactgtttttaactttactgctaaatatatcagaaggaaagcagtggtagatggtttgggggttgtttttgtttttttgatttgcaacgaagtcttgctctgttgcccaagctggagtacagtggcgtgatctcggcctatgacaacctccgtctcccggcttcaagcgattctcctgctcagcctccggagtagctaggactacagctgcgcagcaccatgcccggctaatttttgtatttttagtagagacagggagtcctga

SEQ ID NO: 103865 - DNA, 1044 bp, Homo sapiens
tttttatgacccactgttggcttttgagccataatttgaagaatactggcgtagaagagttgacaagatggcagttattctgtattaggccaacattttctgtatgccaggaacttatcctctgtacattgttccttctttccttcctggagtttatagataagggaagaagactggcattcacggagtctggtgtgatcagcattgtatttgggaagtacgtatatagtgggaggaacaggagaacctaacccagtagttatcctggtggctgtctttgaggaattgtgtctgattttgggatctcacagatagagataggattagtaaaaatgagcccaggctagaaaggagactgtgtgaggccaggtatatcctgttctgggaacctgtgagtgctgtctgactggtagaatagccaaaaacttgactgtagaggtgagcaagggggccaatcatggagggcttataatacaggaatttagactttccattttacccatttaatggatggggcagaattgtgctttaggcagttaagtaaaaggaggaatagtttgggaagaacagggaaaaacaggaggcagggagaccagtgaaacagctgttttagggttccagccacccttaccacagaagatggaaagaagtggaaagatttgagggaagatggatgatcagcagaacttggtgactgattagaagttaggtagtaagatggacaaatcaaggataattccccagtttaaagtttgagcaacttgttgggtgatgatttatttattatttatttatttattttgagacaatctctgacccaggttggagtgcagtggtgtgatctcagctcactgcaacctccgccttccgggttcaagcgattctcatgcctcagcctcccaagtagctgggactaaaggtatccaccaccacgcctggctaatttttgtatttttagtagagatggggtttcaccatgttgatcaggctggtctcgaactctggcctcaagtgatctgctcgccttggcctcccaaaagtgct

SEQ ID NO: 103866 - DNA, 1005 bp, Homo sapiens
acccacaacaaagaattatcacatagctcaaaatgttaatagtgccagggttgagaaaccctgcattaatctatacttagcacccagttttgtttgttcttttttgagacaggatcttgctctgtcacccaggctggagtgcagttgtgcagttaaagctcactacaacctcaaattcctggactcaagtaatcctcccaccttagcctcctgagtggctaggagtatagcctagtgccaccacacccagccgactttattgtttgtagagacagggtcttgctgtgttgacctgggctgaagaattcctcctgccttggccttctaaagtactgagattacaggtgtgagctaccagggctggtcttgcaccctgtttttggtaggggtggtttgtatggtgaaggagccagaggcatggtgttgtaccctattctggctagactttggttaaggaaagctattctgtaggctacaggtcaaaaactccgcctgttaaaggcctactttgaggcaggtactatataggaacttggtaaaaaatggtggatagccctctgcttaactggagcacacactgagtgttccacaaatgacaggtcttttgtatcagttgtgtgtctttatgtattacaatatttaaaatgttttctttccatcctgagtttagtttgtgtgtagatattttaactgttcttctaaggaacttgggaatattaatacagcttaattgcatttcttttttccatgactgtggatacaaacctttagctagcaactcatgtaataatgggtgttgcactttttttttaacaaaaaataaaattttatttcaactattatgctaattctataacattatttagaatgtttttctttttttaattatcctttaagttttgggatacatgtgcagaacgtgcaggtttgttacataggtatacatgtgccatggtggtttgccgcacccatcaatccgtcatctacattaggtatttgtcctaa

SEQ ID NO: 103867 - DNA, 1262 bp, Homo sapiens
caacatggcaagctccgcctctactaaaaatacaaaatttagctcggtgtggtggtgcgcacttgtagtcacagctacttgggaggctgagatggtagaatcacttgaacctgtggatagaggttacagtaagccaagatcgcgcaccactgcactccagcctgtgcaacagagtaagaccctgtctcaaataaatagaaaaacatggagtgaggttgggaaatgacatttaatgcttattgagaacaatatagagcagttttttattttggttttgtcatactttgacctttgtcttttccctttgcttttagattttggctctctatttgacttggagcacgacttaccagatgaattaatcaactctacagaattgggactaaccaatggtggtgatattaatcagcttcagacaagtcttggcatggtacaagatgcagcttctaaacataaacagctgtcagaattgctgcgatctggtagttcccctaacctcaatatgggagttggtggcccaggtcaagtcatggccagccaggcccaacagagcagtcctggattaggtttgataaatagcatggtcaaaagcccaatgacacaggcaggcttgacttctcccaacatggggatgggcactagtggaccaaatcagggtcctacgcagtcaacaggtatgatgaacagtccagtaaatcagcctgccatgggaatgaacacagggatgaatgcgggcatgaatcctggaatgttggctgcaggcaatggacaagggataatgcctaatcaagtcatgaacggttcaattggagcaggccgagggcgacagaatatgcagtacccaaacccaggcatgggaagtgctggcaacttactgactgagcctcttcagcagggctctccccagatgggaggacaaacaggattgagaggcccccagcctcttaaggtaagtacagttttggtttgtgtgcacaatcggcatgcatgtgagtattgtcatgatggatggagggtttgccttacattgtatagcagtttccactattacacgccaggaatttactgtgctgtcataagttttaagaagtgcctgtatttaagtaaaacgtttattttacagctggtattctataacttcatacttccaaatgattgctggctaatgctggttctctctggcacaagtattggaatgtttttatctcatttccaagtccagtttagccttgtagcctccttataaaattacagttttgaga

SEQ ID NO: 103868 - DNA, 1461 bp, Homo sapiens
gggttttcaccatgttccccaggctgttgtcaaactcctgacctcaagaaaccctcctgccttggcctcgcaaagtggtgggattacaggtatgagtcgccaggcccggccacttggttttttgccatcatggctccctacaacctctacctcccaggcttcactgataatcccactttagccttccaattagctgggactataggcttgcgccaccatgtccagatttttgtattttttagtagagatggggttttgtcacgttgcccaagctgtagtgtcttttctaatagaagctgagaatttcctttgaaactgtctttgtgaacttggaagtgaaatcagaaaaggaataataatgtcttaaattttattgcttattttgttttcttttgtttcttactcttagatgggaatgatgaacaaccccaatccttatggttcaccatatactcagaatcctggacagcagattggagccagtggccttggtctccagattcagacaaaaactgtactatcaaataacttatctccatttgctatggacaaaaaggcagttcctggtggaggaatgcccaacatggtgagtactaatccattacagacttgttttcaaactggcattttgacaaaagaattgtgttaaactttcacccttctgttatatatgctgggatttgtacccactaggagcctaaattgatatgtacttgatgatccctgtgaggaggcttgtgcttcctttccatttctctgttttttttgttccatgtggttattgatcagtgagcatgttgatccaaacaggagtaagtgaactgctacaatgaagttttaggggcctgccattcagcaacttggtcttgtgagcgtttccatacgatacgaaagcggaacctttcacttttgggggaaggaatctctggcaaaggatccgaactctcagtgaccatatttaccaatattatttgattctactacacccaagtaaattccctctcaaaagtaatgtattgttttaaacagcaatttttgttaaataaaattttcaggaacttctagtgttatttttgtacagtcaaactactagtagtaaatgtgtctgcattcaactttggaaaaacattgtctgaaaaaatcctctttcagatgttttagttttgtcctttgtgtcattatgtttatggactgcctatatttgagatactctgccaagtactggagttatacagatgaatgaaacatgtcatctctgtcccgagaaatgttcacttttttttttttttttttttttttttttttttgagacggagtttagctcttgttgcccaggctggagtgcagtggtacgatctcggctcactgcaacttctccctcctggtttcaagcaactctcctgcctcagccttctgagtagctgggattacaggcatgtgccatcatgcccggctaacttt

SEQ ID NO: 103869 - DNA, 1048 bp, Homo sapiens
tgctgccgggtgttggcagttgaatggctccaaagcattcatacagtgttggtcggaacattaataaagccctttgggaaggctattgggcattcagaatcaaaagccttttataccagtggtcccctttaccaatcagttctgcatctagaaatttcttccaggaaataatggaagacaagatccacatactcagatgtttcataatcacgtaacaataattttgtggggttttttattagacatgttagtcttttttttctcaccagcattaatttgtaatactatatcttttgtcttctctagcaattttgactggagcacccgttggacttggaaatcctagctctctaggggtgggtcaacagtctgcccccaacctaagcactgttagtcagattgatcccagctccatagaaagagcctatgcagctcttggactaccctatcaagtaaatcagatgccgacacaaccccaggtgcaagcaaagaaccagcagaatcagcagcctgggcagtctccccaaggcatgcggcccatgagcaacatgagtaagtttgtgtcatcctaataacatggtattggttgtgtcagtaaatgacatctataaacacagtgttgttagctcctttttattttttctgctacatgattttttaagtaattttttaaagattacagtgtaaaaggtcccttacagttcatctacgagaggtaactgccactggtttgtatcttccttgatccttttttgcattatatgagttcagatttgcagaaatgagatcccatatgttattccacaacaaactttgattaatactgtgtagacgggccgggcatggtggctaacacctgtaatcccagcacattgggaggccaaggtgggtggatcacaaggtcaggagtttgagaccagcctgaccaacatagtgaaaccccgtctctactaaaaatacaaaaattagtagggtgtggtggtgcgtgcctgtaatcctagctacacgagaggctgagacaggagaatggcttgaacctgggaggcag

SEQ ID NO: 103870 - DNA, 1940 bp, Homo sapiens
ttttataagcctttgtcagaacagttcaagtttttgatgttttaacattttagagtggttactgaattttatttcagtaagctaaataataaatttagaagagcagatggaactctgaaggctacttgatactatgacaaggcctgttttcctcactgtctttagtatgtaacccaaagtaatattttgctttatgtctagagtaacagggaccaaagagtattttttatagagtcatttcttatattgtgaacggaaatatagacaaaaattcttttgtttatcacaaaaagataatttcatttcagtaagtaatatatatcaccttgccattattttttcttttcctctatgtgttcagtgtataaaaatcagaaaaatactaattaaatgctgacatgatattacagtggtaggattttctttttccagcgtccaagccatatttcctacgccggatcctgctgctttaaaagacagacggatggaaaacctagttgcatatgctcggaaagttgaaggggacatgtatgaatctgcaaacaatcgagtgagtgtctggtttttttctattaatagccaagattgaacctgttgtggttattttattcctctttagcatgtacaagtagtacatatgcttcagacgggggacacgctgtagctatcccgtcttattgtccccaagcatagttaggataccaaagcagtttcttaagtgtatgtcatcaagaatcttatgtttttcctcctaatacagtgcactcatgtggcactttatctggttgtcctgtcaacctaaaaagtggctgagctggccgagtgcagtggctcggtgcctgtaatcccagcagtttgaaagtctgaggtgggcggatcacttgagcctaggagttggagaccagcccgggcaacatagcaaaaccccatctctacaaaaaattagccaggcatggtggcacgtgcctgttgtcccagctgctcaaaaggctgaggtgggggaatcaccagagccttggaagtcaagctgcagtgattcgggattgcgctgctggtgacagagggagaccttgtctctctcaaaaacaggagtggggtggtgctgagctgttaccagctgtgttctcttttcactagaatataatgaagtagcgacttaactgttgttcacggtagttcagattctctacataagttgaactttcctttctaaattggcaccagttcttaatgcagcatataaaatgaaactaatatctattctcagtttattttttctgttacctggtggtagttccttttttcctcatctcccttattttacttcaacaattcaaaaggcggaatactaccaccttctagctgagaaaatctataagatccagaaagaactagaagaaaaacgaaggaccagactacagaagcagaacatgctaccaaatgctgcaggcatggttccagtttccatgaatccagggcctaacatgggacagccgcaaccaggaatgacttctagtaagtggtttttgttatatttctgtttgagagaaattgataataaaatagtttctatctaaagtcattaatttctgtaagcttgtgtaactattctagagttttttaaataaccatttgcctttgcaaagaaaataactcatctactagtaaaaacagaagcagaacaagtatatttaagatgtctgggcatggtacttaacataccttgataatctggaattgtttttagagcccaaggtgtaaacttctctaatagtgacatctagaaagcaatagcctacatacagatgttcacagatttctctgagactggcttgtgtggtaagtagccagtaaatgtttgtaggctgaccaggttcaggagccctgtaacacacataatatcatattacactgtcacactttctacttgacataaaata

SEQ ID NO: 103871 - DNA, 1026 bp, Homo sapiens
attctgattgtatcgttggcagactctgcgtgtgtctcacctacttcccttttttttctgcccagctttcccagccagctgtaagcattgaaggacaggtatcaaatcctccatctactagtagcacagaagtgaattctcaggccattgctgagaagcagccttcccaggaagtgaagatggaggccaaaatggaagtggatcaaccagaaccagcagatactcagccggaggatatttcagaggtgagagtagggcaattactgtttgatttggttaggacctcagtataggaacccaagttttaaaaaatattgcagaaaaatattttgataattagatctcatggcatagattttgcatgagaaagggtgttcagattactgattcccaactagatatctttggaatactaaaaattcttacgttttcttttagtctaaagtggaagactgtaaaatggaatctaccgaaacagaagagagaagcactgagttaaaaactgaaataaaagaggaggaagaccagccaagtacttcagctacccagtcatctccggctccaggacagtcaaagaaaaagagtgagtctctgaagccattcgttctggaggtagctgaagaaaccaaagacccagggcagaattgcggtcatgcctcttgggcctcagaagttgccattattgtgatttcattaacctggaagccctgggcctggtctcttcattgttactaataatttttctttcttttttttttttttaatattcacttgcagcaaccaatgagttaagtcattcccctcatttcttcagggttccctgtgttagtacaccctaaaaattgtctcatttttcaggagagagaaatgtttgtaaatagccttgactaaaatgcaggaaagaatagcaatagtaatagcatttgtcattcacctgctgtgtgctaagtatccacattgtctcatttaataatttctttctttctttttcttttcttttttgtttggaatcggattctcactttt

SEQ ID NO: 103872 - DNA, 1030 bp, Homo sapiens
gacgaggtttcaccatgttggccaggctgaaacttctgacctcaaagtgatctgcccacctcagcctccaccgtgcctggtcccatggactcttatttggcaaagtctcttcataaatttttagaagcctttggattctgcttctaattgaccgagtctgtcttcactgactttgtgactgaaaagttaagctgagggtgaagagtgttttaaggtgataagacacaatgttttttaggagctgtctgaaacaaagcggggcttagaatctagaatcagtgattgagcctgtagtgatatttccatggggacagagtggttaattttgttattgattcttgagatgcttttagagcttcaggctgaatgattttttaaagttcttctgcttaattggtaactaatttcaaatgcactttttttttttaagttttcaaaccagaagaactacgacaggcactgatgccaactttggaggcactttaccgtcaggatccagaatcccttccctttcgtcaacctgtggaccctcagcttttaggaatccctgtaagtatttggtggtacttttgattttattttttaatttgataacagctttattgagagataattcacattccaaacagtatagccactcatttcaaatttgtaattcagtgattttttttttttccccctgagacagggtcttattctggttgcctaggctggagtgcagtggcacgatcgtggctcactactgtctccacctcccgggctcaggtgattctcccacctcagcatcctgagtagctgggataactacattcatgtgccacctcacctggctagttttttgtattttttagtagagacggggtttcgccatgttgcccaggctggtcttgaacgcctggactcaagcaataggcccatctcagcctcccagagtgctggaattacaggtgtgagccactgggcctggcctaattcagggagttttagtatattcacagagttgtgcatgacactttcattttcatcatct

SEQ ID NO: 103873 - DNA, 1219 bp, Homo sapiens
aacatggtgaaaccccatctctactaaaaatataaaaagtaactgggcgtggtggtgcacgcctgtaatcctggctacttgggaggctgaggcaggtgaatagtttgaacgaccctgggaggcagaggttgcactgagccaagattgcaccactgcactccagcctgggcaacatgttgacagagactccatctcaaaggtcaagtgcttccaggggcaaaagccttttaggacttttcctctcttgtatcttgctgtgatttcagatggaacattttaagttctgtgggcttagtttcctcattgtacaccccttctagtactaaaattttaaatgtctttgactttactgatctcacatgtactttcataaagaacctgaagttgcttcagtagaatatcagcctgatgtctagaaagtccatagtagttctgtttctctgccctttgagtagtttaatatctctgtaaactaatatttaaagaagtgatggacatcagtcacctcttggggaatatagacaggccagaaactaaaacactgcctggaaaattaacaatgataatggatgatactccatctcccgtaaaaatagtgagacttgagtaatgtttgatgtcacttgtctttctaggattactttgatattgtgaagagccccatggatctttctaccattaagaggaagttagacactggacagtatcaggagccctggcagtatgtcgatgatatttggcttatgttcaataatgcctggttatataaccggaaaacatcacgggtatacaaatactgctccaagctctctgaggtctttgaacaagaaattgacccagtgatgcaaagccttggatactgttgtggcagaaaggtaagaaatgtgtttcagatttgactttaacttttctgggatacctagaataatatagtggtgactgggataagagaatatcctgcttctggctttgacatggcttttttttttttttttttttttcctttttgacagggtcttattctcccaggctggagtgcagtggtgaggtcatagctcactgcagcttcaacctcctgggctcaagcaattctcccacctcagcctcctgagcagctgggactacagccgtacgccaccatgcctggctgattttttaaatttgttttgtagaaacagggtctcatgatgttgctcaggctagtcttgaactcctgggc

SEQ ID NO: 103874 - DNA, 1048 bp, Homo sapiens
tacagtcatgagccacctctcccagccaacacagtctttctcttactgtgtgccacagtagtaatatctcttaatatgaaatgggctttctttaaaggcattttttcagagtggcaattgtatggaaaagttgactaattaaataatcaacagactgttaactcatctggagtaggggcattcttatattcacctgtgggtgcagattcctcagcatgtgctggctttcctgtacataccaattcacattattggttttttgtttttaaaataagactatggtcttgctgtgttgcctaagctggtctggaactcttgggctcacgcagtcttcccacctcagcttctgagcactgcaggcatgtgccaccctgcccagctattcctgttaggttctttggtaaagtgatggaaggatatgactgctaagcctacctcagcgttttgaaataatgtggtagtaaactgagaatgattttcaggaactgaattagcccatcattattaacataaatgagaactaagacaccactgacttctgtttctgacttgccattcttactgttctagcttgtccttaaggcctctgtgctttttaacaaatggtttcttttgcagttggagttctctccacagacactgtgttgctacggcaaacagttgtgcacaatacctcgtgatgccacttattacagttaccagaacaggtaagcttggccaggtgtggaccatggtccatgtgtccacatgtccagggagtgcatgcggatgggccagcacacatacagtcatggttcatgtgtatcttgcttgaagacagctgtatagcacaagttctgttttttgccttctgcctttgtttgcagaacaataaaattttctatcagagtagccttgcatcagttacctgggttcctcccaagagcttgagaagttaagcaactttgtgagttgttggcctagatgggtctatatcccaggccccacttctctttctactgtgtgtttgttgatcaccacagcctgaggcaaaactgagaagattttt

SEQ ID NO: 103875 - DNA, 1050 bp, Homo sapiens
gctggtctcgatctcctgacctcagatgatccaccctctcagccttccaaagtgctaggattataggtatgagccaccacgcctggcaatggttgttttagattattgttttctgcagttgtatctatagtgggcttttggggtggggggtgggggtctgtggttttttgttttgtaagtgggaagaggtgtgattcctgtatttaggtaatgagtagcagttcttctctccctggtatatttatccttcttcctccttttgattatttacatcacatagcgttaattgctgaaatgaaaggatatgggtctgtgtaattgaaacatttgcttttatttgcagtaatcatttgctacttgtgatcccatttgagatatttaatgctaatctgtgctttgccttggctttctgctttgtgttgttctgtcttgcttttatgttttttgttgtcttgcaatccctcatttcttcgtttgttttgtgtttttttttctccctcatgcttgtcgttgtctgcacttggctttgattgcaaaaaaaaaaacaaaaaaaaacaaaaaaacaaacaaaaaaaccaaaacccaaactgtggggcccatatatctgcatcattgaatgtccttgtcgccgttgatgacctgctctctgctcccgtccccctccttggcctgctgtgattggtggcttcgttgcttggcttgggctgtgttgtgtgaacggaacagttcaccccagtatggccttcttgccgacaggtatcatttctgtgagaagtgtttcaatgagatccaaggggagagcgtttctttgggggatgacccttcccagcctcaaacgtaagtaactgcattattttgaaaagtgctaattagtttgttgtccagtgattatgcacagcttatttctaaatgaacttaagctatgctgttgaatatggtagccattagccacatgttgctatttaaatgcatattaatttaaataaaaattgtttatcacatggaatactcacatttcaactgttcagtagctatctgtgtctggtggct

SEQ ID NO: 103876 - DNA, 1089 bp, Homo sapiens
gaatgaatctctaggccataactagtataagaaacggttttcaatgtggacatgtcctcatttttgtaaggaagtataacagaagtccaagttggtccccctaatgttgattctagttggagaatgtggatcctagttggagaatggtaagactgttagcttttgtatgtagtgaggctatgagcagtgtgttatgctgggtttcaggatgggaagccatgatacctaacaccaagaatagtaacagacaagattttaaaaggaaaagaagaaacagtatttctagttcttcctgggttctccatttctgataagaggaaatttatttactatgaagtcctatagaatattcctttacataaacatgcattttgtgtgagccaagaatacacctatttaaatgtgtattcttaaaaaacctgaatctctatatagggtgaagtttgttcctttggttagaacagcagtcagattgctcatctctatcactttttctcattgtgtcccttttctctccttagtacaataaataaagaacaattttccaagagaaaaaatgacacactggatcctgaactgtaagtacgatccccttgaatagtcagtacgctttggcttttctttttccctttcattctcttgaagtttgcatgaccaatcagatgatcctatattcttgggctaaatctacataacatacatctaatggatagtaaaaccatggaaaacactgaagtactaaggaacattatttcttaatgttaattttaatgttcttaatgttgaatgtgaaacattaaagatctaaacttctagtttgcagtgaggccttttagatcatggaggactgacatgtatgtcttctagatgttcctaaaatggatgggatggtatttggatttatttggaattttcagcaccaggaatctgtcttaaaaattagccaggttttggccgggcacggtggctcacgcctgtaatcccagcactttgggaggccgaggcgggcagatcacgaggtcaggagatcgagaccatcccggctaaaacggtgaaaccccgtctctactaaaaatacaaaaaattagc

SEQ ID NO: 103877 - DNA, 1038 bp, Homo sapiens
ttctggagatacttcttacctttagagtatgtatgtcattggaaacattcactccctcatcttgaagtctgtttctctgaacagtgtgccttttaatttagctcttgttaaatgggtccattttcctttgcagtgtaatcttcatttggtcttaacatgcagacttagggtttttggatccagggctaagtcacccacttcgtggctgagattcgcaacatcccaccatggcctccaaaaataagtaggcaatatgagatccattgttactactgtgagttatgcctaattttggcctcacaatgttaatctcattctgggttatatatacactgtgttatcttgggaaaaattattggtatctatatcaactccaacttgtggtttaaaatgtagccttctagaatagattatctcttttccttaatgttctttctctttgtattgttagttacacaacagggcatatttgggcatgtccaccaagtgagggagatgattatatcttccattgccatcctcctgaccagaagatacccaagcccaagcgactgcaggaatggtacaaaaaaatgcttgacaaggctgtatcagagcgtattgtccatgactacaaggtcagttgggacataggggccaggtgctgacaatagatctggaaatgcactaatgttgctgctctttgttctgtcatttaacttttttttttttttttttttttttttgagacggagtctcgctctgtcacgcaggctggagtgcagtgacacgattttggctcacttcaagctccgcctcctgggttcatgccattctcctgcctcagcctcctgagtagctgggactacaggctcctgccatcacacccggctaaatttttttgtatttttagtagagacggggtttcaccgtgttagccaggatggtctcgatctcctgaccttgtgatccgcccgccttggcctcccaaagtgctgggattacaggcatgagccaccgtgcccagccttttttttttttttttaaacaaaagtcttg

SEQ ID NO: 103878 - DNA, 1020 bp, Homo sapiens
taaataaagaagttttcctaagcagcccagcaaatcattctgcagcagatactatttccagtatttgtagttttggtcattttgaacaaagctgtcagtaaaagctgctgaaattccaaggatgggtgtgaggagggcatgcttcataccacatattctgtgataaggagtggtaggggccatggcatgcatgatggtgctaccaccctgacgttgatcctggcaggataattgccacttggttatataaaggcagataagctccctgtttttgtgggtagaagaaatagaaaaccggaaatattgactttaggccaggccttttcactatttatttttctaaatactccctggcttacggcttaggtataaagtctctgccagctttcaagacattttaagctttcatgtttcttgtcagccatgattattctgtataatcaatgctttaaaagaacatagaaattcctatatgtacatgcatgttttcacaggatatttttaaacaagctactgaagatagattaacaagtgcaaaggaattgccttatttcgagggtgatttctggcccaatgttctggaagaaagcattaaggaactggaacaggaggaagaagagagaaaacgagaggaaaacaccagcaatgaaagcacagatgtaagggcattgagtttcctttgaaacttctatcatgattctaatatttaatccagaagtgcacttaaactttcaattgggttttaaagctttcaggtgtaaaagagctctttaagttggacaagaaatattggcttagagaggttattagggttctgtttcagtggtattaaacttttaaagcatcagagccccttttaaaatggcatctcagactttgagtaatgtgaaatgataaaagaaactgaaggaaatcctgaaaaactgatagaagattacttatctgaaggactaggttatgaatattataggccttgtgggtcacatatctctggcatattttctgtcttttaaaaacaca

SEQ ID NO: 103879 - DNA, 2187 bp, Homo sapiens
gttccagcaaccccaaggagttggctacccaccacagcagcagcagcggatgcagcatcacatgcaacagatgcaacaaggaaatatgggacagataggccagcttccccaggccttgggagcagaggcaggtgccagtctacaggcctatcagcagcgactccttcagcaacagatggggtcccctgttcagcccaaccccatgagcccccagcagcatatgctcccaaatcaggcccagtccccacacctacaaggccagcagatccctaattctctctccaatcaagtgcgctctccccagcctgtcccttctccacggccacagtcccagcccccccactccagtccttccccaaggatgcagcctcagccttctccacaccacgtttccccacagacaagttccccacatcctggactggtagctgcccaggccaaccccatggaacaagggcattttgccagcccggaccagaattcaatgctttctcagcttgctagcaatccaggcatggcaaacctccatggtgcaagcgccacggacctgggactcagcaccgataactcagacttgaattcaaacctctcacagagtacactagacatacactagagacaccttgtagtattttgggagcaaaaaaattattttctcttaacaagactttttgtactgaaaacaatttttttgaatctttcgtagcctaaaagacaattttccttggaacacataagaactgtgcagtagccgtttgtggtttaaagcaaacatgcaagatgaacctgagggatgatagaatacaaagaatatatttttgttatggctggttaccaccagcctttcttcccctttgtgtgtgtggttcaagtgtgcactgggaggaggctgaggcctgtgaagccaaacaatatgctcctgccttgcacctccaataggttttattattttttttaaattaatgaacatatgtaatattaatagttattatttactggtgcagatggttgacatttttccctattttcctcactttatggaagagttaaaacatttctaaaccagaggacaaaaggggttaatgttactttaaaattacattctatatatatataaatatatataaatatatattaaaataccagttttttttctctgggtgcaaagatgttcattcttttaaaaaatgtttaaaaaaaaaaaaaaactgcctttcttcccctcaagtcaacttttgtgctccagaaaattttctattctgtaagtctgagcgtaaaacttcaagtattaaaataatttgtacatgtagagagaaaaatgactttttcaaaaatatacaggggcagctgccaaattgatgtattatatattgtggtttctgtttcttgaaagaatttttttcgttatttttacatctaacaaagtaaaaaaattaaaaagagggtaagaaacgattccggtgggatgattttaacatgcaaaatgtccctgggggtttcttctttgcttgctttcttcctccttaccctaccccccactcacacacacacacacacacacacacacacacacacacacacactttctataaaacttgaaaatagcaaaaaccctcaactgttgtaaatcatgcaattaaagttgattacttataaatatgaactttggatcactgtatagactgttaaatttgatttcttattacctattgttaaataaactgtgtgagacagacaccctgactttgtttcacttgataacacatctttgtcttggagtacacccgttttaagtgcctaatgcttaggattcagaggaaaaagtgaaagcattagcttatagcctctttaatctactacgtataatgtattcacaagtagatcttggtgaatttatccaaagttctgggaaaaagtactgcaggtaccagctaacagtcaaggtggaagtgataacctacttaacaccttgatacaggaccccttaaggatgacctcatggtcttccaatcaccttcatcttacagggatgagaaggaggacctaagaagacggatcatatctgcctaagtcccaagtaacttcttggaaaaaacaagacttgccaggcatggtggctcacgcctataatcccaacattttgggaggccaaggcaggcagatcacgaggtcaggagttcaagacca

SEQ ID NO: 103880 - DNA, 1045 bp, Homo sapiens
atcatttgtaaatccacagaggagcctggtgaattcctaacacatattttctgtcttgttaagctgttgaattgcatcatggtggagaaatgtgtaaatagaagtaatgatcttggtgtttgtaaaaggggtatttgaaaggttcccgaaagtgtgagggggctgatagcagatctgcagcttctccccccgtgcactaaagccaatcataattctttctacctggtttgtgtcatcctccattaggagaccccatcttcagaaccaatggaggaagaggaagatgacgacttggagctgtttggtggctatgatagtttccggagttataacagcagtgtgggcagtgagagcagctcctatctggaggagtcaagtgaagcagaaaatgaggatcgggaagcaggggaactgccgacctccccgctgcatttgctcagccctgggactcctcgctccttggatggcagtggttctgagccaggtgccttcagagtgtcccctgaggatggagaggagatagaagattatagaggaagaggggggtggatataggctatatgggcagagccatccagatgtaaaaggctattaactctgatttctaagggatcagatgtgtaaggacctgtaagggagacagaagcaccccaagtagccactgtgttaacttcctttgctgaagtctaatttctttttttttttttttttttttttgagacttgagtgtcgccctgttgctcaggatggagtacagtggcatgatctcggctcactgcaacttccacctcctgagttcaagtgattctcatgcctcagccttccaagtagctgggactacaggcacccaccaccacatccagctaacttttgtatttttttgtttgtttgtttgtttgagacggagtctcgctctgttgcctaggctggagtgcagtggcgcgatctcggctcactgcaagctctgcctcccgggttcacaccattctcctgcctcagcctcctgagtagctgggactacaggcgcccgccatgacgcccggct

SEQ ID NO: 103881 - DNA, 1014 bp, Homo sapiens
ttcaacactcacctgttcccccagtcgtcctcatggatttccattagcccctctgttgacatctgtagccaagggaggccaagcagcagcacttcattcaggtagattcaggatatacacaccagtacctcccattcctcctcttattccattagcctttgtgggggcaggggctcacctggttaatgcagtgccccaggttttgaagggcccatcactttgtttgctttgaggtggtcatatcgggtgagtcatgtgctaagttctcttcccagctgtctgtgagatgtgtggtatcgtgggtacaagggaagccttcttctccaagaccaagaggttctgcagcgtctcctgctccaggagctactcctccaactccaagaaagccagtatcttggctaggttacaggtgagaggcaatcacttggatccttcccggtgcctttggtgctgagacaggaaccaccaagtgactgaaggccagggccaggaaagtttgaaaaggtccttgcttgtggccagctggtatttattatgttctcaaacttcagaggacagtagaatccatttgtggagctttttaaattataggttcctgaagctacgctccattacctaccatcatcccccagagtctggtgtattcagtacattttaaacaagaactatgggggagtctgacacccttggtcttcaccccacacttttataaatcctttcaaaggaagttgggaaacaggcccaaggttcaccagccacggtggcttcaggaagaccatgcctcctcggactccatgtcacaggcagctacctagaaagtcttgccaattttctaaattactgatatttatagaatctttagagatggaaagattcttggatgtggtgttgaacccacacatttattgataagtatactgaggtccaaggaggtagaatgacatacctagtgtggctctgtaggaggagaatggcggaattgaggctggaacctcatctcaggggcctcatctt

SEQ ID NO: 103882 - DNA, 1150 bp, Homo sapiens
attggcaggaaagtgaggattaggtactgggaaggcaactgaaacagtccagtgctgtcctggggcactttattttattttatttattttttcgatatgggagtttcactcttgttgcccagagctggagtgcaatggcactatctcagctcacagcagcctccccctcccaggttcaagcgattctcctgcctcagcctccggagtagctgggattacaggcatgtgccaccaccacgcccggctaattttgtatttttagtagagacatggattctccatgttggtcaggctggtctcgaactcccagcctcaggtgatccgcccgtctcggcctcccaaagtgctgggattacaggcgtgagccaccatgcctggccccctggagcatttcagtaggaggggaggtagagagtaaacttgcaggtggatggctgtgtgtaaacaagggggtcataatgcccacagcccaggtttgtatgatgattgaaggaaagtatatttgtgctaatatcagcgccctgccattgctcgggctggcacagggacgaagggatcgaggctcaccaaggcatcatgtgcccaaaatgatacagtaagaaaccagtcctataaagattttaggactcggttctgtctgactctgggtctctagccatcaccctgcatcccaccacctccacctctactcccggcttagctcttcaaggacaggagacctcatctctttatctctagtagctggttctgcacacagtgggtgatgtgaaaagttgaggtgcaaacgaggacttgactgaggccgtgaggcagtctgtctcccctgctagcacagttagctcactctctcggtacactctcatcgccacacaggtcccactctatgaccagtgggaggatgtgatgaaagggatgaaggtggaggtgctcaacagtgatgctgtgctccccagccgggtgtactggatcgcctctgtcatccagacagcaggtgagtgtttggccagggcagggccagggatgtgtctgcagagtgacatctctagatgggtgaacagtgttgtaggcaggagttggcttcataaaacaaaaatcccacccactggaatttttgccccacttctaaggattcttttaccggagaagggaa

SEQ ID NO: 103883 - DNA, 1126 bp, Homo sapiens
cttccccaagctaggcccggtggctcacgcctgtaatcccagcactttgggaggccgaggagggcagatcacgaggtcgggagatcgagaccatcctggctaacacggtgaaaccccgtctctatttaaaatacaaaaaaaaatcagccgggcgtggtggcaggcgcctgtagttccagctactctggaggtggagcttgcagtgagctgagatggcgccactgcactccagcctgggcgacagagcaagacttcgtctcagaaaaaaaaaaaaaaaacagaacataccttccccagctcaccctccctcacaggtgccctttcctttcctttcagggtatcgggtgctgcttcggtatgaaggctttgaaaatgacgccagccatgacttctggtgcaacctgggaacagtggatgtccaccccattggctggtgtgccatcaacagcaagatcctagtgcccccacggagtgagttgatgagaacatttcctctcttgttcccgtagggcccctggtagagggagagtcctctgcttgtgttaggtagaatgggagtcctctgtcttgttagaacagaatccacttgccccctggcttcctgccctccccatcccagaggcctgggggcagatccacgtgtggaatctgatgttctcagatgaagtcattgctggcctgaagaggcagctattttcagtccccactgctgaggggtccccactctgggtcggcgctagcgcccctgtcagtggaggtttgtcagtctgtgtaaccaggattctgctggtgcctccacagccatccatgccaagttcaccgactggaagggctacctcatgaaacggctggtgggctccaggacgcttcccgtggatttccacatcaaggtcggcagtgagcccttaactgatgtgcctccttccgctcttccatttttctgcatcctgcatgccactcactggagcatgttacctaagaccccttgcctgatgatcttcagcagctccacattttgcaaggctagagacaaatgctgctgctacgtggttgccatctgcctttctagcctggcgtcggccactgccccacccagactctgctcctactgctccagtcatgctgc

SEQ ID NO: 103884 - DNA, 1707 bp, Homo sapiens
gtcagagtaggcccctccctgtcacctcactggggccttcttgctgtgtgccatctcctttgagcgctggcctaggcaagagccacagctggggtcaccttgctccaaacctcatcgcctcctcctgagcagcacccccacccctccttggccctcctggaggaggctgctgactcgtcctcgccgcggatccgctccatgccgggcgcgtgtgctcacccaagaacacggtccaacaggatggacgcggcccctgctggcgtggtgtttgctgtctagtggggaagagaaagaatcccacgcgtatgcatcacagaagtactgtgtgccccagagaggctcaggtgtcctccaggagggccatgccctagatccgtttggatccatttgcctcgtgtccctattggggtgcggtaccaacccaggatggggtgcagttcatgatatgatctgtctgcctgctccccccaccccccaggttctcctggatggatacctgatgatctgtgtggacggggggccctccacagatggcttggactggttctgctaccatgcctcttcccacgccatcttcccggccaccttctgtcagaagaatgacattgagctcacaccgccaaaaggtaagactagagaggccaccacctgctgtccttgccatcagaaggggcagggtgtccaggcgcggtggctcccgcctgtaatcctagcactttgggaggccgaggcaggtggatgacctgaggtcaggagtttgagaccagcctggccaacatgacaaaacctcgtctctactaaaaatacaaaaattagccaggcatggtgacaggtgcctataatcccagccactcgggagtctgaggcaggagaattgcttgaacccaggaggtggaggttacagtgagccgagatcatgccattgcactccagcctgggcgacagagcaagactctgtcttcaaaacaaaacagaaggggcagggtgtggccacaagcccagattcctggtcaagtcaggccccagaagtgtagcatttcagggtgtatgggaaaggtgacagagcccaccaccagcccttaactgctgggctgaccctaccccatggccagtgtatggttgatgaacagagctcccacttatcccattggtcagtgaacaacctatacaacaggactgtggtgctagagcaggtactaccctgaggggatgagaagaaggctgctggggagactccatgctgggtcctgaccaagctgcagagcttcttcagccatgtgtcctttcctcctgcccacttcctgcttccccctctccctctgcatctgagctttctgctcctccaggttatgaggcacagactttcaactgggagaactacttggagaagaccaagtcgaaagccgctccatcgagactctttaacatggtgaggagactgaagtggagcaaggggcctgcggtggcctcaggacaggccctgcctgctgctgtcagtggtggcagttcctactctttctctcgaatctctactgctgacatcagccactttcagggggaagtccccagctatggcctgggcactccagtccctcttccatggagggcggtactgggagaggtgcagtgggttattgtctagaggaagctgccccagcagccattccagtccccgcccctccctgccagttcttcaagtgcctccgg

SEQ ID NO: 103885 - DNA, 1831 bp, Homo sapiens
ccagtcctatgtggccactggcagccagtaaggattccctggcctatgtctgctggaagggcccttggagagcctggctgagggggccttcattctggccagctctgggctgtgtggcgttgggtgcctggctctctgagcctctcgcacctcccatccccacccacggtgtgcagaaggcagagggctaatgtctctcttgctgagtcgttgtgcaaattaacaaaaatgagtctggcaccaaaatggcccccacacttggaaaacaggccaagaggcatccaccgacctgctgacccctctttccccgcaggcccaacagcgccctggaatcctgctccttcgcccgccacagtctgctgcagacgctgtacaaggtctagactcaaagcctctcccatcccttggcctggaccagtgagctggggagggactcggatgaactgaggcgcagcctacgccattgccttggacaggactctggccacaggcagggcgggtctgtgtcccatgtgtcctgtcagtcccctgagtatgtgtgtgggtgtggcgcatgtgcaggtctgtgcctcctgtcgggatttgggttttaacgtcttctgctggcccagccctgctctgttgtggggagttggcccccaggggaaagggctgtgagctgctccgccattaaactcacctccacctgagggcgctctgctgatctccgcctgggccctgatggccgtccccacccacctgccttccggcccggctccctggcggagccagaacccagggagttgcccgcgtgctgtccttcccctctgtgttgtgattgggttgtttcctgccctgcctggggctgcttctcgtcaccaagccctggtcctgcggcagctgtcacccctaccatccataccactgtgctgaccgctcagcctgaagagcagagaatgccatgggtgggactgtgggggtcggatcgtggggttgttggcagagggcaaccctgggccccacaccgtgtggacaggcagacaccagattgtccaggagcaggagctgctgggactgcgctggccccggacctagtgggccttctcctggctgctgagatgtcgtctgtgactggcctggctggagggggagtgttgacaacccaaagctgttctccagtctggggagggagaggcagggtccccaatgtccgagctgcatctggacgctgctcttaaaggacctcctggggcaggggagcggtagggtctggactgggcagatgctgtatgacctccctgagcacccgtgactgccccatgctttcccctttgtgctctgtgtgtgtctgggctgtgcccgggggcttcacaaataaagtcgtgtggcagcttcagagactcagaaactctcactgaaagcgggatagtctcgggggccgttgtacgtggagtcccacctcggcagagcatgcggccccgcagcagtctgtggggcagtcagccctgcagaagggcccggcctcggcctcaggccactacctgggaagtggcagtcctgagtgggggcccattttcctgcctggccacacctcacccagcaccctgcctttgggctgcagctcgcttggcttctgcgttgctccttcactatggaagccacctcccttgggatcctttgctccactgccacatatgtgaggacagcccagccaaccttccttacctcctaccctacaccatgtatgtgctttgggagcccatgtcccccacaaacggcctccaagaagtccctccaaggtttcttagagggcaatattttctcattggcagtcggccacgtaggtgaccag

SEQ ID NO: 103886 - DNA, 1032 bp, Homo sapiens
tttctgagacaatgttttgctttgtgactccggctggagtgcagtggtgcaatcatggctcagtgcaacctcgacctcctgggctcaagcagtcctcctgcctcagcctcccaagtagctgagactataggcacacaccaccaaccttggctaatttttttcctttttgttgacatggggtcttgctatgttgcctaggctggtctcagacttttcgcctcaagccatcctcccacctcagcctcccaaagtgctggggttacaggcatgagccgccacacccggctgggatgatttttcatccttgttcattcactcattcattccctctctatgctgcatatgtgcttgctgcaggccaaatccaagccagactctgaagggacagcatggggtaaggcaggacctgttcttgcccgccaggggcctttgtactgcccaggcctctcctagctagcgtcagagcccaggtacctctccaccacgtgccacaggccaaccattgtctcttttgtcctcagactgacacgtctgaccccgagaaggtggtctctgccttcctaaaggtgtcatctgtgttcaaggacgaagctactgtgaggatggcagtgcaggatgcagtaggtaatgtgggctgggtgagacctgggtgccctctgtcccttgatgctcgtgggccccaggtatccttcgtggttgccgtaactcgtcagccccagcgctctcatgggaactgctctttggccacctgagtttttcctccgtcagggtcctgccgtggagccagctggctgctcttctccctgtttttcaccactgagaaactgaggcctttcccaaatccacacagccatgtacagttagaacccatagcccgctctaggaagtccagatagtcacatctgcaagcccaatggacgcaggtctatcgggaggagggatggtgagagccaagcccttgtccacaccttggagcttctgtgctcacgtccactctacctggaggttccttgcacagaggacacctttccc

SEQ ID NO: 103887 - DNA, 1528 bp, Homo sapiens
caacctctgcctcccgggttcaagtgattcttatgcctcagcctcccaaacagctgggattacagatgcttgccaccacgcctggctaatttttgtatctttagtagagccggggtttcgccatattggccaggctggtcttgaacttctgacctcaggtgatccaccctcctcgacctcccaaagtgctgggattacaggcattgagccaccgggcccagccatagttacctatatttctatttaccccaatataaatgtctatttacaggtagcagtgctgctgcattatgtatattataagatatgcataagggtttctgaaagaataaacaaataagcataaatagaaattctgattttttttttccccacccaccagaggattgtcttggtgacccttaggaaccactcccccattcctgggatggtggctgggccatgacctggcttgggcacttggtgtcccttgtctggcccggggctgcatcagggctgccacacctccagttcattcatttgcattccctgtcaggttcctaagtaaagctcctggagaacttggctctggacaaggactccccatgcttacgctgaattgggctgcttctctggtttatggaatcaattaaacaaatggctaggttcgcctcaattcagtttttcctctgggcacctctggtgctagcagggcttacccaggctggactgtagttctacggggacccactttagcccccatgtgcctccgtagtcatttctggggcactgcatgtcatgacgaggatccacttggccgtagcaggttttttgagtcccagggaggtagcttccccctcaccccaaaggctcctggaccaagagccatccagggccagcatctctgggtgatattgatagatgggaaatgcagctgagtgggaggaagaattctagactttgagcctagatgggctggagtgaagggtggatgtgctgggtgtggggatgggcacagctgtgtcggggagtctggggtccggaattctccagagcctctgtgcccctacttcccaggagccagctcccgtgctgtcctccccacctcctgcagacgtctccaccttcctggcttttccctctccagagaagctgctgcgcctagggcccaagagctccgtgctgatagcccagcaggtaataaccacccctcgacccccacgctgtacgtgctgtggcttctggagctgttagagaaaagggacgaacagctcagagacctgggggtgcgacgctgtcagctgggggcagggaggcttggcctgccactgttacaacacgcgcaaatgtccagggtatttataagcctccaggggttgcaaatgttccctccccactcagcctacagaaagtacagcccgccagttcccatgctgactggggttagggaatttccttaagagccttgcatgtgcccaccccctccttggcttctctctgcgtgttccgtcagcccagctgcttcgagaacaactctgttgcccagggc

SEQ ID NO: 103888 - DNA, 1053 bp, Homo sapiens
ccagcctggccaacatggtgaaacctccatctctactaaaaatacaaaattagtcgggtgtggtggcgcacgcctgtaatctcagctactcaggaggctgaggcaggagaatcacttgaacctgggaggcagaggttgcgatgagccaagatcatgccatcacactccagcctgggcgacggaacgagactccgtctcaaaaaaggaaaaaaaaagaaaaaagaaaaagaaaataaggaggcagagagaatgggtatcaaaaggccaggctgtgatagggctgcatgggccagggaacaccctcctcatccctagagaaggacgccatgtcgaaggggttatgttgtgtaggtgggtgggctaggagggcccctaagaaagaaaggtcacatggagctatgtcatccagagaaggggcatgagtgcctgcccaccacagccagggtccccactgtgctgaggacaccagactgagaacaagaaatcgacctgctggatctagagctctgtgaccctgggcaagtcacttcgcctctttgatccctagtcttttctctggtggggatcctatcccaggcagtaggcctccctcaggaggttgtggaaagagttagatgcagccatgccccaaaatcccacagacaggcccctgccctgtgctggcggcagcccattcctgtgcctgctgtgtggaattgctctcctgcctgctggatgtcacctggcactcggggccccctccactctctgcctcctcttcacaggtcatcgggaccctggaggaggtccacatgccacagaatgggatcaaccaccctggcatcactgccctggcccaggctttcgctgtcaaccccctgctgcgggtcatcaacctgaatgacaacaccttcactgagaagggcgccgtggccatggccgaggtgaggcgagtgtggcagagccagttgggccccgccagatagaggctggctgctgtctttccagggaagctggggctccgtttagcagggactcctctaccccctgcctgccccctgggtgtgtgcccca

SEQ ID NO: 103889 - DNA, 1121 bp, Homo sapiens
tccatatccctcagccacctcaaagcccactgctctcaggctgaggctcacagtccttggcctggcattcaaggctcttgcctgatctgacccctcacttcccttccacccaaagcccatgccacggcttcttctggagcctacccacagctttcctccaggctcacagcctgctgcttcatgcttatgtctctctgctcctgttttttcagctgcctggagtcttttcatgttgactagctgattctcatccagactaagtccaaatgccacctcttacaaggagccttcccgggccactccaggcatacgcatcccccactctccagctgttaggagccctttgcagggtttccagtcttaagaatactgaaatggtttgtgtctgtgttggttctgcaccagccggggtgtccttggaaggcagagctgggcctggcacagaagcagcacccagcacagaagctgggtgtctatgaaactgacacgagcttcctctgtgcccagatctcactaggggaaggactcatcacagctggggctcagctggtggagctggacttaagcgacaacgcattcgggcccgacggtgtgcaaggcttcgaggccctgctcaagagctcagcctgcttcaccctgcaggaactcaagctcaacaactgtggcatgggcattggcggcggcaaggtgggtgtggcagccccctccccgcagagtcccctggtccatccacatccgtctgacatatgtgccctggcccttggccaccaccatctgggatggtcagccgttgttttcaaaagagaaaggcctcaaaggcaacagcctgtggccggagggtagaggcgtccatgagggtggggttgccaagcaaccatccccagttcttgggttggcttggcaacgcagagggagtgccactgcatacctgctccagcctgctggctctgcaaaactcagggcttggggcatccctatactcactgtacccgcagagcagctggtagagcctggcacataggcagagggagtctgaaaagaggagcatatgctcagggggggcaccgtcacagctcacctttattcctagacagggccttgcccagggaggtgtcctcagg

SEQ ID NO: 103890 - DNA, 1046 bp, Homo sapiens
acatgcctggttttaacactcattacagagaaatcatctgcatagctctgtactctggaccatgagcctgtctgattctctgtaagccaaggctcattgcatggtaggtgcaccatagactgttgagtggcaaggtggttgccaacctctctcctatcttagctgtttgtgattccaaaagcctaaggttctgctctttggtccctggcagctaaagatgtgattaaagagattgaagactttgacagcttggaggctctgcgtctggaaggcaacacagtgggcgtggaagcagccagggtcatcgccaaggccttagagaagaagtcggagttgaaggtgagcagagtggggcgagtaggcccaggctggtttgaacaagcttctgttcacacttccacaacccctgcctgtgtccagtctcttccaggcccctgcctgtgtggctgtaccccaagcagctcctcttcctctggcctccccagggcacacagcattggctagggaccctctccctgtagtcagcagaccttgagagggtgttggggtgcaggaggattattggcatgacacctgtgaaagacaaagtagggagagccttctcataatgcagagctgtcacatgtgaggtgggaaggttgcagaaataaccagcaggagcctctgactgtgaggctgctctgacagacccaccctctgggagtttcagagcaaagattgcccatttaaaggaatctcatgttgggcagaagtggccaggcctcagctcaaatgccgcagcaataggaaggtgctgtagctggagactgccagctccctacactcctcgcagcagaggcaagttctctttttttgttttttgagacggagtctcactctgtcgtccaggctggagttcagtggcgcaatctcagctcactgcaatctccgcctcctgggttcaagcgattctcctgcctcagcctcctgagtagctgggattacaggctcccaccaccactcccggctaatttttttttgtatttttagtagagatggggtttcac

SEQ ID NO: 103891 - DNA, 1044 bp, Homo sapiens
ataacaggcgtgagccactgtgtctggccttcagcctatttttgtgtttgtatttttattattattattttttttgagacggagtctcgctctgttacccaggctggagtgcactggcatgatgttggctcactgcaggctccgcctcctgggttcatgtcattctcccacctcatcctcctgagtagctgggactacaggcgcccgccaccacgcccggctaatttttttgtatttttagtagagacggggtttcaccgtgttagttagccaagatggtctcgatctcctgacctcatgatcctctcacctcggcctcccaaagtgttgggattacaggcgtgagccaccgtgcccggccccttatttttgtatttttagtagagacggggttttgccatgttggccaggctggttttgaattcttgacctcaggtgatccgcccactttgacctcgtttatcacttttgatgcttgcgtcacccttgtgggagatagattggaatgttgctgttttataaatgagaaaaaggaatttaggagactttaagtaacttgaccaaggtcacacatttgataaatagcagagctaggattttcacagaggttcagtgaaatccctattcctgtgcttctaattagacattgagctccgtttaggaaacagagatttgatggcaaatgccatttattgaacaccgtgtcagataagggtattaagtgccagataaatagtatctcagtttatcttcacaaaatcctttgagatagattgcatttccattttgcagattggaaaactgaggtttagggaggtggtatgacatgcctaagggcacagctttaatgagtagagctgggattagaactcaagtttgggccaggtgcggtggctcacgcctgtaatcccagcactttgggaggccgaggtgggcagatcacctgaggtcaggaattccagaccagcctggccaacatggagaaaccctgtctttactacaaatacaaaaattagccgggcgtggtggtggacacctgtaatc

SEQ ID NO: 103892 - DNA, 1944 bp, Homo sapiens
ggggcattctctgggatgaatgatctggatcccatagccatctgtgtcctgtttgaggaatgggaccctcaaacagagaacagccaagatgctcaagcaggtgtgtgcttgggccagactctgcagcctttggtttgggacttgactgccattcactgaaggggcccaggaaatgggcagctcacatggtgttgctgggtgtccagctgcggcagtttagcagaggaggacttgtaatgagatggtagcttcttataggctaagacatgatttttctgttcttttactacctcctgcaccttctagaactgttccttctctgatgctgttttcctttcttccagtgatttatctctagggtctccatagcaggggaggtagggtcagactcctgagatggctgatgtcctaccctgcccccaaccaggggccccaggagactcctttttcttactgcaactttggcctcctcagtctgcagatctccaggggagcccaccagcctagtcaacatggcctcggaagacattgccaagctggcagagacacttgccaagactcaggtggccgggggacagctgagtttcaaaggcaagagcctcaaactcaacactgcagaagatggtgagtttctggaagttgtgcactggtgtgtccaggggaggagagggagtgtactgaactcttactggttgtcaggctctttctgctacattgtctccattatttgtcccagcagctctgtgaggtatcattgggcctattctaacaatgaggctcagagatcatttgcccaggagcaagctcccctgcactttccatgtttgtattgggcatccctttgtgccctgccctttctttctcaggaggggatgataggtaatgaggggccacagttagtgccagtcccaagatacagcctctgactctgacttaatatccggtgttgtccccacccttgcccttaacccccatgatcccaggcaggcctgggaatagctgcagctttccccagagctgaggctctggtggagctgcattaaaacaacctgggccctcttgggagatgctggttcatgcaaccagatgtacctgggagagggatggctgtctgtgtgtatacaggtattgcaaccacagaaaactaggaaccagagagcagaccctgtcttttcatcccttgtcaaggcttggctgccactgaccaaccctgaatcacctggcacctgcaagtgaaggcacctgcatcaagtgaggcctcctgggattctggcccaaccaggggaactggtctggacatgcctggttgtcatgttgtgtaggcagccttgttctcctctccaggtcggaggctgcttgagtccttgggtagctgggagcgtgctgatgcatgttcctaacatctccataaggtctaacgtttatagacttcctccctgtgcatttatcactttttttttttgagatggagtctctgtcacccaggctagagtgcagtggcacgatctcagctcactgcaaacctctgcctcacgggttcgagcagttctcctgcctcagcctcctgagtagctgggattacaggcgcccaccaccacacccggctaatttttgtatttttagtagagatagggttttgccatattggtcaggatgctctcgaactcctcatctcaggtgatctgcccaccttggcctcccaaagtgttcggattacaggcgtgagccactgtgcccggcttttttttttttttttgagatgagtctcactctgccacccaggctggagtgtagtggtgcgatgttggctcattgcaacttctgtctcccaggttcaagcgattctcctgcctcagcctcccaaatagctgggactgcaggctcacaccatcacgcctggctaatttttttttttgagacatagtcttgctctgttgcccaggc

SEQ ID NO: 103893 - DNA, 1055 bp, Homo sapiens
cccctacaagagccattgcatttgctattccctttgcaggaatcatgttcccccagatgtgtgcatggcccaatccctgatatctttatttaactatttcctaataatgcctttttgttgttgttgttaatgcctttttgttgttgttgttgttatttgtttgttttgagttggagtcttgctctgtcgccaggctggaatgcaatggcgcgatcttggctcactgcaacctccgcctcccgggttcaagcaattctcctgcctcaacctcccgagtagctgggactaaaggcgtgtgccaccacgcccagctaatttttgtatttttagtagagacggggtttcaccatgttggcctggctggtcttgaactcctgacctcgtgatccacctgcctcggtctcccaaagtgctgagattacagccgtgaaccaccactcccggccccccaaccccccccttttttttttaaatcacatactaaatgtgtcatttagaacatatgcttcaagaggtcagggtttatgcttcctttactgctatactgctgacctggaacaacatccagcacacagtagtaatcaatgtgtttttgaatgaatgagtggacaccttacccaggataataattcatgcttattgataaaggcagacaaaccagggttataagttagaacccagaggaagcctaggggtgggaggattcagggtatcacaactgtatctgagaatgaggaggttgtaggaggaggcctttcggatagcaccccctagttctgcccctcatatctgcttccttggtctctcctgattacttgctgtttcttttctttttttggagcatctcacagatacgtttattcataccacaaagtaaacactattcaggtatgtagtgatgttccacgttcctgtctaatatagctggcttcaatttataggcagtacacattgagacatttaatctcacatgtactccaagtaaagctggagtaccatgagcaggcgcaggagttctcaaagctttacttgttttaaaaattttcatttattgg

SEQ ID NO: 103894 - DNA, 1079 bp, Homo sapiens
ccccaggaggtgtcttgaaattttcgtggggcctctctcttcggcgtccggagcttctggggtgtccagatgctttgccgaccccgcgcagggggtctcgggggctggcaggggcgtcgctggcagggccccccttccttttgtgttgtccttggccccgcagcacccggagttggaggggccgcggcgagggccggggagcggggccgcccgacgggccgcccctttcggctgcggcggccacgcgagcccggggatccggggcctgcagccgggcccgcgggaagggggcggcaggaaaggggggcgcggtctgggcctgctgggcaggggggcgtttccggtcgcaggatcagtctctggacttcgaggcctgtgggaggcccgcggccgtccagggagtgctagggggctgcggaccccggctctggcgcctggggacgggggcgccctgacggggctgggggcctgggagccgccgactccggcctcatacccccatcctgcccgctgcgaacctcagggcccccctccgggtttgctccctcctcctttcccctcctttctcctcaactctgtctgttttaggcgtttataaggcgcctggttggggggactttcacagacaaagccgtcttcccaggggggaaaataatcatataaaaacagctcactctgatagaacctgatggctgtattgccaacagggcattgacggggaagactagggggctagggccctgcgtggggagtctgggggctctaaaagggggctgggcctgagtggggagctggtgatcagcggttttatttctcgggttgctagctttggcatcagactttgaaccccaacttcttgccatattcctcagcatctgcagttcagcctgatgaaaatagcagaatgcagatccttgaattttcacacaaatgagataattatagtacatgtagcaactgtgttggacacaaaatgctggcagaatctttagttctactaccaatacttcctctacacacatacagccatcccctccgtggtggtcttctttccccgtgtccacctcccacagaagttg

SEQ ID NO: 103895 - DNA, 1009 bp, Homo sapiens
tcttgatctcctgacctcgtgatccagccacttcggcctcccaaagtgctgggattacaggcgtgagccaccatgcccagccttctttttattttttgagacaaggtctcactctgtcacccaggctggagtacagtagcacaattgtagctcagtctgccaggctcaggcaatcctcctgccttggcctcccaaagggatagggttacaggcatgagccaccacacctggctgctgcaagtttctttctttctttctttctttttttttgacagagtctcactctgttacccaggctggagtgcagtggcatgatcttaggtcactgcaacctctgcctcccgggttcaagtgattcctgggctcaacatatctgaattcaagtgaactcctgggctcaacatatctacccacctcggcctcccaaagtgctgggattacaggcgtgagccacctcatgcctgtctgcaagttacttttcaagtgcctcttgtgagatgctgtggggcaggtttgcaattgactttgtcatttattatctggctggaaagagaaagttgattctagtgaaccaatgagaacacaagaattctggggtcagtgcagtgggagtggagagaagacagctcaaggctacctggaaaagttagagaaggcttcttctaggaagtagaatttgaacttcaaagaatggggaggcttgccagggtggagaagaagggaatttctgggttagccacaattgcttctgtgctgggaagttgacttacattctctcgaattgttatagtagctccgtgaggggtgggcattataatctccatttcacagatgaagaaattgaggaacacgggatttgtgtgcccagcccaaggtcaatctgcaggatttgaatccaggccttcttgactcttgagtgtgctcctgccctctgcaccaccttcctctcagatacgtaagcaagaacagggactgtcctataatcccagcactttgggaagccaaggcg

SEQ ID NO: 103896 - DNA, 1036 bp, Homo sapiens
tcgcagctacttgggaggctgaggcaggagaattgcttgaacccaggaggcggagcttgcagtgagccgagcgctccactgcactccagcctgggcgacagagcaagactctgtctcaaaaaaaaaaaaaaaaaattagctgggcatgctggtgggtgcctgtaatcctagctactcaggaggctgaggcaggagaatctcttgaacctggggggtggaggttgcaatgagccaagatcacgccactgcactccagcctgggcaacagagtgaaactctgtctcaaaaaaacaaaaatggagactggatggtctgaattagcaaatgaaactggggtagcattgtcaacaggctccccaagaccaaggagttctcctaaactggctctgtatcccagggccccgaggggctggaccagtgaaagcactctcagtaggtttctaactgcagaaagcagaatggcagtagaaggaggaccggtccctgagcgtggggatctgagcaagtttggttccttagtgcctgctgggtgccggcccagcaccctggaggagcttagagcttgggatgagatagatatggaccattaatctgagcttcccaaggacaggaactgggtctgattcaccctctgtgcctccagccccagaggcggtgccaggatgacacactcagccattgtgttgtcaaattgaattatgccccaatgtagaggaggaaggtttattttgcccaagagtagaagatcttcctagaagtgccatttgaacatctgaaagataggttgaaaagccagagaaagggtgttctaagcagaggcattgagatggacaaaggcagggatgtataaagaagaacaggtcacctggtacagccacagtctagtgggcagatacatgacattgggttcaagtcaggctctgccgtcatgatcctttcgattctctgggcctcagtttccccttctgaaaaggagccctgagatttgatgatatttaatgataacccatgcttggggatcaggataagaaactca

SEQ ID NO: 103897 - DNA, 1005 bp, Homo sapiens
gtcgccctggttcagctatgctcttgttccctggagcatctctgtgtcatccctctccctccacaggctgaggaacgcagggcagggagcccaaagtcctgagtttcattcccaactcctgttcatgctggctgtatgatggaggcattattattttgtcattcttggcttctgtctccttttctgtgaaacggccgtactgatcctgtcgaatctgcatcaggggttgtagttatgatcatttaatagccttcagaatattcctgaatcttcttcactgtctgccttgatccaggcctgaaccactgcagtagcctcctaaccaatctcccagtatcctctcttgtcatacgtcctccctgcagtagccaaaaggatcttcttgcgaaataaataagctcctgtcactcttctgctgaaaactctcctgcagtttcctgacacacgcaaaacacagccctggctcccggcatggcctgtgagtggttctgagaccagcctcgcctgccccttgcactttgcctcccacgtggcttgcccttgcttgggtgttgcagccacggtggccttctgagttttcctggaacattatcagcttgttcccacctcagggccattgcctgtgccctgtcccctgctaggtaggtgccctcttaccccacctcctatcttccatggctggctacctatctctcttaaatgtcagcttcctcctaagggccttccctaaactcccagtctgctttttttttttttttttttttgagacggagtttcgctctgtcgcccaggctggagtgcagtggcgcgatctcgactcactgcaagctccgcctcccgggttcatgccattctcctgcctcagcctcccgtgtagctgggactacaggcgtgcgccaccatgcccggctaatttttgtatttttagtagagacggggtttcaccgtgttagccaggatggtctcgatctcctgacctcgtgatccgcccatctcggcctccca

SEQ ID NO: 103898 - DNA, 1036 bp, Homo sapiens
gggtggtagcgagcgcctgtagtcccagctactctgaaggctgaggcaggagaatggtgtgaacccaggaggcgggacttgcagtgagcagagatcgtgccactgcactccagcctgggcaacagagcgagactctgcctcaaaaaaaaaaaaaaaaaaaaagagagagcaaatgggccgggtgcagtggttcatgcctataatcgtagtactttgggaggccgaggtgggcaggttgcttgagctcaggagttcaagaccagcctgggcaacatggcgaaaccgtatctctacaaaaagtacaaaaattagcctggtgtggtggtgcatgcctgtagtctcagctacttgggaggctgaggtgggaggatcacatgaaccccagaggtcaaggctgcagagagccgagattgcatccagcctaggggacaaagtgagactctgtctcagaaaaaatttaaaaattaacaaataaaaaaatagaatgtttgagatggtgcctagcatggtgcctgacacacagtagaggtgtgcagggaggtcctctgcccaggtcaaggttggaagaagaaaaccccagaatctgacccagagagacagagcagttgatttccggcaggcctggggacagggactctcgggggcgctgcagaccccagctgcttgtgtcagggcctctttgctgccccagctaaggggaccttgagcatcttttcagaatctttacctctgcccacctctctccaatctctggcaggaattggaaaccttttctctgctcagtaacggcactgcggctggcgtggcagatcaggtaggatcggggctgaaccaacctgtctcagtttatccattatgagaggtttggattcactctctccgggtataaatgacctcaggcagtgggtccaggggcctccgcctccctaggaggtacctcccgtgtccacgggggcaggatgtggggacaggccatggctgctgttggcagggagtggtcattgccggggagccgccgggggcagcctcactcttg

SEQ ID NO: 103899 - DNA, 1049 bp, Homo sapiens
ggcttccagaaaaggttgccttttaagagtgtcccctggagagggcattgcttaccccagaagaaggaggcagcagtggtggacatttaggcattgagcctgggccaaggattgacatcataggactgagggcccctccctgctctggggctgtggccttccttgaccaccccctgagcatctgccagtgggatcagccgatggggaaggcagggctcctggcaagagctgaaagaagaagggaaagtgttggatgagcatcacggggcccgggacgcctcctccaccctcaccaagcagtgctccccttcggctcttgcccaccccatccgcagactgctacgtggaccctcgaggctccccagcccttctcccctccacgcccacgatgcccctgttccctcacgttctggacctgctggcccccctggacagcagcaggaccctccccagcaccgacagcctggatgacttctcagacggggatgtctttggcccagagctggacaccctcctggactcgctggtgagccacaccaccctccttgtgctcccctgatcccctctccccgctgtgtccccattgtcccaggggtggagggaaggccccaatgctcatgtcatgtgtctcaggaggaggcctcagtagggacttgtttggtacagaaatgaagctgcacactgggcacggtggctcacgcctgtaatcccaatactttgggaggccaaggcagcggattacttgaggtcaggaattcgagaccagcctggccaacgtggtgaaaccccctctctactaaaaatacaaaaattagccgggcatggtggcacatgcctgtggtctcagctcctcaggaggctgaggccggagaatcgcttgaacccgggaggcggaggttgcagtgagccgagatcacaccactgcactccagcctgggcagtggagcaagactccgtctcaaaaaaaaaaaaagaaatgaagctgcacaatgtctggccagaagggaccatagtgagccctgctcccacatgggacaggatgaagccag

SEQ ID NO: 103900 - DNA, 1033 bp, Homo sapiens
agaatggcatgaacccgggaggcagagtttgcagtgagccgagatcgcgccactgcattccagcctgggcgacagagcgagactccgtctcaaaaaaaagaaaataataataaaagaacatctgatgaggggccaggcgtggtggctcatgcctataatcccagcactttgggaggccgaggtgtgcagatcacaaggtcaggagttcgagaccagcctggccaacatggtgataccccgtctctattaaaaatacaaaaattagctgggtgtagtggcggacacctgtaatcccaggtactcaggaggctgaggcaggagaatcgcttgaacctgggaggtggaggttgcggtgagctgagagcacgccattgcactctagcctgggcaacaagagcaaaactccatctcaaaaaaaaaaaaaaaagagcttgctacactctgacctacactagctgtgtggtcctggggaatttccctaacctctctgagtcttgccttcctccccatctgctgatgacttgggggattgggggagggcatgagcacaggctgcaatcacggcccctcccatttctatgctttcacattcaacttgccttcaaagaaaggctcagagccaagacccaggtcacccactagcctgggaccatatgctgggaccaaggtggtcctgatattttagactcttggaccacattacaaagaactcccctggctgggagggtggaggaagaggaagggtcctgggctgtggttttgctcttgggtaggataggggggtcatagagcactccccacttctggtgccctggctggccccagtggcctcagccatcatccagtgcccacaatggcctccttcctcctgtcacagccagagccctgcatgcccaacactgccttgctcatcaagaaccccttggctgccacccacgagttcaagcaggcctgccagctctgctaccccaagacaggtaaactttcacctgtagactccacccctctgcccagagaactgggaatctcagga

SEQ ID NO: 103901 - DNA, 1084 bp, Homo sapiens
gtaatcccagcattttgtgaggctgaggcaggcagatcacttgaggtcaggagtttgagatcagcctggccaacatggtgaaatcctgtctctactaaaaatacaaaaagtagccaggcttggtggtgctcgcttatagtcccagctactcgggaggctgaggcaggagaattgcttgaacccggaaggcagaggttgcagtgagttgggatcacactactgcactccagcctgggtgactgagtgagactctgtctcaaaaaaaaggaggggggatgggtgccaagaatgggctccttcgaggggcttcccccagcacagtcccccggtctccagggagcaagtagccaggaagggtgtggtgggagctggcaggaggccctcagaggggaggtaggtatataaggagggggccgattcctacccaccgcatgggcctgccagccatcactcttcaattctgcttccggaattatcatgtgtgtccaccctgcccataggcccccgggctggcgactacacctaccgtgagggccttgagcacaagtgcaagcgggacatcctgctcggccggctccggagctcggaggaccagacctggaagcggatccggccccggcccactaagaccagcttcgtgggctcctactacctgtgcaaaggtgggtgggctgcagcggggcaggcagcacagctggggcccagcccctccacccccagccgctgctctactccccatcacaggtagacagaacaggggtgggcctcacagctgcacgggaggagaaagccacggcctaggctcctggggcccgtgcaggatgaattccacatcagaatgagcgtcttcttcccttagcagcttccagaggcaggtgggacacatttgggacattcagctggagaccgagcccgtcactggcctgtgctctggagtgtcaggagcctacatgactcatagggggctggcttctcttaccactgtagggccctgaggggccgcggggcagtgtgcccagcagccacatgaagcatttaggactggcgcatggtgagggctccatccacttgagctctctgtcac

SEQ ID NO: 103902 - DNA, 1033 bp, Homo sapiens
aaatcgtgccattgcactccagcatgggcaacaagagcaaaactccatctcaaaaaaaaaatcccttctatttatttagagacttgtatacttctacaaaagcaatcctgtggggtgagtggggtaggagtgattactgtactctgcaggtgtggagtgcagaagcgggccttgtatttggaaaggaattttcagccctgccaagtcctggcagcagggggtgcagcagaccctgcctcacctgcgttggggtgcagaagggggcctggtatttggaaaggacttcccagctctgccaagtcctggcagggggtgcagcagcccctggctcacctagctgtgttggggtggagcgaagccctgcctggctcatggggccagagccccacaggccgcagcggggtggcgagggtgctgcgggctgctatccccgcctggcggaacgtgtgtcctgttgcctctttgcagacatgattaacaagcaggactgtaagtacggggataactgcaccttcgcctaccatcaggaggagatcgacgtgtggaccgaggagcggaagggcaccctcaaccgcgacctgctcttcgacccgctggggggtgttaagcgcggcagcctcaccatcgccaagctcctgaaggagcaccagggcatcttcaccttcctctgcgaggtactgcccacccacccactgccaccccataggccatggcacagacagggctggggatgctccctggcacggaccaccataggaagtcagccctggaacccgtgggctgtggaggcctggtcttagaaccagtaggtcctggagggtcagtaagtctgggccctaggatcctatcttgctagaggccagatctgatccagccccctcattttgcagaggcagaaactgaggctggaaagaaaaatcataaccctcacacctgctcttttctgacagccagtcataggcagggcttggcacgtggttgttttcgtttctcattcctagcctgatgcagtggctcacgcctgtaatcccag

SEQ ID NO: 103903 - DNA, 2000 bp, Homo sapiens
tcatccctggcaccaccagcccttcccctagctcttccaggtcgggacttgtgccaaccccccacagggagcattggcctgggaatcatagttcatagccaggtgacagcctgtagttcataaagaacttgccattcctttttatcttttttttgacatgaagtaaccccctgcctcaggcattgggagtggtgggatcagagggagggaggagggtgaggaagggagccaaagcccaggtcacctgtgagctggaagcagagaggcaagaccacagaccctgggattcccttcctcactcctctgacccagggcagggcttgcagggacccagctgtccttccccagctagctgtgtggggtcccagctcacccccttcccaggtggccatgccaggtcccagcccttcccctccctgggcagatctgctttgacagtaaaccccggatcatcagcaaaggcaccaaggactctccgtctgtctgctccaacctggctgccaagcacagcttctacaacaacaagtgagtgggaccctcagcccaggctgaggcctaggggccagtggagagtcccctcaggcagctcagatggctgaggaaaggctgaactgaaagggtggatgtagggtgcaaggaaaggggcagaatttgggaatcaaatccagcctccacctggaaaggatgagaatcacatttgtcgaacatctactatattccaagcgtcatcttgggtatgttaattatcttagcaatcctgtgagggaggagttactggccctgttgtacagaacaaaaagctgaggcttggaagtagcttacttagcttactcagcttactcagcagacagcaagcggggggcctcgtctctgactgtagcccagcaccctccaatgtcatgacatcagtgtcaggcagtgaggggaggcctgggtcaggtctggcaccacccctttctccctcttgttccccttggttctgccatggtgtgcatatggagcccagggcctgcagtcagacagacctgggtccaattcctgggccagtcctgtcttacgtccaagcctgggtttcctcgtctgtaaagctgatgatgctctaggctcctggggctgcagtgagggtaattaagactcctggcccagaggacatgcttggttagtgttcctcaggatgcaggaccggctctgcagaatcaagctggaaacctgagggcggtgccctttgcttgttggcagctccatctttgaaccctgggggagggacaggagtaaagcagcgctgggacccaggcccaggggtgcctgagcataggagccctgtttctgccctcctgtgtcatccatggcctggatttggtacatagatcagggggtgcccagggagagcctggcactgggaaggtggccctaccaggagagaaggtcagaggggctgcggactgcatcgtgcccctcctgcctgcccgcccgccaggtgcctggtgcacatcgtccgctccacctccctcaagtactccaagatccgccagttccaggagcacttccagttcgacgtgtgccgccatgaggtgcgctacggctgcctgcgggaggacagctgccacttcgcccacagcttcatcgagctcaaggtctggctgctgcagcagtactcaggtgaggggcaggcggtgcaggtggagggcaggtgactcaggtgaggggtaggcggcgcaggtgaagggagcgcaggactgactggggtgacaggccagggccccatggtcgctggagggggcttcgggagagttcaggagaggtggctgcggggtgggctctctgtgtgtcccaggcaccacagaggagagaagctctgctctcagggcgcttccaggctcggagatctgggtttttcccttcgtaggcaccgtccagggagcacggagaggggagaggagcacctgggctcctgcagcaggacctctgcttgctccctgggtggtcggcagcaagtcccc

SEQ ID NO: 103904 - DNA, 1001 bp, Homo sapiens
tgggaaagacgtgagaaagatggagagcgctgaaaagagggcaggcttcatggaagagttgtgagctggatctccaaggtcgggctcagtggcaacagtctgaggctggcggggagacagactggagagtccatgccaccaggctggggtatttgccctttggggactggcagtaaagagccgtggtaccacagtgaaccggtgagccaggctgggcaggcatggagccctaagtgccagtgaggccaggggctgccaagcaggcactaggcttgcagccctgttgagggagatgggggtcagggaagggtgctgagtcaccggcccaagagacagggtcactggcatgggagcagaggactccctaccacagtacagagccaatatctttctactgcattttcccactcttggctgcatttaattctttcacttccagtgaggctcggagcaggtctttgttcccattttgcagatggacaaagtggttcccttgtaccccatgtcttactgtggctgggctgagaatagggctcctccagctgggcctcgggggtccctggcacctcgtggaccccctgcctccctccttgctgagcaccttgaaagatgcctgtgtctgcccccaccctccccaggcatgacccacgaagacatcgttcaggagtctaagaagtactggcagcagatggaggcgcatgcggggaaggccagcagcagcatggtaaggccttctgatactatgccattattcagattttgtgaattgtccccaaattacaaacaggaaggctctaattttacaatagagaaatgtttacaatggaggcacctcgaataagttatgaaagtaacttggataatgtacacattcagctgttgtgtctcattttattttattttattttattttattttgagacagggtcttgctctgtcacccagcctggagtgcagtggtatgatcatggcccactgcagcttccacctcctggtctcag

SEQ ID NO: 103905 - DNA, 1072 bp, Homo sapiens
atgtcgcccccgtgatgcatatatacacaggtattaaatatatcgctctatataatattatatatgtgtgtggtatccaaggaatcacttttatgagggctaaagataaagaatttggccagaaaatgcagccatccttgtgtgattaggagggtttcaggggccactggactatttgcaaggtgacagggactggagccatggctcagaggtgattcgggcagccagggacaggagccaccctccccaggcccaactctgctagcttcccagaccacccccatcgagtgcggagagagtgggagtgctcagggaaagaaggtgatttgtatttgtctccccgctgaaaagaacaggattcaagtccagagttttcatcttcagcctgtgatctgtccagggacccttgggatctggggcttcctggcctggccagagctggagcccccacagggtaaggaagagagagtgggaggcagagtgtgatggggaggagggacaggaagacccttttaatgatgagggtaactatttcagttgtgagccttctagggccccaggctgggaggctcagaggactgaatctgggacctgtgttccccccggcaggcagggacaagatggcatggcaagcatgggggcggggtgggtggggagggatgctgcatttctcagctgggcagtaatcaatttaatggtcctttaaaatgtctgtgtattaaaaatttaagaataccacactttaatattaaatattcataaggtctagtatcttgataataatgtagatgttttaataacaatttttgtccttcttaaaataaaatgaaagaaacttgcttcccttagcctttgttctagaaaataaacttgtgcactttgacctctgtccccgagatgtcactcctgttcctccccacctggtacttatatccaggggccttagctgctctgtcctcatgggacagacctggccggtactagctactctgaggaatgctaagcattccgaggggtgaggggcaggtctgtgtccctgtgtacacacggaggccagccgaccctggctccg

SEQ ID NO: 103906 - DNA, 1050 bp, Homo sapiens
aaataacttttgtttctcgtcctgcccccgaggaaagggcagtgccctcaatgtgccctggtttgtgctgctccctccctggtatccctgctttagctctggccacaccagatgagttaggggaatccaggtggtgggagtggaaaaattgggttctctcgtggggaaagacgagagactcacagagggcacttccccacaggatgaaaagtactggacaagacgcaagaagaacaacgtggcagctaaacggtcacgggatgcccggcgcctgaaagagaatcagatcaccatccgggcagccttcctggagaaggagaacacagccctgcggacggaggtggccgagctacgcaaggaggtgggcaagtgcaagaccatcgtgtccaagtatgagaccaaatacgggcccttgtaacccgtgccccccgcccgggcggggtactgcctgcacctcagacctctgcctgggggctccctgtaacccctcacacgcgtggagacttatgactcgtcgtgggcgcatggcggcgcacctgctgcaggagcggccacgtctcagcttcattataccatggcctgcgcacgtggcgacgtccctgaggggccagtctcctcactggtggggaacgcaagagaatctgcgtagatgggtgactcagccttagtttctattcttggatgtcccagttgaatcagaaggggacctctggagtacacacctctctcctgggcgctcagggtccctggactctccctcagtctccagcctgggctgccgagggctatctctgcagaatgagttgtgatcattgtcaccctatgtcttctcaggtagcagggcgcgtttccacttaaggtgtgtctgtcacgcacctcattctccccagacagtctttgagtaacatctgttcccatcttccttggaagcaggacacaccagctcctccgtcagtgtctgcatgggtagcaggctgcaggagtggggtctctgcacagcctgggatggggcttggggctggggcctgcagcagaagtgtgcccagcgtt

SEQ ID NO: 103907 - DNA, 1008 bp, Homo sapiens
tgaagaggagacagaggcgatgggcgtgcttcgtcctccgtaacactggctttatttaccgtggtggttcagagtcccaggccctgacctctaaagacttttcataacagacgttaagaccaagccgtggacctcaccccaggggaatgccacggccctttggggacctgcacacccacctctccgggggacttgacaaggggccctgaggccaagggaggtcactcctccctccaggcccctgacttttactttgtggttctctaaaaaccatgtacacactttcactctattgtaaccacacagggcaggcgcatccagcatgtcagtgtcctgccccgggcagctctccctcccgggcacgctccctctggcctggtggatcaccaagagggcggttctcattttgttattagtggaagagccttgagcttaaaagctcttcattttctttgccggaaagtatatggtttgtgtttttgcagttttatttttttaaggatggacactaaatctctggtgtccatgttccgagcccggtggctgggatggtggctcgatgtgtctcctctttatcccgccctctgcctgtttggtgccctcccttctttcccccaggcagtgggtatcgggttctttcccaaagtgcttacttggaaagagtgtggctgctggactcttttcgaaatgcccctctgagtcaggagcctggtggggacaagatggaggatgtccacagaggctgacctgtgggggaaaagaagtgctcaggtaaggttgtctcctctcctgtcctaaaaaaatccatgcttgcaggagagggttggtgcctgctcagtttctgtcgagggaatgggagtctcctcggctccctcctgggccctctgcttcttggaggccgaccgctggagactgcggctcctgtgcttggatctttgacatctgtcagtcactggaggctagagaagttgactttaccttggctttctgtgggttcccgatgggctt

SEQ ID NO: 103908 - DNA, 1100 bp, Homo sapiens
tgatggaggaacgtgtgcatttagagagagggagagttttcaaggtttatggcaactttgtggaggacctgggtaactcttacccttggccaaaggaagaggttttcctgtctggcttctgaggttggagggggcacttagcagtgaaccttaagtctgggtacatgtaaccctgctgaggggctgtgcaggccgctcctacggtcctttggcctgaggcagggcgggaggcatgcaagccagtgggggaaaacccctctgaagctgggcagccctctacctgggccccgggagccgtgctccttggaacgcaaagggccgaggagcatctggttttcatggcaaagctctactccagagctcctttaacatctgctaattaagtgcaataaatttttctagaaaatggcaaagatgacttccaggtggatattgctctcttacggtgttggggatgccagaacaccacttggttttatttttctaagtgcatgtgatgtgatagagtgtgtggggctctgtgtccttccctgggagctggcattccagcgggcccctctctttacctttgttgggggaaggaggcaagagagaaattccttcttcccagccagagagggcagaagcagaccgtagcccattggccttatgtgcgtgtgtgcgtgcgagtgtgtcactgctggtgggccggagtgatgtggtgggagggaagccgggaatgtatccttttcagacaaaattaaatattttgaaatgagaatgttgggattgtcttttctgtccttctccccacccccaaccctgagtttcctctcttgagtgttggcctaggagctggagagtcaagctggaaaacttttatctcattagaatccaccccagacacccccttcatcacagtccagacactcttagcatctgaccccaaccactctgcctcagtttcctcatctatcagatggaagtgattctcgccttgcttatattgaggagggacaaatattagaccaaaagcagtttgaacaggtaaaggtgctacacaactagaagacagggaactgcttatgacaagtgttctcgaatagagaatgcgtgatggc

SEQ ID NO: 103909 - DNA, 1039 bp, Homo sapiens
ctcccacacaggtgacagacccagcagatagcttctctctgggaaaggttggatgctgccttacatccccttctagccctcctcccatccacacacacaggcacccacccacaccaggtcggcttgtttctcacatgtagggagagaggggagaccaacccctttgtgtcttttgaaatacgaagaaaaatgtgtgttcaggagcatgactccagtgctgcgctcttgggcccagttcagtctgtcttgtctcaaatctaggcatttttgcttcaattttattttttttaagaatacaaaaacagaaatctgcactaatttacctggtttcgtaggaaaacttttttttattttttacattttttggtgtccgtttgtattgaataatttgctacatttgtaaaatgtaagaggtatataatatatgtatatttctaacgtaaaaaacataatttttttcttttcaagattttttcttaaaaagatgagagaaacatattttttcaggaaaaacaaactttaaaaaaaaaagaggagaaataaaaccttttctcccctttccccatcctctatctatccctctttcccaggaacaaatcaaaaggtggattatcttctgaagaatggaaactgttagtccagaatgatgtgtttttctcaatgcagtgagttatagattctctagttttctccctagggatgggaagggggcattgaggcaagcctggagaggagcccggggagcagggtcatgaacttttttctttagtgaaggaggaatacaatcaagggttttgtattcagaatgttgtgcaatattttggaatgggacattggtgtgtttagagattttagtttaaaaacaaaacaaaaagattgatcaaatctgtacagtttctattgttccagatttttttaagtttgtattaaaagcatgatacataatagccttctgcctgctcctggcttgcttggtttctggggtcccttttgggatggagagaatgggagtggcccagcccttacagactccaagaaa

SEQ ID NO: 103910 - DNA, 1028 bp, Homo sapiens
gggcgggtggccagcagccaccacagcagcctcgcatggcccgctcacccaccaacagcctgctgaagcacaagagcctctctctgtctatgcattcactgaacttcatcacggccaacccggcccctcagtcccagctctcacccaatgccaaggagttcgtgtacaacggtggtggctcacccagcctcttctttgatgcggccgatggccagggcagcggcaccccaggcccgtttggaggcagtggggctggcacctgcaacagcagcagctttgacatggcccaggtatttggaggtggtgccaacagcctcttcctggagaagacaccctttgtggaaggcctcagctacaacctgaacaccatgcagtatcccagccagcagttccagcccgtggtgctggccaactgaccatctacctgcccgtggggccaggagcacccaagaccacagaaaagagaaaggaaaggccaaaaaaaagaggaaaagaaaaatgtacaaaaagattttcgatcttctcactcttacttctagaaaaaagatccagcccaggcacggaatgggagggccctgcaaagcacccaagtgtgtttcactcaccccttaccgctcgcccaccggcctgtgatttatttggttggtttgggttttatatttctttttcttttttttttttcttacatgtagttttctatataacatctttaatgagtggcttcctgtgctaagaatggtccagatgtgaactgctgctccctgctcctcccttcctccttcacactcctagtttaggattgatgtgtccaagctcatagggaagaaagagctgcagctggagcctgaccctccctggaacagggagaggctggcccgtgtcactgcctctgtcacccagctatcctcgcactcaaagccatccaacctcagcaggccttctcgggccctgccacctgaataggtctgaccccagtccccactccctttcaggctgggccacagggagttgctggctggccacttgac

SEQ ID NO: 103911 - DNA, 1036 bp, Homo sapiens
cagcagaaagggagcagagcccagagcatcaccaggagtgcctgctagtgtactggcagcttgccaccccctcctctcccttcacccagacacgtggtagggatggaaaaggattcttcacagagcactctggcacaccatatcggagaaaacttgatagattagttaatggtttttcttgaattcgagaagcaaagatctgttctccatattggtatgttctccctcaaccaagatcttctaaaaagaaataatattttagtcttctgcttgaggaactgactgtgaagcgacgcccagtgaaaaacatgttcttgcagcagctctggtggcagctgtccttgaggaacctttggtgtgtggtgggaagctatcagaacaagaaatgtaggcatttcccgttttttttggggggggggtgggggggcagggctctgccctcttgaaaggcatttacttgtttaacacttgtccagctacagtggggtacagtagctggctattcacaggcatcatcatagcccactagtctcatattattttccttttgagaaattggaaactctttctgttgctattatattaataaagttggtgtttattttctggtagtcaccttccccatttaactttaactctaggaatttattttagtcacccaggaatttgtgattcaaaacagaggtagtgggattggttaagtactttgtcctcttattaccactggaaggaattcaaaaccacccatacctttcattatagatagatcaaagtcatctttagaaacgtactattttttccttcctgtccaactttaattttgaactgaagagatagcttccagttatggtggaggctgggcacagtagcccatgcctgtaatcccagcactttgggaggctcaggcaggcggatcttgagcccaggagttcaagaccggcctgggcaacatggcaaaaacccatctctatgaaaaatatgaaaactagtcaggtatagtggcatgcacctgtagtttagtcccagctactcagaa

SEQ ID NO: 103912 - DNA, 1905 bp, Homo sapiens
tcatagccacttaaatctatcattaagcactatttgggtgtatatcgtgacaaagttgaatttgggacaattcaagttgacttcagctttaagcaggtaacagatgcctttggtttaatattgcagaaatgattgtggacctgcatcgtgattttttttgtcccttgacactgtgtagtggcagtggctactttctattcaactctgagccaaatgccaggagagagagcttatagactagtgctacaggcaagatttaccccatttttttcggttagtattggcagcagggttctttgtgggagaaaactatgaatcagcttgttttcttcaaaaaacaaaaggaagtatgatacagtctcactaggttaatgatggtacctagttatctaatttaattctaattcagaataaggcaaaagatgcgtaattcttcatattcccatgagcgaagaataggtcttttatagatgttatcacaccttgttcctcacaataagtttgtgaaatagggattattattatgatgcccattttgtagttcctctgacaagcccaggctgttcaactaaaccttgtagtgtccttatttcactatgttgtccttttatttatttatttatttatttattttttgagatggagtttcactcttgttgtccaggctggagtgcagtggcgccatctcggctcaccacagcctccgcctcctgggttcaagcgattctcctgcctcagcctcccgagtagctgggactacaggtgcatgccactatgcccagctagtttttgtatttttagtagagatggggtttcactatgctggccaggttggactcaaactcctgaccttgcgatccacccatctgggcctcccgaagtgctgggattacaggcgtgagccatcacgcctggccttatgttgtccttttacaagtgtttctgggatgtgcccatggtgaaggcagtaacgccagtacctcatttcacgcacttggatcctgcctacccccagtaagtgggagagattgggccagataagaccacaccattgggccaggcacagtggctcatgcctgcaatcccagcactttgggaggttgaggcaggtggatcacctgaggtcaggagtttgagagcagcctggccaacatggtgaaaccccgtctctactaaaaatacgtggtggcacacatctgtaatcccagctacttgggaggctgaggcaggagaatcgcttgaacccaggaggcagaggttgcagtcagctgagccgagatcacaccattgcactccaatctgggcaacaagagcgaaattccttctcaaaaaaaaaaagtgagtacaccattgaatcttctgttgtttagggagatgagaaaggtcctgaagtaccaaaaacataatgatttggacctttctcttgtcctcaactctgatttgcatttaccttcaactatcaagtcacattctgctgtccgaaaatccaaatctagtctactagctagattacacttcattagaggcaggactttggtttgtctatttgcctctccttttctttaggtcatgatacagtgcctgacatgcggtgcaagcatggtacttgtattttggtgctgtccctgtaagtcatccagaggtatcccctgtagggtgtctagcacatagtaggtgtttgttaattacttctggtctataagcagtgaaagcatgataaggtaacagcagtgaagaaaagtaacaaacagttcctaaactagatacaggatatctgtttaagccatttaagacagcattttcttgaatttttgcatgggtctagctagagttcttatgtagcgtaagcttgcaaccagagaatgcttaataaatgttaattgctgtctgactcctctgaatgtg

SEQ ID NO: 103913 - DNA, 1755 bp, Homo sapiens
aacatcatcctgatttgatcttttgccgcaagcaggctggtgttggtgagactgcgccctacccctggctgtctgggcaggggtggtattaggagctggggggtcgggggttcccgtctcttccttaggggcttgcctcgcaggcgccacgtttcccgcctctcaggcgcggggtgttgtaggagcgcgcaggtttgtggcctctgatgagaagagggcgggggtgcgcgtgctgggagccccaggcaggtatcggggggtggggtctgaaccaggtccagagaaactctgagcttgcccagggcgttggaggagattcaggagggtgcttggatgtaggtttggttcatatggaaatttgtaatgataaaatggctatccgcaggtctcactcactgcagtccttactcatgtccctacccccagctcgaggatgtacttctcctctttctcaaaacctttattctaattgtactttttaccatctttcatcttgcagccatcggaagactgtgtgaaaaatgtgagtggaacacaccgtcccaacaacccacccttcccactcccagttttctgtggaaccagcaaaagtgccacaaagagggctttgagtagatgtgcctggaagtatgtgaacactgaatgctgcactttagccaaaggcccctctaactccccactgccgcttgcacatttaacgctgtatctctctagttttcaacgggaagaatcgccagagtagcatgacccctccccaacacacagcactttgccagcaattatacaggcttatcatctccgaggtgcttttctaagctcttcacatatgttaattggtaaacttttgtatgtgttgaggggcttgagatggacactggggaaaccaagttttgtgatgccaagaggagggccctaaagtcactgtcaaaaggagactagtgtatttcccaggagactagtatatttccccatggcaggagatagcagaggactgaagaacttgtgagcatgactccattctcttccttacaggtgatggcaagtgtgtgatttgtgactcctatgtgcgtccctgcactctggtgcgcatatgtgatgagtgtaactatggatcttaccaggggcgctgtgtgatctgtggaggacctggggtctctgatgcctattattgtaaggagtgcaccatccaggagaaggacgtaagtgtacagctttccatctgacctttcctccttttgtttagtaacactttgccatccactgcaatctcctatggtctatggagattactgtgttcatctagtcatctaggttataatttcttcaagttctgtgagtcaaactgggtgtagtccaataaaaggcagttattttgcatcaaggggaagaatgcaagggaagcaaatctttgtcaagaccagcaatttggagagccctctcattcatgtctctgtggttattcttattcagaaatgacatccggctgggcgtggtggcccacacctgtaatctcagcactttgggagtccaagttaggaggatcactttagtccaggagttaaagaccagcctgggccacagagcaagatcccatctcaaaaaaaaaaaaagtgttttgttttttgttttttgcttcttgttttttgtttttttgagatggggtctcttgctctgtggcccaggctggggtgcagtggcatgatcatgtgcaaggctcactgcagccttgaccccctgggctcaaacgatcctccc

SEQ ID NO: 103914 - DNA, 1081 bp, Homo sapiens
gagacggggtttcaccctgttgaccaggctggtcacaaactcctgacctcaagtaatcggcctgccttggcctcccaaagtcctgggattacaggtgtgagccaccacacctggcctcttcacgtcttttgattctctaggttaatgatgtggaaatagttgtttcttcctgtctcatgatttaagggagtcaggcaagattatttgataagataaatgattatagagttcttgaacttggaagagaagaatagtatcacaccattttgaaccgaaaaggatcttggaaagtatgagtattagactggtgtagaaggagatctgggctctctttcctgatcctgtgaccttgagtaagttacttcctgaatccattgtccattggagatgatcttcattgaacaaatgtatattcagcaagtggatgttagaaagtgatgagcaagtagaatgagtttacaaccatcacgtagactaacctcttatacaggtggaaaaatctaagaccttgagagcctgggtgacttccagtagcagagtcaggattaaaatcctggtctccttgtttgttccttcagctaagatgaatgaacaatattatgcagtttgcacactgcctcccaataaccaggctgtctcaaataaccaactaacacggtttctctgagaagcttgtatatttaccccttttgtgcttagatacatttgagaagtgatggttactaccttaatagtcatgtatgcaaaaccctatgcctgtagtcaattcattcctacctcattcaccatatatttactgagcgcccaatgcttgttctggataccgtggtaagcaaagacagtccctgttctcgtggagcttccactgtattctaatgtacctgactgcagagggccttggagatctttctcagccaaatatagtatttttctttccttggctggaccaaaggtgaaggtagataatagaatgatgggtgttactcccagcactaagagtacctaacatttatcttactgtgtatgactaatttcacatgactctgtgagatgaggcaggcctattagcctgatttataga

SEQ ID NO: 103915 - DNA, 1068 bp, Homo sapiens
atgagtaagataaataaggcttgatctcaaccctcaagaagcttatagtgcaggtagactaatagctatggtttggatagtgttttacagcttaatgagcactttcacttatggtcttatttaaccttcccagtaccccgtgtgatcaccagagctggttatatccctattttctatctcctctgggttttagtcaatgagggcttttcttacattgatacaccttacatgatagaacttgactttgatcccagcgatttttgtctataaatcccttgcacttttttcctaccccaggctgtgttccttgtggctgctttgtcatccctgtcctgcagatgaggaagctgaggctgcagttactgaacagctcttgacactttaattcctggatttttttcaccatactgagctgccctcggggatggactctcctaagtgctccattgacagtggctgtcatgtttcttcttgcagaaagctctgggtgtgcggcagtaccatgtggcctcagtcctgtgccaacgggccaaggtggcgatgagccactttgagcccaacgagtacatccattatgacctgctagagaagaacattaacattgttcgcaaacggtaaggctgcagatgggaggctgtgactgtcaagggcattgcgtctgctgcctgcccgtcaggcagagaaggaggtgttttgtgaaggatgcttggtgatagtggcagggtcaaggtattcaaggtacaaaggtttctgctgaggaaaggcattccagatcagtggtgtaacttctgtcctctctgccaagggagaatctgtgttatcaagaagcctctagatgtgaaccacagccaggtctctgagacactttggcactataacctgaacctcccaaccttttcagggcaggctgctgaccctcggcctgccctctggaagccaccaggcccagtgcctggagaatcatcttctatttcctcttcagtgcacaggcacagaggagagctcaggtctgagacccagaagataaactaagatgggacctttttaatttaattttattttatttta

SEQ ID NO: 103916 - DNA, 1027 bp, Homo sapiens
gtggggctgagggcacagagggaagtagcgaaatctagctgtgaacttggtcactctcctgagcctgtttcttggttgttgttaaatggctttcttggttgttgttgttgttaaatggcaggaatgatgagatatgcatgttgcggggacttagtaggaattacgatgctgggaaagccaggatcctttgaaaagaaccagcgctgccctcttgtgatgttgtcattcacttactcatcaagtaattgtggagcacctaacaagtgccaggtgctgcaggaggtgaggaggtggtgcagtgaacaggacccagcagtccccacccaagtggaacgttgaggtcctgagttcagactccctgtccctggccactgttgaggttgccacatggactgagagggagaggcagggcgggaggaggccgtgcagctagcaccaggccacccttctgctcttctccccacagactgaaccggccgctgacactctcggagaagattgtgtatggacacctggatgaccccgccagccaggaaattgagcgaggcaagtcgtacctgcggctgcggccggaccgtgtggccatgcaggatgcgacggcccagatggccatgctccagttcatcagcagcgggctgtccaaggtggctgtgccatccaccatccactgtgaccatctgattgaagcccaggttgggggcgagaaagacctgcgccgggccaaggtgagcagaaggtggctttgggggtgggcaagtgggcaagactgggcgagaggcctcaccctcacactggagcaaaccagggcattgcctccaaattctcacacctctttggattggtctgcttttaaaacttgattttacttgtttctctttctaaaaatagcacttgctcattatgttaaaaaatacagaggaagcctaaagaaagaaaaaatcatccttgaccttaccacactgcaggtcctttttctgtcctgttggaggatgatgtggatcctgccaggtgctctggaaggggccat

SEQ ID NO: 103917 - DNA, 1148 bp, Homo sapiens
ctggggcctcccaggacttcttcctcaggggccttgtggggctggagccagctcctggaagaaccaccaaccccgatgagaagccaggtggggatgctccacacccaggatgaggccgggcctgggcccatcacaggacagtttctctggttcttgtcacatcctggggtcatggtggtatgggtgtttggttactgtgctacaaatgaggaaactgaggcatggggcagcattcaaaggcccaagacatatagcaggaaatatcagagctattcaagagcccaggccacctgtctcccaaggctctggctcttcttggccaccctggagacggcctggattaaatggggctgctcctaccagttccatcctgggagagtggctggacgtggttgggaggccccgggtcagtggggccattttttggtattctcggctgagggcttctaaatataacatcttggattatttttcagattattctggaaaactatgcgtaccctggtgttcttctgattggcactgactcccacacccccaatggtggcggccttgggggcatctgcattggagttgggggtgccgatgctgtggatgtcatggctgggatcccctgggagctgaagtgccccaaggtgagggtggggagggactcattctgggctggctgtggggtggtggttggtggggatgaacgggagacggtgggacccaggagggaaaagggaacaagttagactcgaatcttctgggagggaggtagagaccaataagcagcaatgtgaatggcagcagggccatcctgacttcgtggctggcacaggcacacacggcctctcacagccgcctcgccccctcctgtccaggtgattggcgtgaagctgacgggctctctctccggttggtcctcacccaaagatgtgatcctgaaggtggcaggcatcctcacggtgaaaggtggcacaggtgcaatcgtggaataccacgggcctggtgtagactccatctcctgcactggtgaggaaggcggccaggcgacgtggcccctaccctgtgctgggcctgatgggtctccagttgggagtagaagcggtgaatggccttcacttgagaatctgtctgttccatttggggacttgggatagaca

SEQ ID NO: 103918 - DNA, 1032 bp, Homo sapiens
tttatggcatgaccttgaatctctctgagccagttcctcccctgccaaaaagaatagcaactgggcagtgtctggtcaggtcagcctacagtacgtggtgcctgttcaatctcttgggcgacagtcaggccccaagctcgcagctcagtgtgtgggggctgaatcttcacctgagtcctcttcattctacccagcagccaccctgagctggggccctgagctctgatccccatggcctcccctcaccggcccaggtttttacccagggcctcaagggatgagtcggcccgctgtcaccacatctctctgagtgggaggagaagcaatgcagctccctggtgtgaagatgcaggtggccgcgtagcaggtgtgtgggaccctggcccggccaccagccaatgcccggggctctgttgctccacaggcatggcgacaatctgcaacatgggtgcagaaattggggccaccacttccgtgttcccttacaaccacaggatgaagaagtacctgagcaagaccggccgggaaggtgagctggcaggggcaggcccgtgtgggtggaacagtcacatgcccgctcctccccaagacagagctatgcctttccctgtagggcaggggttcttaacccattgtctccagacaggcgtccgaggctctgagaaagccctgaagaggtgcaatatgtttctgagtagattgtctggagctctctccagcttctcaaagggcctggcatctgagttcaagatagccccacctcaggatgggcatttcattttccctggaaggtggctgaatgcccgcccttctcggcctggtccctgctgccccctacaggaaactccggaaatgacatggatcgcttctgttgataattcctgacctagcaggggaacatttggaaggagaaccactttcccagcctcccctgacaacttccctgaggctctagcctggcttctttggagctcagagggcattggcacctgtgaagggtggtgcgttgtgggagtgaacgaggagccagag

SEQ ID NO: 103919 - DNA, 1986 bp, Homo sapiens
aggctgaggcagaagaatggtgtgaacccgagaggcggaggctgccgtgagccaagatcgtgccactgcactccagcctgggcagcagagcgagactccatctcaaaaaaaaaaaaaagattccaaaagcaacatcgaatgggagataatgaacttaggaagctgacagccttgatccattccatgcctctgctgtctcctagctatgtgacttcaagcacagcatgtcacttctgagcttcagttccttcatctgcagagctgagcccagccttgcagggctggagggagcccgggagcgggtgtgtgcagagccaactgctcagttcttccctgtgatgaggtttcagtcaagagaaagtcgttggcctctctgtggggacgtggtgaggcagtgaaagaggctgtccccgcttcaaggtttcttccctcctctctttcttctccttgcatgtttgtttcttcagctgaagccacacatcaatgggcccttcacccctgacctggctcaccctgtggcagaagtgggcaaggtggcagagaaggaaggatggcctctggacatccgagtgggtgagcaccttccaccccatctgtttagcaggtctcagggccagtggctctgcccagggctgtagacaatcacctatgcctactgtgtggcactttctaaggtgggcagtttctgaaatgggtttattattgaaaaattactttttcggccagaagtggtggctcatgcttgaaatcccagcatttcaggaggccaatgcaggtggattacttgagtctaggggttcaagaccagcctgggcaacatggaaaaaccccgtctcttaaaagaaaatgcaaaaattggccaggggcagtggctcacacctgtaatcccagcactttgggaggccgagatgggtggatcatgaggtcaggagatcgagaccatcctggctaacacggtgaaaccccatctctactaaaaatacaaaaaattagccaggggtggtggcaggcacctgtagccccagctacttgggaggctgaggcaggagaatcgcttgaacccaggaggcggaggttgcaatgaaccgagattgtgtcactgcactccagcctgggtgacagagcgaggctccgtctcagaaaaaaaaaaaaaaattggccaggtgtggaggcgcatgcctatagtcctagctactcaggaggctaaggtgggaggatcacttgagtcctggaggtcaaggctacagtgagccgagatggtaccactgcattccagcctgggcaacaaaggcagactcaaaactgcagactcaagcaacagagcctgcctccaaaaaaaaaaaaaaaaaaaaaaaagaaagaaaagaaaaattactttttcttggcagaaaagaaaaatatgtttattgtagagaatattcacaatcaagaagaatttttaaaactcctaatctcaacccccagccaggagcaagctcttagagctcttggagaggtgtgctgtgtttctgtgtattgtgtgcatagattttcccgttttacattttatatcacccatgctgctttatgtgacttttcatgctttacacatgcagacgccctggcatgccagtcactggcatctgctgctgctgggtacagtgtggctgtgaagagcatggagcctggagccagatggcctgggcttgaatcctggctctgccacctaacagccactaacagctgagtgaccctgagcaaactacttcactgtctatgtgtgggttccccatctgtaaaacaggagtcatgatcgtactgacacctttgaaggtggtgttgggcctactgctgctatcaccaatgagaaaaataaataaaaaataaagttgtctggagaagtgacaatatgtgaaaagagatttctataccgtctggccgaaaataagggcaatataatgtgttcgcccttattcattgaagtaattttaagaaaaaaaatatttg

SEQ ID NO: 103920 - DNA, 4834 bp, Homo sapiens
gccagtcccaacactttgagaggctgaggcaggaggatcatttgatcccaggagttcaagagcagcctgggcaacatggtgagactttgtctctacaaaaacaatttattgaattagccaggtgtggtggtactcacctgtgggtcccagctactcaggaagttgaggcaggaggagttgcttgagccccaggagttagagactgcagtgagcaagcctcgactgtgcccttgcactccagcctgggcgacagagcaagaccccatctcaacaacaacaaaaagagactgtctagacagaaagtgcgatgttattcaggttttatagactttttaaaaagaactcttattgccctgattataaaacaatctttaaaacccagaaaatactagaaagtataaaagaagaaaattagcatctcctgtcagccccagcccatcaaggatggctgttcgtatgagccctctgacgtgcctacacgtgtacatgatattgctgtaaaaggggtcatagtcctaatgtgttcagcatcatggccaatggctacagcatctttcttcaaatgacgccacgtcatgagttagcctgtcctttattgttggatatttcggttgcttgcaactggtctctgttaaaaaagtctctggcccagcccagatggtgaactcttttggccaagtctggataatttgaagtcaggtggagacctctgctcactgtctcctcctgacccttaaccccaccacccacaatgcaccaggtctaattggtagctgcaccaattcaagctatgaagatatggggcgctcagcagctgtggccaagcaggcactggcccatggcctcaagtgcaagtcccagttcaccatcactccaggttccgagcagatccgcgccaccattgagcgggacggctatgtgagtgcccatatccccctgcccatctcccccaccccatgctgagtaatgcctccaggcggcacaagcccagaggcctgttgggccggggctggggcaggtcccagtggctgccctggggttccagtacagcacttcgtcctgcagccaccacatcaccccttcccatcagactctcacccacccttgacattctgtcttcctctctccctggcaggcacagatcttgagggatctgggtggcattgtcctggccaatgcttgtggcccctgcattggccagtgggacaggtaagaggcgtatcttttgacaagacagccccttgtgcacagggtacagagccccagaagttggagggggaattattggggtggagagaagagactccagccaaggtctctagctccagggactcttgcccattagaagcctctggcagacatgcctgggaagaggggctgggtgaggaagggccctgcagaggcactggggggcaacttggctgaagcctgggctggcaggaggaagccagcgcggcctcaccctgacggacacagcaggagccgtttgggaggaggcagtgccccaggtcaggaaactcaggccttgaccaaggccttgcctctggcttacgtgtggttgcaggctgggcccagtgatcctgaggttcccttctgctctgcgcgtggccccaggaggaggcaaccctggcagggcctcttcattttccctcggtaggagctaggctgggctgcgccacaggaacccagcttatctgtcctcgggacaggccaggtgacaaggccagatatccctaaccctgatccctctgacctggcaggaaggacatcaagaagggggagaagaacacaatcgtcacctcctacaacaggaacttcacgggccgcaacgacgcaaaccccgagacccatgcctttgtcacgtccccagaggtgagactgcccagctgcgcacaagcctgggatggcctctgggggtccctggcgggtcagaggaggaggcagaaggagatggggactggggtcatccaagtggtagccaggagctacaggccttcccagcctcaggcgcatgcttggtgcttcctgcctggggctccctgggtcatgggattatgagatatttatacagtggtttgtgcttatgagcatggaatttggaatctcactcactgcctaggacacatcccagccctgcctctaactcgctgtatgagtgtggccaagtcacttaccttctctgtgtccccgtaatcctcgggattacctgggaaagtgcgtgggacacatgcagtttccaaccccaggtaggagttccacaaaagcgaggcctttgccattgttcccgtggccagagtgagccttgcccttggcggtattcagccctggccgtgactggcacatggccaggctctcttgacttggttgtttatctgcgtgttctacaaatatgtcttgctaaatgggtgaaggaatggctccttccatgtttttagtgtcctgcgcactgagcaggtttgcatcataccagcatttctgcgccagggcccccactccctccaggatagctgtgaggagagagaacagcactgccggcccggccctgcagggatgggagaggccgcactgcccttggcttcctgagtcctctgcaggcccaaggccccgtggtcccaaagatcgtcctgcagctctggcctctgaggaacacaggggtctgggaagaacatggaaatttcctgggttcctttctcagttttggcctaggcttttggtaggtgcaggagacaggagtggcaattggtgctgaccaacaaactggccacctccatttcagattgtcacagccctggccattgcgggaaccctcaagttcaacccagagaccgactacctgacgggcacggatggcaagaagttcaggctggaggctccggatgcagatgagcttcccaaaggggtgagcgcccacgccccctgcttgctggttgctgtgtggccacgtcacttccttctcaacctcacagcacctcctgtgcaggcagggagggcgctgctagtgagaaggaagcagctctgttccctgggaggggaggtggggcccgaggaaacttgccttctgagagtctgtccttgtgggaactgaggactcagcaccccacgcatccccattccctgctgcaggagtttgacccagggcaggacacctaccagcacccacccaaggacagcagcgggcagcatgtggacgtgagccccaccagccagcgcctgcagctcctggagccttttgacaagtgggatggcaaggacctggaggacctgcagatcctcatcaaggtcagcagcatggggacggcaggacagccccaccctgccagggccccccgtcccctgagcatcgggaagggccatgaacctggaggaagtgagcacagtcaagacgcaggtgggagatggaagggaggtttggctgcagagcagagagggtatcgcaacgcagtccagcgtcccccttctctgtggccccgaactgggcagagctagatctggccagcctccgtctggggccctcagccatccagcagcagctgatcagagccacctccagtgggtgtgggcaggtgagtacagctcaggctgggctgggacagtgtgtgtgattgcacagcaggctccacacctggcacgtccacacaggctctggaagccatggacaactcctgcccccacagttgggcacccgtggatatgggatggcttgtgtttggcaccgaccaaaaacaagcctttttggtgtggccagaggcctccaatctgtgtcagatatttatttatgctgcttattaaggggtctccaggcacccctgtgacagaagagactaatcagtcatcagccaggacccaggcatgtcctgggctcctgtgtccagcatgaggtctgtggctgatcttgcagctgaggcctgaagggtgagcgaacattgacctgtcccaactttgggcggcctctgccccataagggagactgagcagccagaggcctttgaggggatgaaggcctggcctgagcccatgtggccttagggtggaagcaccaggaccacagaacacgtgtctgaagacttgcctgcctctcacccctctgtcacccctcctgggccccggggcctgctgcctgcctctggagggcttgtcatccacccctccagggccatgccctgacctctgtcctctctacttaccacccaaggtcaaagggaagtgtaccactgaccacatctcagctgctggcccctggctcaagttccgtgggcacttggataacatctccaacaacctgctcattggtgccatcaacattgaaaacggcaaggccaactccgtgcgcaatgccgtcactcaggagtttggccccgtccctgacactgcccgctactacaaggtgggtcagagttgataggggcaatgccagtggtcactcctgaaggggcctgcaaggcaggtgcagggaggacattaggggagtggaaactgggaaggaggccgaccaagcccaaaggggactgctgtggaagggaggagaggcctgcagcccctccctgtggctgagaaggcatgaggcccaggtccggtggtacagccgggtccctgcaccaggaggagttagtgagagatatcttaggatatctggccctagacaaagacaaggaagggggccgactcaggaagtcagaggccaaaagctcagagagggggctacacggggcctcacagtgagcaggcagagagggtctgaggtgattggactttttctgctttgagaaacaaacagaaccagggctgaacccaagtcctggcccagccgggtgaaaggactctggcaccccctggt

SEQ ID NO: 103921 - DNA, 1106 bp, Homo sapiens
aatgttgatggcaccaatgagcaggttgttggagatgttatccaagtgcccacggaacttgagccaggggccagcagctgagatgtggtcagtggtacacttccctttgaccttgggtggtaagtagagaggacagaggtcagggcatggccctggaggggtggatgacaagccctccagaggcaggcagcaggccccggggcccaggaggggtgacagaggggtgagaggcaggcaagtcttcagacacgtgttctgtggtcctggtgcttccaccctaaggccacatgggctcaggccaggccttcatcccctcaaaggcctctggctgctcagtctcccttatggggcagaggccgcccaaagttgggacaggtcaatgttcgctcacccttcaggcctcagctgcaagatcagccacagacctcatgctggacacaggagcccaggacatgcctgggtcctggctgatgactgattagtctcttctgtcacaggggtgcctggagaccccttaataagcagcataaataaatatctgacacagattggaggcctctggccacaccaaaaaggcttgtttttggtcggtgccaaacacaagccatcccatatccacgggtgcccaactgtgggggcaggagttgtccatggcttccagagcctgtgtggacgtgccaggtgtggagcctgctgtgcaatcacacacactgtcccagcccagcctgagctgtactcacctgcccacacccactggaggtggctctgatcagctgctgctggatggctgagggccccagacggaggctggccagatctagctctgcccagttcggggccacagagaagggggacgctggactgcgttgcgataccctctctgctctgcagccaaacctcccttccatctcccacctgcgtcttgactgtgctcacttcctccaggttcatggcccttcccgatgctcaggggacggggggccctggcagggtggggctgtcctgccgtccccatgctgctgaccttgatgaggatctgcaggtcctccaggtccttgccatcccacttgtcaaaaggctccaggagctgcaggcgctggctggtg

SEQ ID NO: 103922 - DNA, 2564 bp, Homo sapiens
tgggtggggcagagggtgctcccaggaagggggcgccttgagcttcacagatgcatcttgtgtggggcccggaggccgtccctgtctcacccaacctccctccacacacacctgcctctgccaagcaccaatgggtggcttctgtcttctttgccactgcaaacaaccacgtgcctctgtcccctcggggcctcgtttgggtctcattcacgcaggcttcacttgcccttaggcagcaggcgaggaagggcccctccagcccctttaccgggagcctcaggatgcccaggcgccaggtgggtgaggccaggcaggtagggccagacaggtgaggacggtgccctcctctgccttataaccttacccccgcttgcctgacagaaacatggcatcaggtgggtggtgatcggagacgagaactacggcgagggctcgagccgggagcatgcagctctggagcctcgccaccttgggggccgggccatcatcaccaagagctttgccaggatccacggtgagctggagtctgtacccaggccatcctcatcccatccctagtgatcaaggtcactctccctgcccgtggctgagttgggcctggttctaggctgtgtccactgcagcccacaggcccgtcagcctcttgccccttcttaggctcacacagtgcacatccgacgctcagcttcccggcttcccgcaggccctgcttccaggcttgtagatctgagccgctgagatctaggacatgtgccagggggttctttctgatcatgaatgtgcagcaggaaggcctcgcagacctcagcaccagcgcacacttgctaggggcacccctagtgaaagggagcagaccagggccccatagtcactgcccgggcattgtcccaggcagcaggattaggggcatctcccagagccccagatgggttcagaaaatgaagctctccaggctagtcaggcccccgatgaccgaatgccgcctgctttccagagaccaacctgaagaaacagggcctgctgcctctgaccttcgctgacccggctgactacaacaagattcaccctgtggacaagctgaccattcagggcctgaaggacttcacccctggcaaggttaggggcccgggtccccctgaggtggtggggtgaggggcagccaccttgtttcccctcctgcactggccccagggtagcttctcccaggaggcttcattccagctggaaaggcccccagttctccaggtggccccacagagaaagcaaagtggcttctcagagttgggggttggagtcaacccggggccctcacacctccccaacctccctttactcaccaggacctggcactcaggggacagcccacccactgcaggaccctctgggccccaggaatcccctgtaggtgccacctgggtctgacctgggccatcaggcacagactggcctaggatttggtttgcctgctgacctcttaggtccccaggcagtgccctgtctccctgacccccctgcggggccaagggcacacagtacccaccacttccacccacacccaccttctccttgcagcccctgaagtgcatcatcaagcaccccaacgggacccaggagaccatcctcctgaaccacaccttcaacgagacgcagattgagtggttccgcgctggcagtgccctcaacagaatgaaggaactgcaacagtgagggcagtgcctccccgccccgccgctggcgtcaagttcagctccacgtgtgccatcagtggatccgatccgtccagccatggcttcctattccaagatggtgtgaccagacatgcttcctgctccccgcttagcccacggagtgactgtggttgtggtgggggggttcttaaaataactttttagcccccgtcttcctattttgagtttggttcagatcttaagcagctccatgcaactgtatttatttttgatgacaagactcccatctaaagtttttctcctgcctgatcatttcattggtggctgaaggattctagagaaccttttgttcttgcaaggaaaacaagaatccaaaaccagtgactgttctgtgagtgattggtgtctgtgccgtttgttgtcaagtccagggtccaggaagggtcttttcagtcaaggtcagtggaggcccaacagccacagccacagatggatccatcactgcagtgaaggaggagcagggcctagatggtggaggagcggggcaagctggtgggcactcctggccttgcctcactgtccagctcgagacactatctccttagcatcggcctcagctgctgttgtcttcacagccggccataccaccttcccgcaggctggtagggtccactgtccagccccagggctagttgctggtccaccaggagagaaggcccaggcctggctcactgatggatccctgccagggataaagaacacgcacatttcactgacatgctggcttgaaccaacctggacaggaggtgaagggagcccagcaggcccagcacaggcaaagaagaggcggggcacacggcagccaagaggctctgg

SEQ ID NO: 103923 - DNA, 1039 bp, Homo sapiens
agacaagagcaacctgggcctcctgccacggagccccacacacccttttcatcaaagccttgtgacaggctgatgggcacccaaggacttgccgttttcaagaggacatagtgggatgggaggtcacctgcccacttggatgacaggtggtgagagaaccagccgggctgcgccaggttttctaacacatcctggagtcacatgcagacccagagccgtgctgccacccagccagggcagtcccccttggctctccatcgtccctggcagagcccacacaggggagccatgggttctctggtggcagtcccactgttgggtcctgcctctgtgccaggtcccgtgctgtgcaccgtgggtacagctgtgacatgtcagagtccttcccagtgaggagcctcagatttgtggatagccccacagaaacagacaaccccagtacagcaaggtgaggggtgggacagggacaacggaggcccaggaggaacacatcttagcccacgacccggcacacaggcaaggcctcacgtcccagggaccagtgcatgcctccagggcaagtgatctttaagatgattcctgcagggacaacctaagtgaagtgaaccggaagtgaatggtgtcccccaggacaccacagctctaatggtgtgcagtgtacaacccagacagccaagcctgatggccccgacaaagacaggcatgtgggcatcacatgactccctgcatgggaggcacagacaggctggtgcctctggagcaaaagcacaggcgaggggcaggcacagaggccagtgacatcaggttacaggccccaaaggccaccctaaggagtggggaccttcctttggagaggcctgagctccctgtgacaaaccactttaacccttggaggatacaacttggctggctgctgcagtgactctggggggatgagaatgtcatcgaagaagcctagagagactggaaggaaggaagcaggtgacggcctgagatgggggtcccagtggacgccaaacactgcggggtcttatgcttg

SEQ ID NO: 103924 - DNA, 1070 bp, Homo sapiens
tttttttttttttaagacagagtcttgctctgttgcccaggttggagtgcagaagtgtgatcttggctcactgcaacctccacctcccagcatcaagcaattctcctgcctcagcctcccgagtagctgggattataggcacgtgccaccacgcctggctaatttttgtatttttagtagagggggtttcaccatgttggtcagaatggtctcgaacgcctgacctcgtgatccgcccacctcggcctcccaaagtgctgggattacaggcgtgagccactgcccccagccccaaagactgttttaacaaggtaccaggtggttgtcacacgagctcatgttggataagccctgctgtagtccatactggtcagcctctcagcacagagatgccagaacattccagagtatgctgtgagactgcctagtgtctgtgtccagccattcagggaattaattagttcgcatggatgttaccatggtacgccgagaggccgaagaaacaggctgtctttgtacagactaggagcattttcattagcagagaaataagattgcagtgtgaaaacaaccacgagggcctctgtttacagagaaggatgccgagctgagcccagtctccgcatttggacaggggccttggttgtccaggagacaagtggtaataggtactagaacttccagaaaaacttggagaaaaaagtcaagttgcggccgggtgtggtggctcacgcttgtaatcccagaactttgggaggtaaaggcgggtgcatcacctgaggtcaggagttctagaccagcctggccaacatggcaaaacctcatctctactaaaactacaaaaaaagccaggcacgatggctcacttctgtaatcccagcactttgggaggccgaggcgggcagatcatgaggtcaggagatctcctggctaacacggtgaaaccctgtctctactaaaaatacaaaacattagccaggtgtggcggcaggcacctgtagtcccagctactcaggaggctgaggcaggagaatggagtgaacccaggaggcggagcttgcagtgaaccg

SEQ ID NO: 103925 - DNA, 1010 bp, Homo sapiens
gggggccaggccacacagccctgtaggatgtcggagttgaggtattggtctttatccgtggagcatcagaaggtgatgggctgagaaggagccagaaagaggatgcttagctggctttacgcatgagacaggtcccttcagaagaggtgaggttgatttgggggttgctagatagtgaagggaactcatggagtctttaagtggatggcttctggttactttgtgaggttgaagatgagggtctgttgggggatggaggtgtggaccttgagagagaaggtgtggaaagtccaagaagggaatatagtccctttggggtagaggtcctgttgggacaagtcttctagtatttgattagatgaatcgtttgagagggggcccacacagaaatccatggtctgacaaagggcacagatcttgtggcattatcttggtgaggtctggccacgactctgagttctctgagcttcttgctaattcttggacagttcttgcaagggttctaagtgggggtgatgacacggtggcagataaggagacactgagtagccagtcgtttgaaccacagtggtgtggggtgagggcatgggatttctgcacattcttggggcctaggtcttgtgtccctctgccagctgcagtccctgtggctgcgtctgtgtgtctgagatgttgtgagcacagtggggtttagctgtggctgtgacgctcactaaactgtgagctctggcattggctttgggatgtcggagagtgcacgtttaggcagcattcctgtcactggtcctcactagtaataacaaagatccttgatgatgatggtttccaatacacgagccaggtacaaggctaggggcttcacatctgttatctctctttattttataactctgcagcctggtatttcacatttgcagatggggagaccgaggctcagagaggtgaagtgaccctcttggcagtcacacagtgggtggtggagctggccttggaacctggacctgttttgt

SEQ ID NO: 103926 - DNA, 1031 bp, Homo sapiens
tcaggcgatgtgctctctagaagggagggtggtaggcagggggtgcacccagaggtggaggcagacagggccctccttcctggcctcctgggccaggccaccctcacccctgcctgggagtgaatggccacgaccccgggtgcacacacatcttggccccaaaaggactccaggtgacagcaacagccacacatcttcagggatggatgcaataagagccacacctcggccactggtctgttagggctttgggaagagagtttgacgtggaggccgcagggccagtctcccaggctgggggccctcctcgtgggtgccccggacgtgtgtccgtccctcgcggcatccacagcagccgtcagccgggcatggcccagagcatcagtggggcttgtgagtcagggtaaaggaggtctgcagccaagctggagagatggacccccaccctctgcaaacccctgggctcggctcagtacagcccaggggaaggagcccagcgccactgccaggctgaggaggagggactggccggcgaaatgggagccccaaaccccttccgccctcaggcccctcttcctgcctctccatggcactgagagagcagagcaggaaggaaggctggcctcggcagtgagaggcctgtgtgcctccgtgtcagtcctcctcccctgccagaggctgagaggctccccaaaagcacccatcggccaggcttctgagggaagggtccaggctgtggcgggggacctcagccaagggagggagatgtaagtagcacagagagcctggctccgggccagggactgacacgggacagctcaggggcggaggccagggagtgagcccagcgcaggctctcgcagctcagtcaccgtggggacgggtaagcaggagggcgagcgggtcctgcgtgtctgcggcagggaggggaggagagaggcagtggacagcgcgaagccaggtctggtggccttgccctccacctacctcctggccagcttgcacagtagtcacgggtcgtggggtgggtg

SEQ ID NO: 103927 - DNA, 1524 bp, Homo sapiens
atgcccagggcctgcccgtcctccccctacctctcctggcctcctccgttgctgggacgctcgttctcttccctgcctcaggggctgtactttgcgccccagccatccccactcggctcaggtcccagctcattgccacctcctcagaggtctcccctgatcaccctggccggatgagcttcccccacccacttcatggtcttgttcattctccaacctgtgtcataacttccttgaggatcctaagtctgtcccgtgtcctattcctggccctcagtaggcactcaagggttgttgaatgaatgaatgaacaagcagcccttctgttagccttgtctgcccctcccagcagggaataacagtccccacccctgcccacaggaggcatgatcagctttgacgtcttccccgagggctgggacaagcgctactgcctggatagcctggaccaggacagcttcgacaccatccacttctttgggaacgagactagccctgtgagtgtggcccaccccaggtttcccctaacgcagtggacagtgagaagccaggtctggtggcttctccaatgcaaatcacctgaggtcaaggccagaacatggggcaacacaacagacctcttagggggctcctggagaacaaccattgctcaccagccccgttacacagattggaaagctggggccccaagaggctgggcacttgttctacatcacacagcaagtcagggcaggtctgacaaggggtgagaaggtgggcttcctggcagttctgaaggggcaggaggaggggcaggtccgtagcagccaatgtggagagggactccacctaaatatccctcctctgcccatcctctgtgtgcagggtgggaacgactttgagatctttgccgacccccggactgttggccacagcgtggtgtctcctcaggacacggtgcagcgatgccgggagattttcttcccagagacagctcatgaggcgtgaccggggcccacatctgtgtgtcgtgacttctgaagagtttggcctaggcctaaagagaggtcctggtgttggatagatgccagggcccctcctctggcccaggacgcctgctgcaagcccacccagatggggccagagtctgtgtggacaaccgtccccagccagtctgctcctagtggcactggcttcgtcctcccagggcccagagtgttccccatgctccacctggtggcccaggccacagctgctgcttgtatttcggtacagaagaggtttctttctgcaccaggaggaggcgtgctcaagtatcggtacgagatctagcctgccctgcctgcctgccctgggcgatgaggtacggtggggaaggtgcctattttagagaactttgtcacagtattaaagttcccagaacaaagtaggtgtcagctgtgtctgaatggataattggccccagtcacatgctgtcacagccactactttgccgacaagtaaacagcacagagagggcagggacttggcccaggtcacaaagga

SEQ ID NO: 103928 - DNA, 3701 bp, Homo sapiens
ctcccaagtatctgggactacaggcacatgctgccacgcccggctaattttttttttttagacagagtcttgctctgtcaccaggctggagtgcagtggcacaatctcggctcactggaacccctgactcgctggttcaagcgattcttctgcctcagccttcccaagtagctaggattacatgcaccacaatgcccagctaattttttgtatttttagtagagacggggtttcaccatgttggccaggatggtctcgatcttctgacctcgtgatccgcctgcctcagcctgccaaagtgctgggattacaggcgtggccactgtgcccggcctaatattttgtattttagtagagatggggtttcaccgtgttgcccaggctggtctcgaactcctgagctcaggcaatccacccacctcaaccttccaaagtgattataggtgtgagccactgtgcccggcaagaaataccttttgaatgaatgaaatgagctgtattatctccattttataaatgaggaaaccaaggctcgatgagaagggccctgcccgaggtcacatagggagttggttgcagagcaaagatttgattttgccattggccctctggtgcctccctgagggtgcctctcagctcagtgactcctgactcccacctgtgccctgaggcttaggggaggcagtgcccacaggcacagggactttttttttttttcttgatagagtcttgctctgtcacccaggctggagtgcagtagcatgatctcagctcactgcaaccttcgctgcctaggctcaagcaattctcctgcctcagcctcctgagtagctgggattacaggcccatgccaccacacctggctaagttttttggttttggttttggttttggtttggttttgggttttttttttttttttttttttgagatggagtctcactctgtcgccaggctggagtgcagtggtgagatctcggctcgctgcaacctctgcctcccgggttcaagcgattctcctgcctcagcctcccaagtagctgggactacaagcgcctgccaccacgcccagctaatttttgtatttttagtagagacagggtttcaccatgctggctaggatggtctcgatctcttaaccttgtgatccgccctccttggccttccaaagtgctggaattacgggcatgagccaccgcgcccggcctaatttttgtattttttagtagggacagggttttgccatgttcaggctggtctcaaatccctggcctcaagtgatctgcctaccttggcctcccaaagtgctgggattatagatgtgagccgctgcgcccggccacggggactttttttttggggtagttaggattggtcttaggcaaagaacccttcccccccaatacacgtgctgagaagttatcccttcctgtccacccaggttcccagtcccagctctacccatttgccttgtaacctggaaaagcatctttactaacgtgtgcctcagtttccttatgtgtaaggtgggggtaatagcagttcccatcccatgggctgtcatgagcactggatgaggtggcacatggaccccacctggcatggagttggggagccacaccctaactccccaccccagagccttctcaagtatttttggctcttgtttgctcccttctggcactggaggagcatgaaccttcctgatctgtgcgccctgccctggcccagagctggtgtaaataaatgcttaacccagctcatcttccagaaccctgaagcggggatgagtacttcccttccttagatgaggacactgaggccagagggtgagtaaccagctcgaggtcacagtgccggtccctgctgaggctggccttgcacatggggctgtctagtgaccagccttgttctccagagaagggaggtgcagccagcctcggccatgtggaaacatttcttcagagcctggggcagtcttagtggtagccctgggcctacagagtggacgctggtggggactctggcctccctggggcccacctacctgctggaaagccaggccaaggctggcagggggctcacatcccttatctctgcttttccatgagagggaagcaggcaggggtcattcattacttctctgtcctttagtccaggaaataggctcagagaggtcaggtgacttgcccatggtcacacagctgaggagtacagtagccaagcctggctacttgccttcagatctcaggctagggggtgtctggctttatatctgacatcctccctgggccacttctccaagctccatgctgctgaccactgcctgcctttccgccccagtcctacccggctctgactacagggccataccagccaccccactcctgtgctccagaatcctcagcgcctcttggtcccccaggatgtggtcagacttcccagcccggtctcgagaccctctgtcagctgaatgtcctgctggctggtttagatgttcagctgcccctcagactgggcatagctgctcccctttgtggccctctgagatggagatcctgggggctggcggggagaatgtccccctgctccacgtttgcggagctgctgccagagttcctgctcagagggacggggccggcctgggcactacctagtccccagcccagccgcgtctttgcatgctgggtgctctgccatgcctggcatcctgctgccctctgtgaatgcccacagccacctcctcacaggtctcctgctctcagctcccatgctcatttctgagtatttgctttgttgagctggttacagataacaggatcgagccctgccctgaggtggacactgatgtgggatccagattgccccgtctcctcgcccttcctactcgtgtctctcctctgaggtctccttcagaagacccagcccacagccccattggcagccccatcccttctggatttaggccctggctctgccaccagggctaggtgaccttgaccaaggcacaacccctctctgagccttagtttgcgcatctgcacagttgggggtcctacccacctagaatgctcagcacgctcacgtggactgtgtgcccagccagggcctggcacacagcaggtcctctgagctgccatccgctccctcccctctgcagaaagagaagatccgggagaagttcgtggaagccctgaaaacagagtttgctggcaaagggctgaggttctctcgaggtacgtccaccctgcagaggacctgggaggcctggtacagggcccctcctcaaaccatctgcccctgccaagaccaggctgtggcccccagtagctttagtagcccctccccggctcagggcagagagggtggctgagcccgatgcagaaaggggttcagtgtttactggcccccagttttccccacctcatacctcagaggtaaacgccccatgcccacccagtttctcaggccaaaaaaccagagcctctcccttgaatgctctcccccaccccttcccaagtccaaactcctagaagtcacagggccccctgtctggaatcccaccggtgctcacacttccactgccagcagcttgtcccaggctccaactgaccctgacacaactgggctcccctctgccacctcacccattccccagtggccagagaggctggagctggagtcatgacatgcctctgccc

SEQ ID NO: 103929 - DNA, 1903 bp, Homo sapiens
acccactccaactgcttcgcctggcagtcagagctgaaacctccaactctcccatgcagccagccttgagaacccagtgcgatggcagctatagaacagaagggagcccctctgcagaggggcaggggagcacagagtggaaatgatgccctctgccagagagtactgcatggcttccagaggaggaagctgaatcttggaggatgagtggcagggaagccagggaagggcggttctgacagaaggacctgcatggatgcctgtgtgcagaggcccacaggtgtgactggcttctttggaagaaaaccaagctgcagagggagaaaggctggagaagcaggttgtagcctcagattgaacaaatggcctttgaatgtgaaaccaagggtgtaggcttcctctctctttacttgcccgtggggtcacagacgtggtctcacactctttcttcctcctgtcctctatgtgaccctgaagtcattgagaagtttgattatgtgtttgccgagaacgggacggtgcagtataagcacggacgactgctctccaagcaggtcagtgtcccccagggcttagccaggggcaccccacttttccatagtggagcagtccaagggggcttctgtcctgggctgggggagagacactgtgcctgtctcagggtcaggcagcccaggccacgctcagagccctgtgttccttggccagaccatccagaaccacctgggggaggagctgctgcaggacttgatcaacttctgcctcagctacatggccctgctcaggctgcccaagaagcggtgaggtcccaccagcctggtctccagaacctggggcctgagggaggagaagtgtgggtccctcagagggaacctggagatacttgggcccctgattttttgcggggagtgtggattcttgtcccctttgaagtcctaggaggctggggtcccaggtggggctagatttgaattcagggccgttctggttctctctggctccccgccctccctcaccaccagtggaaccttcatcgagttccggaatggcatgctgaacatctcgcccatcggccggagctgcaccctggaggagaggatcgagttctccgaactggacaaggtaccactagctatgcaatcttaggcctgtagggcctcagtcactcaatttatctgagcctttattttctcatcagtaaaatagactgggggatgtgttctgatttaactgataccctttcaggcacctactgtgtgccattgttgtagacacacctgcatctttacaatgctgctggtcccccttcctaggtgaccagcaccaggcagccacccactgagccaggccaacacctgggaacatcatttccaccttcccacccacatcgggtccaacaactcttatttcatcagcctctcgagtcagtgtcaaatctgttcatctgcagaactgagaccccactttctagattacccctttccccagccccaggctgccccaactttcctctctgtccctccctaccccttgcatagccctgccagcctgctctccagcaatgccactgagaacctttctttctttttctttttggagatagagtctccaaaaaaatagatagaggctggagtgcagtggcatgatctcagctcactgcaactcccacctcccgtgttcaagcgattctcctgcctcagcctcccaagtagctggaattacaggcatgcaccactacacccagctaatttttgtacttttttagtagaggcagggtttcaccacgttggccaggctggtctcgaactcctgacctaaggtgatccgcctgcctcggcctcccaaagttctgggattacaggcatgagccaccacgcacagcccattagaacctttcaaacat

SEQ ID NO: 103930 - DNA, 1050 bp, Homo sapiens
tggtggcaggcgcctgtaatcccagctactcgggaggctgaggcagaagaatcgcttgaacccgggaggcagaggttgcagtgagctgagatcacgccatcgcactccagcctgggcagaggtttcagtgagccagaatcacaccactgcactccagcctggatgacagaacaaaaattcgtctccaaaaaaattttttttttcatagagacaatgtcttcctttgctgcctaggctctagtctcaaactcctgggtcaagtgatctttctgccttggcctcgcaaagtgttgggattgcagacctgagccacagtgtccaacctgtctaatttttggtgtctaagctttgtactgcttcagatccaggtagaatgtgggcttcctgggttctcagcactaagtgagggctaagtggaggtcccagacatgttgaaagccagaatgctatgcttcccctctccccccatagaaaattgaccctgaggtggccgccttcctgcagaagctacgaagtagagtgcagatcggtgtggtgggcggctctgactactgtaagatcgctgagcagctgggtgacggggatgaaggtaggagtgaggctgggggtagagggagtggggagtttgagagattcctgggcgtcttcaaagatccagtcctgcttctgtggggcagaagaaatagagagagagcagccagatagttcccttactgatttgacaaacacttgagcacttcctattgccagggattgtgccaggcccttgagaaatggctggggcaaagcaagcagaacctgcccttatgcagtttacattctcatttctccctgctgagtcttgatttcctcatctttaaaatgggctgaaccagccggcacagtggcttacgcctgtaatcccagcactttgggaggccgaggcggatggatcacttgagatgaggagttcaagaccagcctggccaacatggtgaaaccccgtctctactaaaaatacaaaaaattagctgggtgtgttggcacgtgcctgtaatcccagctactcgg

SEQ ID NO: 103931 - DNA, 1033 bp, Homo sapiens
ctagctagtcgggaggctgaggcaggagaatcacttgaacccgagaggcagaagttgcagtgagccgagaatgtgccattgcactacagcctgggcgacagagggagactcagtctcaaaacaaaacaaaacaaaaagtagatgggcgtggtgtcgtgtgcctgtagtcccagctactggggaggcagaggcaggagaatcgattgaacccaggaggtggaggttgcagtgagccaagattgtgccattgcactccagcctgggcaacaagagtgaaactccgtctcaaacaaacaaataaatgaataaaagaactggaacaaaagtggcagggcctaggcacagttctgactcctccctctgaccttttgctccacaaacataacaacctgaataagaacagcctattaatttgtctacgggccagcctctgtgcttagtgccttttgaaagttaatttttaatcgtacacattttcatgagcacactctcctggtaaagaatggaaacgtaacagagaagggtaaagtccactctgaccgcacttggggagcctggccggctccccaagttaatgtggttactgtggtgtggcttccctccaggcctttatctggatctatttgcccagagcaaatattaagcattgttttgtgaggctatttttgttattgttctttggctcctcaaaaatcaacttgattgtgatgctattttgttgttgttgttgttagagaccggggtctcactctgtcactcagtctggagtgcagtggcgctatcacagctcactgcagcctcgaactcctgggctcaagtgattctcccgcctcagcttctggagtagctggtagctgggactacaggcaagtgccaccatgcctggctaatatctttttttttttttttttttggagatgaaatctcattcttgtcccccaggctggagtgcgatggcatgatctcggttcactgcaacctccacctcccgggttcaagggattctcctgcctcagcctcctgagtagctggg

SEQ ID NO: 103932 - DNA, 1030 bp, Homo sapiens
aggccccgcccgacccagccccttaatcggcctgttgcaatcactatcaacccgccaattctggccccgcccctgtcttccgggttcaccctctcacttcctgcgggtcccaggctcaggcccctcctccgccttgtttggagcaatccaatcgaacctggagggctccgctccgccctatgccgcgctcccctcctccacgagcaatgagaatcagctcaggccccgcccccgcttccgcccgcctagaccacgccccttcttcatttggccaatcaggcagtccactggcccccgccccctaatgccccgccccgtcagcacttatccctgagctgcttctgccgttgcatcttcgggactccgccccgcgcgcggacctgcagccatggcagtcaccgcccaggcagcccgcaggaaggagcgcgtcctctgcctgtttgacgtggacgggaccctcacgccggctcgccaggtaggaccctgaagattggaagctcccaccgggagtgtcacgcggacacccccgaggctgagtgtggggtctgcagcagcgtgaccgtggacacccggggaccgagtgtgggatgcggcggtacccggccccctgacatccggggccacccaccgggagtgaggggacctggccctcacgtcactgaccccgcagcgtccttgcctgtgttctgcttgggagtgctggggttggatccagtactggagggaggaggctgcgagcaggggcctagctccctccctccccggaggctgtcacacgccgctaaggcctggctcacggacgcccccgcctcctgagctggggatcccaccctagttcagccctacgacacaccagtggtcggagctggcttctgaaccggggttccaggcacacaagcacacagccaagcgtcagtcatcatctggtgggagacagggcgtctcggagtcttcccaccccgacctttgcaggcctgggactgggtctagtttctgaagccccatcacccactttaccttccacccccag

SEQ ID NO: 103933 - DNA, 1064 bp, Homo sapiens
agcactttgggaggccgaggcaggcagatcacttgaggtcaggacttcaagaccagcctggccaacatggtgaaaccccgtctctactaaaaatacaaaattagccgggcatggtggcgcatgcctgtagtcccagctactcgggaggctgaggcaggagaatcgcttgaacccgggaggcagagattgcgatgagccgagatcgtaccagtgcactccagcctgggcgacagagtgagactccatctcaaaaaaataaaataatgaagtggaatcaaggtggcaagaaaatttagaatcgtttctgatagggactttcccttatcctaaatgtgttttgaaggcacacgttatttccattgtcattctgactttagaaaggcaggttggggcatgagtgggcattttcctaatgacttgctgctaggaggttataggcagggaacagtctgggagtctctaatccagagagactttcagattccctctcttcacatgaacctccattagttagattttgggaaagtgagcatgaagaagggactcagagctgccaggtacccgagtctcaggtctgacatccttgggccccttctgccacaacttcttgccacttcacggacttgaattatgttgcttcttcctggaagtctggcctgcagcacaggcctttcctctccaaaaagctgctgctcatttctggccccatctgctgctatctttgccatcagccatcacagtttggcatcatcagagtctcagctagaggagctgtcattctgccttagtgtttgcctgcgacctgaccaggggcatgaccagctgggatgtcaagtgacatttgggaacttgtagaggccaaatgattgaaagtttaattcttctcaagacccactgatttgccagtgtgcatggaaataatagattagagcagaaactagcagggactgttgtataatcgtgatctactagcagaattgggcccaaagagaaagaatttctgaggctgggtttcttctgggagggtagcaggttggtcttggccagtgctctgtttcccacca

SEQ ID NO: 103934 - DNA, 1137 bp, Homo sapiens
gagtgcagtggcacgatctaggctcactgcaagctccgcctcccgggttcacgccattctcctgcctcagcctcccgagtagctgggactacaggcgcccgccaccacagccggctaattttttgtatttttagtatagacggggtttcactgtgttagccaggatggtctcgatctcctcaccttgtgatccgcctgccttggcctcccaacgtgctgggattacaggcgtcagccaccatgcccagcccacatcagtcaagttttaactaaacttcttggaatggagccatttagttgtttgtttttttatcatagtgaggaatcagatatttcctataccccacgtaaaacctccccctttacactgggtattttttatcctattacctaataattattgggcagctgaaaggagccttaggagtcattatttcattcattcagcagatgtttattgagcgtctgctctatgctagtcaacgtgttaaggtaaatgaggttgatataatgaacaaagatgttctttgccatcatggagctatctaatgggggagacattaaaaataaatacataaataattagttacaaattgcataagtgccttctgcacaggaagcacactgggtgctgtgatagaaaataacaagagagaccttttttttttttttagacgagtcttgctctgttgcccaggctggagtgcagtggggtgatctcagctcactgcaacctctgcctcccaggttcaagtgattctcctgcctcagcctccagagtagctgggattacaggcgcatgccaccacacctggctgatttttatatttttagtagagacagggtttcaccatgtttgccaggctggtcttgaactcctgacctcaagtgatccgcccgcctcagcctcccaaagtgctaggattacaggcatgagccactgcacccagtgaagagacctattttaaataagggtatcaagggtagtgactttgaaagtgggaatttaggatgaggaagaagtagccacaggagggtagtaagggagtaacagtgttccaggtaggagaaagatcaacctgccaaagccctgagacaggaaagagtctggcctgatactggaactgaaagaaggct

SEQ ID NO: 103935 - DNA, 1058 bp, Homo sapiens
ggcgcgagcagcgcagggcggcctctcccccacccctcagcccgggcccgggctcggtccccccctctccctccgcttcgcactcccgtcgggtacgggaaggtccaagccgctgccgggtgcccgagggccgtcgtggccgccgtcgccacgggtcccaatggagccgccgaatctctatccggtgaagctctacgtgtacgacctgtccaaaggcctggcccggcggctcagccccatcatgctgggtgagggggaaggggccaggtgggcaggagggcgggagccaggccagagggtggcggctggccgaggtggggagacttgggccacgactcacggggagacacatggccaggaggatggaagaaaagccgagtggagaagagagtggtctgaagtttgggccatctgagccccgctttagcctcgcagataccatcctcacgtttgaattcaaggggaagggatggaggagtcatgcctccaccttgcagggggcttgggcagaaaccgagccctcgagagccccttcgacgagggtgtggggtaaaccagcgctggatcccggcgggttctctgcctcgctcgggtagcccagtgcactcctgcctccttggcgcggtgtaggaaaggtgaggatgcctgccgcgcggtgcccctcgtggtgacagagacactgcggaggtcgggtggctctcggagaaccttgtctcagtgccaaaaggaagctccctttgcagtcccagggataggtgggatgggggagatagagctgcctagggacccagccatcgcccccaggtaggtcaagtcaggataagaggagccccgaactccagaattcaccaagcagtcttctccccacagtttctaagttaattgcttttgctcaaatggcaagaaagcagttttgggggaagtttggatgaggctgtgtgaataaggattagtaaagaaagtatttcggttgtgctccattaaactacttaactggcaggagaaaaaccagccctcattcagtgacgatcacaccttatttcaacttaaatacagga

SEQ ID NO: 103936 - DNA, 1047 bp, Homo sapiens
ttttttgagcaccgacctaatgttcaaaggaagtgcttattggagcattatgggttgttagatttttgggttgggaatattcaaccagtaagtactataaaatgcaaatattccaaaaaaaatctgaaatctgaaacatttctggtcctaagcaagcattttgcaaagggatacgcaacctgtagtacgttctttatcattgttttaagtagttaatatattgtggtacagattctgaggtggtatagcaaattcgattgtattattaaaaagcatatttatattttgagagcttgcttaggattattggagagaataaaacagtgaagctttggtgttatgagggaattttagatagaaaagtgcagtttttcagttcatgctctttcattttttactccctcaggttaaagctgaagctcaacaaagatatagtgatctctgtgggcatttataatctggtccagaaggctctcaagcctcctccaataaagctctatcgggaaacaaatgaaccagtgaaaaccaagacccggacctttaatacaagtacaggcggtttgcttctgcctagcgataccaagaggtctcaggtaggtagagatgccttttgttgttgttgtttttgagacagggtctcattgtgtcgcccaggctggagtgcagtggggcgaacatgactcgctacagccttgacctcctggactcaagcgatccttctgtctcagcctcccaagtagctgggatcacaggcatgtgacatcacacccagctaatttatttatttatttattttttaagagactggatcgactgggcacagtggctcatgcctgtaatcccagcactttgggaggccgaggcaggtggattaccgaggtcaggagttcaagaccagcctgaccaacatggagaaaccccatctctactaaaaatacaaaatgagctgggcatggtggtgcatgcctgtaatcccagctactcaggaggctgaggcaggagaatcacttgaacccgggaggcagaggttgcggtgagccgagatca

SEQ ID NO: 103937 - DNA, 1049 bp, Homo sapiens
gtggggtcctccaacccttacctgttgagatattataagccctttaaaggcttggtgtggtggctcatgcctgtaatcccaacactttgggaggctgaggctggaggatcacttgagcctaggagttggagaccagcgtgggtgacttagagatactttgtctctacaaaaaatcttaaaactagctgggtgtggtggtgtgtgactgtagtcccagctattcaggaagcagaagtgggaagattgcttgagcttgggaggtcaaggctgcagtgagttctgattgcagcactgcactctatcctgggtgacagagcgagaccccgtctcaaataaataaataataaaattaaaataagccctttaaagaaaatggaagagaaactttagggctaaaagagaagaaaggaggaaacctttttaggaggctagtcactgggctttttgttttctagggagctcaaccctgttcagtgctctgctcatcaagtgtctggagaaggaggttgcagcattgtgcagatacacaccccgcaggaacatccctccttattttgtggctttggtgccacaggaagaagagttggatgaccagaaaattcaggtgactcctccaggtatgtggcagagatatttccagggcttctgaaccttgcccatactttggaatcatccatggactcctaatgcagacctactgaatcatagtctctgggaatggggcttaaaaatgtctatttttaagctttcttgggtgaatttagtgcacagccaggtaaggccactaaatatggtgatggggtgcacagcatgcgcagccgtacaaggctgatctgcagctaggatagagaaatgtctgcctaggggactgtttgcagattactgacacaagttcttgggacctcactgccgacacctttctttccaaagccattgtttggcacccttgtaatgtctaatgtttggtttagttcctatacaaaccaaccatggggtttgccaagatagtgaggtatagcggaaagaccatggattttaaagtcagattt

SEQ ID NO: 103938 - DNA, 1064 bp, Homo sapiens
tttagtagagacagagtttagtagagacagagtagagacatgttggccaggatggtctcaatctcttgacctcgtgatccacccgcctcggcctcccaaagtgctgggattacaggcatgagccaccgtgcccagcctcttatattattttttaaatttcaccagcatgtagtcacagggcggcctagtgcagaggcaggtctcagaagcctgacactctcctcctctcactatggaaccagccaaatctgttccctggctgtttaagctggtctggaaaagcttccaaacagagggggtctggggaatgaggttaagtgtttagagaggactgggaaatgcacccaaattactggtgcagagtggaaccagtaagaaagcctcccatgaaaagaactactctattcaacctccttacatgtcaggtccactgcttgttccggctccatcaaatccaaggccaaggcctccaggttcctgaagtgctgctgcagcacggggttctcaaagctgtcacttctgttaaaacaataatgtaactcaactgaaacatgacaatttaaacattgaaaaaattagaataaaaccacctgagatactacaggtccggggtgagctgagaaaaacaccccaagtaaaacagttgaggtcaggtgcagtagcccatgcctgtaatcccagcactttggtaggccaaggtaggcggaatgcttgagtctagcagttcaagaccagcttggacaacatggtgagaccctgtctctacaaaaaatttaaaaatcagccaggcatgttggtgcacgcctgtggtcccagctactcaggaggcataggcaggaagactgcttgagtccaggagatcgaggctgcagtgagccatgatcgtgccacggtactccagcctggatggcagagcaagactttgtctcaagtcaacttagaaagcaaaccagcctgggcaccctggctcatgcctgtaatccagcactttgagaagctgaggcaggcggatggcttgagctcaggagttccagaccagcctgggcaacatggtgaaactccgt

SEQ ID NO: 103939 - DNA, 1120 bp, Homo sapiens
taaaattccaccatccaaaaatataaaactgcttcaggggtggtgatgagaacactggagtaagctgggagaaatgaccagcccaggatgcacagaacaggtccgactggctaaggtggctgccaggttcccccaggtgtgcttcttgctagagcaggggtatattggcccaagctggcaaagaggggatcactatggtacccagttacttgcaccttggaagatttctcaagctgagttattaggctctcaaggaacttatccttaagataataagtagaagaggcaagtgagggggcagtggctttagtcaccaataccaatcctgcatgtgccaagggttactagaaaccctgattctccaacagtgattctcaattgggggtgattttactgccgggggcatttaacaatgtccggaaacattttttggttgtgggggggtgctgctattgccacctagcgggtagaagccagtgatgctactaaacatacaacacacagggcagtcctcacaacaaattaaccagccccaaatgtcaacagcacggaggttgagaaagccagttccagtgatagcaatgctccagttgagtgtgtataagacgacattttgaactgccaaggtagaaactacctggtaggaggagacagctcttccatagccttctggtaaaaaaaagtctaagcaagtggccaggcgtggtggctcacacctgtaatcccagcgctttgcgaggctgagacaggcagattacctgaggtcaggagttcaagaccagcctggccaacatggtgaaaccctgtctctactaaaaatacaaaattagctgggcgtggtgacgcacgcctgtaatcccagctactttgggggctgaggcaggagcatcacttgaacccaggaggcagaggctgcagtgagccgagatcgtgccattgcactccagcctaggcaacaagagtgaaactctttcacaaagaagaaaaaaaaagtcttaagcagctatcaccactctagtaaagctaagtatgtcttcattccaattttagccggatacttactaagaatcaggcactgccattctgtcatcaaaatggaacagatttattaggatgctca

SEQ ID NO: 103940 - DNA, 1068 bp, Homo sapiens
ttcctgttgtgtgcggggtgtggtggaattaaacagcattcattgtgtgtccctgtgcctggcacacagaatcattcatacgtgttcaagtgatcaaggggtttcatttgctcttgggggattaggtatcatttggggaggaagcatgtgttctgtgaggttgttcggctatgtccaagtgtcgtttactaatgtacccctgctgtttgcttttggtaatgtgatgttgatgttctccccctacccacaaccatgcccttgagggtagcagggcagcagcataccaaagagatgtgctgcaggactccggaggcagcctgggtgggtgagccatggggcagttgacctgggtcttgaaagagtcgggagtgacaagctcagagagcatgaactgatgctggcatgaaggattccaggaagatcatggagacctggctggtagctgtaacagagatggtggagtccaaggaaacagcctgtctctggtgaatgggactttctttggtggacacttggcaccagctctgagagcccttcccctgtgtcctgccaccatgtgggtcagatgtactctctgtcacatgaggagagtgctagttcatgtgttctccattcttgtgagcatcctaataaatctgttccattttgatgacagaatggcagtgcctgattcttagtaagtatccggctaaaattggaatgaagacatacttagctttactagagtggtgatagctgcttaagactttttttttcttctttgtgaaagagtttcactcttgttgcctaggctggagtgcaatggcacgatctcggctcactgcagcctctgcctcctgggttcaagtgatgctcctgcctcagcccccaaagtagctgggattacaggcgtgcgtcaccacgcccagctaattttgtatttttagtagagacagggtttcaccatgttggccaggctggtcttgaactcctgacctcaggtaatctgcctgtctcagcctcgcaaagcgctgggattacaggtgtgagccaccacgcctggccacttgcttagacttttttttacca

SEQ ID NO: 103941 - DNA, 1032 bp, Homo sapiens
ttgtagggtgagtaagctatagtaatatcaatagaaatgaacatgctttgcatttgccatgtgtcaggtattattattattatttattttacttttttttgagatagggtcttactctgcagcccaggctggagtgcattggcattgatcatggctcactgcagccacgacctcctgggcttaggtgatcctcccacctcagcgtcccaggtagctggaactacaggtgtacgccaccacacctggctaattttttatatttttagtagagatggggttttgccatgttgcccaggctggtctcaaactctgagttcaaacaatctacctgcctcagcctcccagtgggctgggattacaggtgtgagccaccatgcccagcctcatcattcttattaactggtttaatcctttcaataatcctattaagtagaattattaggtaattagaattaggttaaaaagagctgaggtgtgggtgttcgtttctcaggtgaaacatggctaaaagcttacggagtaagtggaaaagaaagatgcgtgctgaaaagagaaaaaagaatgccccaaaggaggccagcaggcttaaaagtattctcaaactagacggtgatgttttaatgaaagatgttcaagagatagcaactgtggtggtacccaaacattgccaagagaaaatgcaatgtgaggtaaaagatgaaaaagatgacatgaaaagggagactgatactaagagaaacaaaaagactcttctagaccagcatggacagtacccaatatggatgaaccaaaggcaaagaaaaaggctgacggcaaagcgagagaaaagaaaggggaaaagcaaagcaaaagcagtgaaagtggcaaagggtttggcgtggtagactcttaaaaccttggaaaatgccacatgggatagatgatggattagaatgtatatacatgtatactttgatttcagctgccaccaaatgaaaaccatttgttttcctattttaacttggccttttttcttcaattcaaacccagcat

SEQ ID NO: 103942 - DNA, 1006 bp, Homo sapiens
cctgtgtctcaattgttgattagtattttgtgactcaggtaggaaaacttctggctcaatttgtctgatatttttatgtcccccccatagactgaggctgatgtgaatccaaaggcctatccccttgccgatgcccacctcaccaagaagctactggacctcgttcagcagtcatgtaactataagcagcttcggaaaggagccaatgagggtaaggcagccacaggatgctctgggggaatgttaaaggcacctgtttccatctggggcctctgatctgatttccagtttgggaggagggctagctgctctcgactacaaccagtgggaggactttggcattagatgctaaagctgatgggctaagaattttttttagacccaccaattgttaacattttgccacatttaccttctttttcactctataagtgaattttatttttgctgagccatttgaaagcagttgtggagactgtatagtggctgtatgacctcaccagagccatcagaaggaaagggatattaatgctttttagcatcccttatacggtggatacttaacattcatgaatttcatttggttcccagaaacattccctacccctctcccttttttttttggatgcaattattcaaaaacatggaacgtttcacgaatttgcatgtcatccttgtgcaggggtcatgctaatcttctctgtattgttccaattttagtatatgtactgctgaagcgagcactacctccctttgtaaaaaaggaaaaaaaaaaagctgtttttcagtagaataattatgtatgcatgatgcttctgcccagaggtgatataggatactctcactttattcattattatttttttaattttattttatttatttatttatttttttatttggagagttttgctcttgttgcccaagctggagtgccatggcaggatctcagcttactgcaacctccgcttcccgggttcaaatgattctcctgcctcaacctccc

SEQ ID NO: 103943 - DNA, 1026 bp, Homo sapiens
cgggagccctctgtcgggtagtggactaggatcctcacatctgccttcagttgggcctgaacgtcagtgcttggttacattttctttgtggagcttcagggtatcttgggccacagaggccccatttcaagggattctgtgctgacccagttcccatgggatcatcatgtggcccacatctgcccaagtcaggagtctgggtcccagcatggaaggaatgactctctggtgagcaggactcaggagaaggcagatgatgactagtgtttcttcatctgcagatggcccaggagctggggatcagtgagaaagactccaacttccagaacccatttaaaatcgaccgcacagaggtgagctgccagggcctatgcctgtgtctgctttgcctctgctgggccataggacaccgaggcctgcaggggctggggaccttgggtggctttggacttggagccaggcagcctgggcctgggtccagaagatatcactgactcattggagcctgtgggcaagtcattgctcccctcttagcctcaggctccctgtctgttcacagcatgtgaactccagttatggggggtagttaggaggctatgaacaaacccatcccagcacaaaataggcatcccacttcaggtggatatcagggtagctagggagatcaggccatgctcttccctgcctttgaacctctgagcaccaactgggcttccatcccgcactcctgtacatgctctcattccaggggttccagggggctgaggtgggctttgagagctggagaccaagtttgggataaaagatgaggacaggccgggcacggtggctcacatctgtaattccagcactttgggaggccgaggcgggtggatcacctgaggtcaggagttcgagactagcctggccaatatggtgaaactctgtctttactaaaaatacaaaaaactggccaggcgtggtggtgcatgcctgtaatcctagctattcaggagactgaggcaggagaatcgcttgaacccggaa

SEQ ID NO: 103944 - DNA, 1678 bp, Homo sapiens
cagtggacggacttgcgtgtggcgcagatccaacggagaaggcagcggctcctttaaacaaggcggagaaggttaagatgatgaccggacggctactccaggcattcgctccgaggccgcggggggagggacctcactatgcaaatctgagctgctgatcgatgacgcgccatcaccccacgcaccgcttcgctcgcccattggctgagatgagcctggtcccattgacaacaaacaggggggcgcgcggcctggaggcggggccgcagggggcgcgggctggggcgggggaatcccgccccgccctttctgtgcggcgcccgggcgcaacgcaaacatggcggcgggtggcacccgtcggtgaggcggtgccgggcgggggttgtcgggtgtcatgggcggtggcgacggcaccgcccccgcgtctccctgagcgggacggcagggggggcttctgcgctgagccgggcgatggacgacagcggcgagctgggtggtctggagaccatggagaccctcacggagctgggcgacgagctgaccctgggagacatcgacggtgagtggtgggtgggtgggagtgcgggggccgcgcggggaggaaggggttacggcggcgcgcccgggtgcgcgtgcgcccaccccccgacagccccggttcgcgcgggaagaaccccgtgcgcacggtgcccccggcggtcctcaacccttccggcgctgcgagcgtgagcccgacccagctgcgccgctccgggaggccgtgggatctggggcgccgcggggccgaaagcggcgcgagggtcgcgggttccagagcgcggggctagggacgtcgcgggggcgtctcagggagcggcctaaggagagcgcgtggccgccgcctccctcgcgcgcccacacgcggtttccgtggtccgctctcccgccgcccgcgaccgcgcgtcgcacctgtcactcccttcctggccgcggggacgtctttgggattcccggggcccagcccccagtctccgcgccccgaatccctgggcttctcaggattgaccgacggccaggtcgccgggtgctccgcgaaactttgggcagcgactgcagaagcaagttgctgatgaagagagcagtggcggcggagtgtggacacatctctccgggatggagacccgggcgctcctgctgtcacgctgcaaggggaattgagcagaagaaattttgagttgtggcccctcgggtacgggctggggagcgggtggcctttgttccagcgccttaacagcggagtggaagagctggtaggagcccagggatccactcttaaaatactaattttgcgaccacgggaacaacgatttggagagggtcagcggcttgctcaaggtcacccagctggttagagcctagttcttgcagttccttggccagtattggtttttttatacccctcctttcaagaaagagtccagttgactaggctagtaatcttattaactggatagttgcactcttatgtttaggccccaaaatgctttgtattatttcacttcttcctcacaacaatcctgtgagatactcttattacctctattttaatacggtaattaaagaagccgaggccaggagatgttgacttatctaaggccactcaccttagagagcttaggcagaaacacaggtgcattgt

SEQ ID NO: 103945 - DNA, 1034 bp, Homo sapiens
gtctcctggtctcatccagttacatttcctgggatatgtttttggaggttgctcagatcacggcactagagtccctttgggtttctcctccctcctctgtctatttggcctcgcccttgacaaacattccccacattcacacccaggcctttggcctaatgttcttgaatgctgcttgcctctcattgaataggcttttatgtagctctcatattcagttcatattttggcattttaaaaaatatatatttttgcttctttctcaactagatcatttcactcctcaaatttgtaattaaaaaaaggaaattctcaagcagttttattcaattagaactttgcaaatatcaaattgtccgtatccttctggattctcgtctgaacattgcttatctgcgtacatatcacagtgttttcacatagggattgctgtatgttgaagtagttgaggtgtaatagccatataatctaatgtgatccatctgaataggcaaacccttgcacacctgtgtacctgttgaacattttcatcatttgcagttttttcttaacataagcactgttctgaatacttgtgaacaagtcacttgggagtttgttcatgggcgtgtatcttccaaagaggagtcttcaagttcagctgggtaacacactatcagctgtagccctttcattttaaaaacatttccagtgctgcaaattactatggtgattgggaattacaacttggaaatatttttatttttttaaaagatagtacattcatatgaatcaaaataaaatacataaaaaggtactatgaaaagtcttgctcccggccctacccactatctgcgtagtcccaccgctccctcacaagtaattaaatttttagtttcttttacctgcttcaaaatgtatttgttattacaaaagaagctaataacaaatattgattttagtttttgctttgctttcctttttgactgaaaaagttagcatgctataagccctgttcttctgtgccttgccttttcctttctgcttaccaatgt

SEQ ID NO: 103946 - DNA, 1132 bp, Homo sapiens
aaatgcccaccatgtattctgtgcctttccttgcctctgaaataaaagcagtttctgccgccaaatatacatggtagcattaagtcaggcctttcacaggcagctccatctctccattttgcaccgtgctgtctctacttcagcagctggcaggacatttcctgatactgtggttttgctcaaactatttcctttgcctggaatacccttccctctctctaatttataaacccttttcatccgttaagctcggttttcactgcctgccaggatggatcagtcctttctctgctctctgacagccctttctttgtgaggcacttgtctgttcttgcccttgtcgcagtttatggagttggttaggtttctctttcttctctgtgagcatgggagatgggaagaaaacgaatacttttcagtctttgccctgtgcggagttccacacaaggcacataggatcctccagctcccagcccagagtacatagtgtatgcaaatttgagtggatgtttgtatttgtagcgtgatttgataacctgctttgcaagtattctttttctctttagttttagggagatttgggggcatggtaatggatggaagggtaagatggtgggatgttggggtctttcatttttgcctgaatggtttaagggctgaaaaaggttgagatctcttgctttgtagactctgcccccaggaggaggacagttcaggtgaagtggcttgtgcctgattttgttggcagtgggtcacctgaaatgtgaaatgtgagggcctccttttgcagaacagggtcatgcaggatcagttccttggagtctcactctgcatctcactcaattttgtagtctcctgctaaaagagagtgaaagagggaacagtatgatgccagggcagcagcaggtgaagagctgggagatacaggaaagacctgggatgacacatccttctctgtctgagcttggggcattcactctactcattcgtgaatgaagcacttactgagcacctgtccagtgtcaggctgtctttggtgatatccgtatgatgatagaaccaaagcatctgcattatgtggtagctaagagcttgactttaaatcccagctccaccacctgctgactgggtg

SEQ ID NO: 103947 - DNA, 1031 bp, Homo sapiens
tattttttggagatggggtctcactgtgttgcccaggctggagtgcaatggcgcgatctcagctactgcaaactctgccttccagattcaagcgattctcctgcctcagcctcccaagtagctgggattacaggtgcttgccgccacgcccggctaacttttgtatttttagagaaatggggtttcaccatgttaccaggccaggctggtcttgaactcctgacttcaggtgatcctcccgccttagcctcccaaagtgctgggattacaggtgtgagccaccgcacccgccccaacagatgtttttacagaggttttctaccataacatgtgcctcttgaaggcatttatttttgtatctggcacatagtaggatctcagttaatgtttcttgaatgcgtgtcttaagggatgtatcttttattaaaatgtatacttaaaaagagagagattgttctagaaaacagcatcttgtcaaggcatatggtctcatttgaagaataatttaataatttggataggaaggtatacttgtaaaatacagccagtcaaaaataccttttccccattccccttgatgcgtccattacatacatgttcaccctgagattgatcttccatcagcattgaaatgaacattgaaagtaataagatgggccgggcttggtgactcacgcctgtaatcccagcactttgggaggcggaggtgggtggatcacgaggtcaggagatcgagaccatcctgactaacatggtgaaaccccatctctgttaaaaaaatacaaaaaattagccgggcgtagtggcacacacctgtagtcccagctactcgggaggctgaggcgagagaatcgctttaacctgggaggcggagtttgcagtgagccgagattaccccactgcactctagcctgggtgacagagtgagactccgtctcaaaagaaaaaaagaaagtaatgagatggggctgggcgccgtggcttacgcctgtaatcccagcactttgggaggccgaggcaggtggatcaca

SEQ ID NO: 103948 - DNA, 2524 bp, Homo sapiens
cttttcatttatatgctttctaaatttttctttagtgaatatattacttttatgattttaacaaattattaaaaacagggccaggcgcagtggctcacacctgtaatcctagcactttgagaggccgaggtaggcggatcatctgaggtcaggagttcgagaccagcctggccaacatggtgaaaccctgtctctactaaaaatacaaaaattagcagggcgtggtggtgtgtgcctgtagccccagctacttgggaggctgaggcagaagaatcacttgaacccaggaggtggaggttgcagtgagccgagattgcaccactgcacgcctgggcaacagagcgagactttgtctcaaaaaaaaaaaaaattattaaaaacattgtctaacacaaggtgcataataaatacaaaatataagaataaatgacctttgtaaactaggtttcccagcccctaatagggctgggtaacaaatacctgttaaaggattattgactgaatctgtaatttggagaaactgtaaccctatttggaggcttcacattctttattcttgaccagaattaatttaaccagatttcaggttacctcattctcaggtagatgctgaaggctgagctgagcaaagtgatatttatgttacctccaagccacaagctccataaagttcatgtgaactcagggtctctttgtgagtcatggggctgcttgcaatgcacggatgataacaggaacctctaattttggttatttgcttttagagaccagaacccagatacagtttcctggggcctcacctactttgttaagcaacttagctataagtttacaaagcagctaaaaacaggagcaggggagtgagatgagcttgagcgtgccagcctagctcgtgggaggcctgtctctggccctgagctttgtggcctgccgtaggaactggagcttcattttcaaagctccataaaactcgccttctcccgggcctcccttttctgagtttcatggctctctgtggaaatgacagcctgtgtaatcacagaatgtgaatgatcagagcagggaacagtgaggagccattaggacattcccatgggtgtagctcacagttacaaagcacaactacaccctggttctccaggcctcctctttcctggcaccgcagaccagatggggtcctggagaggctctgcgtgcccttctggagcttcccatcactcctttctgcagatgttcatcttaacagcccctctgtgccactcagcccagtacccggctgcccggctgactggagatggctccactggagctttttgtgtgtgggttgaaagggacttttttattttaatttaagtagtctcattccatctgcctacacactcttacgcttcgtgaactaagctttctgacctgtgtaggttacttcaccacaccagcccatatctttcccacaaaagggtttcaagagtacttgacaaaatgagatcagtgcacccacatgcctgtgtagtgggtgctctggaagtaccgccaacattgacctgcataagggtctacccttcaccaagcacttcggataaattatcttattaatcctcagggcaaagaggccaagtgtgtattttcaaagcagccttttgtagtgaggaaaccaaggcttaaagagaagtatcttgcccacgctcacaccactgattaggtgggcctccagagactcacacctaggcctgactaccaccaaagcctgtgcgcatctatgaggccaccctggccttctgccctccttagctttccatggatggaaactgtcggccagtgtgtgatattcttctggctctgtgttacagccctctgtattgatttcttacagagttgggattttgggggaattctaaaaggttcaacaaattcttagatttctcttagtcattttcttaaagcattttataatcttgtacttggagtgtgtcagcactaaattatgttttgtttaaatgtactgaatttgaggacatttctcagtttaatcatgtcacggaattggaattggttagtacaagctgcaatatctgtagcaatctgcccatttctccctcgcacaaggctgagtgaggacagagcttagtgtcaagatgttggtaaataataccactatgtaggaatgtagtctggtgagatgctgtttttcccagcaggtttaactgactgaatacttaaggtgcccagattgaaatgcaaagctccagttatcccatatggagactacactagaaagccccagcagctttatttatttacatttatttatttatctatctatttatttatttattttttgggacggagtcttgctctgttccctaggctggagtacagtgacgcagtcatctcggcttactgcaacctctgcctcctgggttcaagcgattctcctgcctcagcctcccgagtagctgggattacaggcacccaccaccatgcctggctaatttttgtagtagacaggggttttcaccatgtttgt

SEQ ID NO: 103949 - DNA, 1020 bp, Homo sapiens
cacctaaggtcaggagttcgagacccacctatcaatatggtgaaaccctgtctctactaaaattacaaaaattagccgggcatggtgccgtgcacctatagtcccagctactcaggaggctgaggcgggagaatcgcttgaacccaggaggcagaggttgaagtaagacaagttcgcgccactgcactccatccagcgtgggcgatagaggaagactccgtctcaaaaagaaaaaagaaagaaaatgagagaaagggcctggaggtgagtgtgaggagggaaaagaacatcaaacagataaagtcctgtcctgttgtcctgggaccttgggcagccatcttggcccagatgatccccacaagaaagaggtaagggtttcctgacccatttctgccatggtcttaggaaagtcattgagttttcatgccttagtttcttaagcaagtttgaaagttcactttttggatagcaataaaattactccttttcttttgttcacagagatgctgcaatttgtcagtaatcaagtgggagagttccctgacttgttttcagaacagctgtgtagctcctttcctggcagtggtggtagtggtagcagcagcggcagcagtggcagcagcagcagcagcagcaatggcaggggcagcagcagcggagctgtggacccttcagtgcaacggtcattcacccaggtcacattaccttccttctctccctcggcggcctccccacaggctccaactctgcaagtcaaggtttctcccacctcagttcccaccacacccagggcaactcctattcttcagccccgcccccagccccagcctcaacctcaaactcagctgcaacaacagacggtaatgatcacgccaacattcagcaccactccgcagacgaggatcatccagcagcctttgatataccagaatgcagctactagctttcaaggtgattcagaagttagaatggtagtggttggttggttccaatgtttatgtgccagtttgcagacactgt

SEQ ID NO: 103950 - DNA, 1020 bp, Homo sapiens
aaaaaaaaaaaaaaaagccaggaccctcattagctagcccctctttctccacctgaacccggtattcaggctgtacaaaatagccggcttttgaaatggcctctatgaaatttcctgttcatttttttattctcaatttcataaaaattatatcatttctcattctttcttggaaggtctatgcagtaagaaaggaatgcataacagaaggataatgctatcatccttttacttttcttccttcttcatccaggtcctggtccagcctcagatcatcaagacagattcccttgttttgaccacactgaagacagatggcagccctgttatggctgcggtccagaacccggccctcaccgccctcaccacccctatccagacggctgcccttcaagtaccagtaagagctgccttctcccccaccctcctccctccccctttattcctggaggtgttagtcttcagagatgttaaatctctatatgctgagtaggtatgggagggtctatagcacaaatcagtcaaattgtaaatgtcacccctcttagttgtttttcgctcgaaaaagtattagcaatgtgtgttcgatgtgggagtactggagtctacaaggaggtagaaaagaatagcagaaggaccctctattcttggctaatagctccacacaagaccattcacctcttagatcctgctgatgacttctgaaggaccctagggccaccaggcagggaagggctccaaggtgaagaacatggaaggtaccccatccttcagttgtaggttcttagccactttcagcatcctatagcatgagaatctgatagagtaaatggtgattaaaatttagaagcactagctttattcataaaatccaagaactggaagcaactcaaatgtccatccacaggaaaataagcacattgtgatatattcatacaatgaaattatgcctagcaattaaaaaacagaactgctgacaggcacggtggctcacgcctgtaatctcagcactttgggagg

SEQ ID NO: 103951 - DNA, 1044 bp, Homo sapiens
tcttggggcctgatttgattaacccaggaagagtctcagacctcatgaagtactgccaggtctggcagcacttggccaaagcgggcaggtctgtgttgaggttgctttatgcagactaacaaagggatcattctgctgtgtacctgtccctattctagaccctggtgggcagcagtgggaccattctgaccacaatgcctgtaatgatggggcaagagaaagtgcccattaagcaggtacctgggggagtcaagcagcttgagccccccaaagaaggagaaaggcggacaacccataatatcattgagaaacgatatcgctcctccatcaatgacaaaatcatcgaattgaaagacctggtcatggggacagacgccaaggtgggtgccaagcaaaattgtgttttatgttccaccatctcccctctacctgtttttgcctcaggagcctagagaagtcccaggctcaaggtaagtgaatacaagaccgagttagaggtgcttttttattaaagcatcttggtgtcatgtcaagattataaaatattaaaaaacataagggactggtgagggttgataaggcagtgacccgctgagacctttgactcctttggctatgctctgcagtgatggggactccactgtcagaggcagagaaagatgcctgccactcagtagttccagatacaggactgtgtgtaccttggagtcagctgatggcatagttttagctgtgtttaggggttaccttttaaggaaaagaaagaaaaaagaggttgagtctttgaccagcaacacatagaggaaactgatgttccaaatgtttctggtgtttcagtgtatgtgtcttctagaaagtaggagattttatttttaaaacctatctatgtttaaaccctattttgaaagaaaatttcattttccttgcctacaaatctgaaagctgtacatcctaagtaaaaatctatgccttaagataactgtccaggctaggcactgtggcttacgcctgtaatcccagcactttgggaggctgaggcgggtg

SEQ ID NO: 103952 - DNA, 1185 bp, Homo sapiens
tattgagtgtcaactatttgccaggctcagggctaagccctttacactcattatctcatttagccctgctgcaagcctgtgattcacgcgctttcattatctctgtgctaatgaggaggaaagtgaggttctgaggtatggaataacttctcccgagtggcacagctaatcattgggaggaccagcatctgaacttggtttctcctctcacagagccatgctgtcatcccaagtgctagggctctgctcttttcacactgtagcctgcactggtctcactgtgttttcactcatcttcctacccagatgcacaagtctggcgttctgaggaaggccattgattacatcaaatacttgcagcaggtcaatcataaactgcgccaggagaacatggtgctgaagctggcaaatcaaaagaacagtaagtgtgctgagaaaaggcttgtcagccctggcccaggtggggctttgtaaaagcagatcattttcaccaggtggggttttctttgcagagcttctaaagggcatcgacctaggcagtctggtggacaatgaggtggacctgaagatcgaggactttaatcagaatgtccttctgatgtcccccccagcctctgactcagggtcccaggctggcttctctccctactccattgactctgagccaggaagccctctattggatgatgcaaaggtacagacttttgaaatctcctgatccctggaatctttcccatttcccctaagaagatagctgggaggtcacagttatgaggccaggccgcatgttaagagggcctagcctggagaaaaacaggaattctgtgaaattagccaggtcctggagaataaagaaagaaaaaactgactccggggggaaacagtccctcaggtttaactggtccttgccgataggccccgtcagagaggaatgagtgccagatccagaacgagaatgcagagtagctgttgtgggggcgttgggagctgctggaggcacctcattgcttcactctgcctttaatgggcctggcaagaccactttgggaggctgatcagttggtttaggatgaggctgcctctgggtcctcttttcagaaatgattacaatttgcagtctaacagataacattttacctatgggcctttaatcgtcaaagcccctggcaatggtagtttaatgga

SEQ ID NO: 103953 - DNA, 1050 bp, Homo sapiens
tttaacataatgtacagtgctatgtaactgtcactgtaatcaagatatagaacatttccatcaccccaaaaagctcttttgtacacctttgcaggtagtttcccacacccctctccagcctcagacaatgactgattcattggtttcctgttactttagattcattttgcctgttctggaattatacagaaacagaatcatacagtgtgttctcttttgtggtagatttctattttaaaagaaaatctcttctacctttgttctttggaacatgtacttttctcagttagcaagcaggtgaatgtgccaatgtttgagcagcagttagtgaattataggcttctcagttcccatctggccttagtcctgagttaatcgacttgaatttaaacctcataaccatttctcaatatatatatatgtatttataaagtgctgtaaaaacctatgcagtatttattccaacctcgaggccttgttttgaaggtcaaagatgagccagactctcctcctgtggcgctgggcatggtagaccgctcacggattcttctgtgtgtcctcaccttcctgtgcctctcctttaaccccctgacttccctgctgcagtggggaggggcccacgactctgaccagcacccacactcaggctctggccgcagtgtcctgtcattcgagtcaggtaggtggaggccccttgccccacctgggcatggctggaccactatggcaggagaaggaccctgtgtacaaacttcttggcttggctaccaggtcccaaagggcttttatagtgggcccccacctgcttgcttctgatagggactggcataagttccattttagaagtaacaaggcaagcccaagttcagtcagaatgagcaaaacaaatcagggacccacactactctaaataccctggggtggaggggtggtacctatttgaaggaggatatcgtgttttttatctgaggttgcaaaaccaatgcctcaaccctttcaaaacaaagatttttatggcactcagctccataatgagaagggctacagtca

SEQ ID NO: 103954 - DNA, 1172 bp, Homo sapiens
tgtgccaccacgtccagctaattttttctatttttagtagagatggggtttcactgtgtttgccaggctggtctcgaactcctgatcttaagtgatccgccggccttggcctcccaaagtgctgggattacaggtgtgagccactggcacccagccacattgtgaaggttttttaatgaaaataaattcaaatcagttcatctaaaaaaaatttcattacctctgttgaatgtttggaaacacacagtgtggctgtgctgctgacattgttatgttgcactgtgcgcctctgagtcctatacaacaacctgcaattgtgacagctctgggtgtgacagaaatgggtgccatgttcccagctaccctgtgaggtagacaggaacacacagccagtatatcacagagcctggcatcccatcctgtgatcaggcctgtctgatcacaaagttcacctcgcttctcccctggttcctctcttactttgatcgtgctggagagagcaggaaaaagtttggttttggggctccatcaacaatagtgtctgtttctgcccaccctagggaagcttcctgcaggatccgcctgttccgatgtacacatggcgttgtgtgccgtgaacctggctgaatgtgcagaggagaagatcccaccgagcacactggttgagatccatctgactgctgccatggggctcaagacccggtgtggaggcaagctgggcttcctggccgtgagtacccttcggttcccttctgtaaacctcccctgagcacttacctagccaggagttaagatgcagaagcagttatgaacccccttccccatcaggtgctgcccacctggaggggtaggcaggcattcattcagtcgctcatttcaccaggactcccagcaaccgataaaacagaccaaaattcctccccttgtggccttaataccataagccttgtaggcaggacattttggtcccctgaggtaatatgaggtaatatgaagattggttcagcaatagcagagctactgtacttgggggttaatatgcaacttttctgttcttcaagtggtcataaaaattcttagaatcccctggttatgtctcatggttctttcatttactcagaaggtatttattgggcatcttgtattgatcacagcactgtgaatccagaaat

SEQ ID NO: 103955 - DNA, 2030 bp, Homo sapiens
ggtggatcacctaaggtcaggagtttgagaccagcctggccaacatgatgaaactccgtgtctactaaaaatacaaaaattagccagggatcgtagcacgcacctgtaatcccagctactcggaaggctgagacagaatcacttgaacccaggagtcagaggttgccgtgagccgagattgtgccactgcactctgggtgacagagcaagactctgtctcaaaagaaagaaagagagagaatattttggattcttaataatttcttagaaatcatggttattaagaatccaaaatattcttttatttatttatttattttttgagatacagcctcactctgttgcccaggctggagtggaatggctcttcacaagcatggtgtcactgtttcttaccaatacatgaacctgtcaagcactgcacacctcaagctttggaatcagactagcaaccatcactctctctcttttccacattgattttcacacagtactatgacagatatcacatctccaaaggaagctagtgtggtctcaatgctgaggctgcatgctctccccatctagtcacttacagtgcccagctgatgttgagcatcactgttttcctcgaaagtttaaaatagccagtggctcccttgatcacttgctgtggcacctcagactgccttggcacacgatttgagagccatggggttagaccgatgttaggggacacaacctggggttgggactggcccagggatactgagtggctctcaggatctaaacagttgtggggttcttgccacagcctctttcacatcaggcaattagcagatgagttacagggggaggctcctaggccccagttggggaagattctggtgtctataaaatttaggaaaacttaaaaaaaaatttttttttttttggcttgggattacaagccaagccaccagcgtggccaagatggtgaaaccctgtctctactaaaaatataaaaattagctgggtgcggtggcgggtgcctataatcccagctacttgggaggctgaggcaggagaattgctagaacccaggaggcggaggttgcagtgagccaagatcacaccactgcactccagcctgggtgacagagcaagactctgtctttaaaaaaaaaaagaaaagaaaagaattaagcttaaaatacatttttacttagtgatttccacatttgcctttctggttcctcttgccgtatgacctggactaggctttgcttctacttgtaacatttgggccctcgtgagggaccagttggtcctcagtttctcctggagcagccaccaggctcccttgctgattggacatgtggaattggctgttcttggaaagagagttggagtcaaccgttcaaatgttctgggacctccgaagcccaggaatcacgccaccaccccccaatctccctccctgctcagctcctcaactgctattctcccaccattgcagttatcagctcagattcagtgagtgctttgtggaaggttggcagagggtcgcgagggtcctctacatttgttctccagtatccagtatcaacactggttaccaaagaggaaggacggactattggtgcccctggtcccagtgattagaaatgtaagtgaaacaccccacctcatctcataagctgctttgagattatgagtatgtgtctatagaacaggttgttttctctcagactcaggcagtgtctccaggttccccctggagagagatagtcttctctgtctgtgtcctcgagtggcactctgacagtgctatttctgaccctggcattcaagtcttctgaagccgttacattcgctgatggctacttagagcccagtaaaggtcagaaccatcagactgaaccagaccatgaaacagcgctgctcctgtgggggcgagggctggggtgtggaagcgatgtctgcgggcctcggcctggcagccccgcccctgggctccctgggctttctatcttatgcttctccctccctcctgtcttctgtcctcagtt

SEQ ID NO: 103956 - DNA, 1045 bp, Homo sapiens
ccttacatcacacagcaataaattgtgattaagctccaagggtactcttagcccttgttttgggcactttggagacacaaaggatgtgtgaggcttgctttccctggcctccaggtctctcccattgggagagcagacagacataaatggagagtttgggaacaataggtggcaggcagtcatcaactgctcagagtggtgacagggacgaggcttcaggcattggaaggaggtgctggctttctgtccctggcatttgatagtgattggagttgactcgcccggccttggagcagtagaggctggtcaggattgacttagaccttgagtgctcagtggctgtctgctttctgctgtacttttcctcccctctcagaattggagtctgtggggagagtaaggttctacaggtataggggtgtgtgtcacacattgggggagttcactgtccttttcttttttaaataataactgtattgctcaacgtgagaattgtgtgcaacaccaaaatataaaggatgaaagcaaaagcaatcctaaatctttctaccccacccctgctggctaaacatggacttctcagtggctttgtcatctctggcagtctctggctccaggccttgttacttggaatgtgttcataagtgtccctcctcctggtcattagatcgaggcccacatatctgccacatgtgaggagagagaaggggctggtgatttgaggcctgccagtaaagaaacttgctggtgacagtcagctatccaagcattgcaaggccccgtgtctagccagttcagacaggtcactgctgatggcacgttccatgacaaggctctggaaaaaccggagcatgttcttcgttgtcatgagcgtggcagcagctaccacctttttttccttgcctggtggttctccttagccacatggagaagagaaatcctctgagacattccattttctgttttctgatccaactccacctgacagctcccaaccttagagtactgagcactgtgccaggagacacagcaccctcccccacac

SEQ ID NO: 103957 - DNA, 4114 bp, Homo sapiens
tcttactcttgttgcccaggctggagtgcaatggcacgatctcggctcactgcaacctccgcccgcaccgaggttcaagcgattctcttgcctcagcctccctagtagctgggattacagtcacccgccaccatgcccagctaatttttttgtgtatttttagtagagagggggtttcaccatgttggccaggctggtctcaaactcctgacctcaggtgatccacctgcctcagcctcccaaaatgctgggattacaggcgtgagccaccgcggccaaccaggaatgaacatttttaaggctcttgatatatattgccaaacactttccaagattgtgctggtctattcccctcccccagaatcctgggtgtgggagcccagaggctgctggcccgttcccagcaggcaaagatgttacccatctcctaggaaggaagtgtagcagcctctgagcgccacaggtctcgtttctgtgggtgctggagtgcgtttggtgctgttctcctctaggtccagacatcatctgtcggtggtggacgtctgcaatcactgtggccatcagctggctccagggagacgatgcagctgtgcgctctcattttaccaaagtggaacgcatccccaaggccctggaagtgacagagtgcgtaaccctccttggccactcacttgcttctctccaggggaatcttgtttgagttagcaggagcaaactggactgggtgggcgtgttggggtgaagggtcaggactgcatgacaggtgggcggctagaaaagtcgggggtgagggcaccatggagaactcaagttgggccagcaggtcctctgtgcaagtgtcctgctctgcacaacacgacagttgtcccagcagctgtcagcactgtgtccgggtcctcctccctgcagccttcatggcgccacaggctgaaaagaagagacgagagcagtgtggcccccagcatcttcagaagctttgtggtggaggcaggcactggtggttcacaatcagtgcagagaggccactgttgcccccaaaactcatgtgcactggagcatcttgcccctgtgtgctagcattttatccactttccttccagccacctccacccccaccatcaaccctggcaactttgtcctgtaactaaaatagcctttagcacatggcataaccggagagcttttgacattcctctttggagattcatgtctgcgtcttgggggcattcggcactagtgatgggcagccctgcctgctgactccccggctgtttctaattggatctgagtattctaagagaaactgtaaaatgctccaagacagaaaggccccacgaggtcctatccttagagccaaggctgtagcatttcctatcaagcagacccttaaccggcgcacaggaaggagctgagaagagtgagtatacacaggcttgaagtcctttgttccctgaagtagatgtgacaccctaatttcattgaagtagccccatttgtaagcactctgactaggtaagcacccagcccggtatagcattccacctgtatgtgtgtctcccccagtcgatgtgcctgaggacactgagactcagcaggtaagttgtccaaagtcacctcgctccagagcagcagagcttccatggacagccaagacacccctgcaggcactgctgcctgctggattcacttacccctgggtccctctgcttttcagggactaggatgctatgagaaccctcccccatccctagcctccccttccactcccagtctcctctacagaaagaagctaactaagtatctccagagagtttaataccacatctctgggggggtggtcccttaaagaacgggtacaacaccttattgtggccactttataggtaaggaaactgaggcacacgttggaatgactatcttgggtggcttcttagcagcagacgtgatggtgaagcctgtgtctctgacttccagcattgaatgaaggtgctaaagggtggggcgctaaccctagctcagggctggcatttcagatctggagctggtggcatggtgccatagtggcagcattggagtcaacagatgcacatgtcatatcagtgtggggcgtggcagtcactggcttgggcccctctgcctgtcacgcaggtgacacatagtgacctgcctctcgactccctgtcactgctgcaggagccccctggtgaaggccatcttccatgcctgcagagccatgcatgcctcactccctgggaaagcagatgggcagcagagttccttctgccattgcgagagggccagtggccacctatggagcagcctcaacgtcagtggggccacctctgaccctgccctcaaccacgtgagtgggagctgagttggcccctgggggaggtgctctgcactggtttacgagaacactcccactcacctcatgctgaccctgcgggtggggccatccgaaagacagagaaaccaggacagcagccccctttcaaaaaagttacggcttattggcctaggtggactcctttttcatcccttttcagcctctgaggcaagtgtgtttctacctgcacctttcttaggctcccagagtcccaggtcctgctggcccatagcctctgtaagcccaggtgcaccccagctggccaggggttcacctgcatttgctccagcggtttgcgtgacttcccaggcctctgcaggcagccttggagtgggttcctgccccctcgggcacacaaacagagctgaagaccaccctgggcacctccttggctggccgcatacctcctggcgggcagctgtggtgcattgtagttgcattgcatgttctggtggtacccatgcaatgtttccacagtgcatcacagaggcctgcctggccctcgagagactgccctgactgaaggccctatcaggtgggggaggggatcctgatagagggcactgctgccactgttggggcccaagtcacagccatcccaggaaacaggagggcacccagctgaaagtggagcatcacctggtctacggggaacatgtccttagctccagagtgggagggaccgggagagtcctggagattcagattctcagccactccctggggcttggtcttagctggctaggctagtacttcaagctagatattgtcagtggacctgggcactgggatgaacccaggacagcgtggcagcccctacagggacaggcaatgtgcagaaaaggcccaaactggctggacgcggtggctcacacctgtaatcccagcactttgggaagctgaggtgggcagatcacctgaggtcaggagttcgagaccagcctgaccaacatggtgaaaccccgtttgtactaaaaatacaaaaataagccaggtgtggtggcatgtatctgtaatcccagctactcaggaggctgaggcagaagaatcacttgaacccaggaggtagaggttgcagtgagtcgagattgcaccactgcactccagcctgggcaacagagcgagactccatctttaaaaaaaagctggtgggggtgcccaaatgccctgggctgccaagaccaaaggcagatggtgagccacatttcaccttctcttttgggctttccattagtctcttccgtatttgtcttcatgagagaaccaaacagtacaggctcagtttggggaatgagaggcttgcagccaccctttggactggggttccttggtagcagctctgtggtaggaaagtgagcctagaagacaacgccatgcagcctgatggccctcggagggcagaatccagacataggcctgctgcctccatgcccacaggtgcttctgcagcatgcacagcttagaagtgccaggttttgaggagagggatccttttccacatccccttgaagcacacaacagccagaaaacagtgtaggcaaggatcaaggccttgtgcagggacagggcagggtcttcctcaggcccagtgtcctgggaaggaggaaagccagggctgggtgagatgaggctcagcctgagggagttcatcaggaccggagggctgcttgcggcccatctcaacaaggactcctcactgctcggtgtcgtgcaggtgtgccactg

SEQ ID NO: 103958 - DNA, 1050 bp, Homo sapiens
gtcagggctcctggcctggtcccgagctccacgttgactttcattctttttcacagtagctagaggcttcggttctgctgctgggtaacatccccttggcagtggccacgtgatctgaactaagtcacggaggaaagttctatgactgggcttgccaggctccagctatttccttttttgtttatttgtattgctatataatgtattcaacatatttgtacctgtatttttttctaaaaatttgagtgagatgactcaagtgtcattgagggggcacgggctgggctggaagaaggcctcagagcgaggctgctgccgtggagcttgggattcagcccccacacccatcaccctgaggtgctgcggggcccacccagggttgcactgtggccactgtgtgcagcaagccaagacagacacaacagacagtatcatcggagagccattccttactgtggagaagagggcatgtaccccaggcctggagcggcacccctgcctcctggagcccactctggtcagctctctggtctgctcacagcatggctggcatcagtggcctttttttcataatagatggggtcttgctatgtggcccaggctggtctcaaacccctagcctcaagctgtcctcctgcctcggcctcccaaagtgctgggattacaggtgtgagccacctcgcctggtccaaaggcctcctcttaaataccatttccattctgctgctccctgctgagagcccatcagcggctccccattgcctaccaggaccagaatccacttggcagcactgaagaccctccctgaagactgagatataaaggcatcaaaaagagcttgagattttaagaaatgacagacctcagccttgcccttcacccaccagtggctcatacctaagcgctgcagactttacccgcacacctctagactctcttcctttctaaagatacggaaagaggataccaaacctctctggtaccagcccaactgtccctcctcacccctctgtccctgtcacacctgtccttttgtcaaactgcaggcag

SEQ ID NO: 103959 - DNA, 4719 bp, Homo sapiens
gaatgagtccaggtaacgccaaggaactgcaccaacttcatggtagattctcggttgtgacacacatctccttcccacaggagaggtggatgcctggcccggccagcgagagcgggccaccgccatcctgctggcctgccgccacctgcccctctccttcctctcctccccgggccagcgggcagtgctgctggccgaagctgcccgcaccctggagaaggtgggcgaccggcgctcctgcaacgactgccagcagatgattgttaagctgggtggtggcactgccattgccgcctcctgaccaccaggctcagcccacccctccacctctctctcgatttctctctctccccctcagcatcttcccgctgagagtggtggggaagagccttgtcttcttagctgtcacctgccgaggcttctgggccactcaggccagtgcacccctgggcagagccccttaaagctgctgtcactagatgcccatggtccagggcctggtgggcgtgagaggataggtggcagggcagaaactgggcagccctgacttgatagcagcagggggagctcccaagctgccaagcccctgcctccagccttcctgagtttctctctcctgaaccctactctctcctttttgcttcctcagtttttatcaggctttctctgggggacagcagtctctgagcaccagggagcagttgccctcaggcctgtgcccagcatgccctcccctttttatacgaatgttttctaccagtgtgcttgggtttgccatgatgcgaggctgagttgctgtagcgtcttgattctctccctgggtctgcgttccctcccctgggcctgactgagcctgctcattgtttttccctttattacacaggacagccaggggaggaggggggcccagccctgggaggctggtgggaggcagggggcaggcctgcggatgcatgaaataatgttggcattattttttaattttttaaaaaataaatggtatcttatttaattgtcctgttccttcccactccccgcctcctaggatgttagcccaagctcagggtaggcccagggggctgggagaaatgaagccacccatggggactggggaccaggggccttcagcatggcttctaggttccctcctccccctaccccatctcctacctccacagtacagactgtccccaacttaacagtggttcaacttaaaccatgtttcaactttacaattggtctgttggggtattaaatgaatttgtgacttaggatattttcatttatgatgggtttatcaggaagtaaccccatggtaagttgaggcatatctgtatatatttaaacctaattaattcttgagctgaaaataaataaaccaggatggcagggaccaacccctaatccctccccagcggcaagcccctcttttcagagtgggcagagggttgcctatggtgggcactaggaatgaggtcccctgcctcgatgcgggtcctaggagaaaaagtcctacttttctgggtccccaggtgcagcacctcccggagactgtttctcccatggcctcctgagtgatgggccctgcctccctgtgcctcatcctcaggctggttggagcagagggtgggcaggagccccagcacagactggggggtgctcacagcagggccaccttgatgcaggctggaatgttatccctggggtgtgcttggaccccacctgctttctttctctcctgcccctcccctactctcactgtaatttatggaccctgcccgcctgcgtgttgtgtgtatgtcctgtgccttttctcactattgtttgggtgtgggagggggtggtttttcactgaaaaggggggtacacctatagctttcttgatgttcaatcaatcagtcactgtgtcccagacatattcaataaacacagattggtaccacccagcacgaggtgtgtgagggtctgtagtgcgactgctgtggtgcccagccaaggggctgcgtgacttggcaggcaatgggccagggactgagggcagccccccaactgctgagagggcccctggcttcagtctaatgggcctcccttgtccaccttccttccggtgcctggcgcaccctccagcctgggataaaagggctgtgggtggcactttgggggtcagaggtcactgtatccaggttccagcttgttccctggatgtaatgcaggctggctgacagatttggggtgctgaccctctcccccactgggtaaactgctccttagtttctccctccctgaagtcagtgatcctctgagccaggaggctcactggcccacaagtcagatccaagtccaggtcctgtgcttcccagctgggtcacctggggtgggacctggcctcagtctccacttccacgtgtgcagaattgggaagctaagctcagccatgaactgcagctccaaaggcttgtctgccaggactgagtgatgggatgcaagtttacagcgagtgccttgtgtggctggtgaggccaggcttggcgtaagacacaccaggggacaggaccacagactgggatgggagtgctgggcctcgtcgcaagaggagtcaggatgtgactgagcatgtggctgaatccctcagctatgagccacatccttctctgaagggtagtcacagcaggctaccctgagaccagagcagcccggtgaggcccaattgcagctggtcccgtgcacagctccatcattttcagggatggccactgcccacagcctcagcctggctccactgggatggagatccagggcccttggaactgagaatgagcagggggaattgcccactcttggcacagcccagcagggggtgggaggtggggtgagaagcaaccagattcctttgtgagtctgtgtaggctccatgcctcagcccccaccctcctccagctctgcacagctgtgggacaggggcaggaccgtgggcccagagctctgtcctggtgcttctaggccttggtttccttaacagcctaaagggacagggaggtggaccctttgtggcaggagcggagaccgggcctggtgggttctggggcctcagggcagcccaaccagcagaaggaaagctccagactgtttatatataccctgggaacagggacccctccctaccaaccctcagaaccctccctcccagccaaactgcctgttgcttgccattccagccgattcacagcaattcgggagagtcctaacctgggagtctgctgggtgaccttgggcaagctacttaggtttcaaaacccaaatttcctcctctgtaaagacacacccacttgaggcgcttgtggatttcctgagaaaggccaacaaatggtggccattgttcttaaaacagtacaccacacttcaggtactcaggagggaaacagacccacctgggtggctttgctgaggtcacacacctcaaccagccacagccctggcccctagcctccccacatcacacacctcaaccagccacagccctggcccctagcctccccacatcacacacctcaaccagccacagccctgacccctagcctccccagtgttacctggcggagaggaactctgtggaagatgcacgcagactgctagcagtgctctggaccacagccaggtgcaggaagccctcccggagggacactgccagggaccctgctccagcttttcccccatttccttcagagaagctcctgggaggaggcgcccccatccggagcaccagatgtccacacggcccacacccattaaggggggtagcccggggccaatctggccaagcgacctgcaggccaggggctggcccacagccagtggtcagtgagcatcagccaggttcagccaactcaagctgcagagtggcggctggagggggctcaccttcagtacagggcatggaccccccactgggccttggacccaacagccctctctcctgtgcccgggcctttctatggctgaagtctaactgttccctctctcccagggctcccacgggggtgggcattaaccctgacattcaaccctggcccccctctccagccacttccccctggctctggccggtgcactggagcagtcctccaaccttgcactcgccgtgccctctgcctgcactgccatctgtacagtcagtgaccaatggtgcctcgcagccacgctggggcttctttattctcaggggcaggaaccacataaaagggcttatttacaagacgaacccgcggcctgcaggctccaagacaccactgccgttgaggcagacagaagagctggccttacggcaggcgctcctctccctgtggcctgaggctccgacgggcagacaggaccccagcccatgcctcgagggcaccgcggccccgcttcacacggtgacctcggtcttgctattggtccttaggtaccgggacccgcggcccgcgctgccgtaaaggccggggagctgcgggttgaaggtctcaggcatcttcacactgaactggcgccgggccgcgtgcccgggtcgccggggtacctggaaggcccgagccgtcgggtggctgagcggggcgggccgggccgggcgactggaggtccaggcggcataggggcccggcgcggcagggggcgcgtagaccggcggggcccaggggcaggcgtccagcggcgcaggcaagtccggggatggtcgcggagccc

SEQ ID NO: 103960 - DNA, 1074 bp, Homo sapiens
ctgagcttgggtgctcggcgcggcgtcactcttccctgccctgtccccgcagaggccgccccgcgggacttctgtcagcgtttccccgccctcgagccgtccccgcggcaacccccggcgcgggctccgcgaccatccccggacttgcctgcgccgctggacgcctgcccctgggccccgccggtctacgcgccccctgccgcgccgggcccctatgccgcctggacctccagtcgcccggcccggcccgccccgctcagccacccgacggctcgggccttccaggtaccccggcgacccgggcacgcggcccggcgccagttcagtgtgaagatgcctgagaccttcaacccgcagctccccggcctttacggcagcgcgggccgcgggtcccggtacctaaggaccaatagcaagaccgaggtcaccgtgtgaagcggggccgcggtgccctcgaggcatgggctggggtcctgtctgcccgtcggagcctcaggccacagggagaggagcgcctgccgtaaggccagctcttctgtctgcctcaacggcagtggtgtcttggagcctgcaggccgcgggttcgtcttgtaaataagcccttttatgtggttcctgcccctgagaataaagaagccccagcgtggctgcgaggcaccattggtcactgactgtacagatggcagtgcaggcagagggcacggcgagtgcaaggttggaggactgctccagtgcaccggccagagccagggggaagtggctggagaggggggccagggttgaatgtcagggttaatgcccacccccgtgggagccctgggagagagggaacagttagacttcagccatagaaaggcccgggcacaggagagagggctgttgggtccaaggcccagtggggggtccatgccctgtactgaaggtgagccccctccagccgccactctgcagcttgagttggctgaacctggctgatgctcactgaccactggctgtgggccagcccctggcctgcaggtcgcttggccagattggccccgggctaccccccttaatgggtgtgggccgtgtgga

SEQ ID NO: 103961 - DNA, 1043 bp, Homo sapiens
tggcccccaagaggtgggggctttgctccctgtggctaaagggctgtggtctgccctctagtctcacatggagggcccatgtcctctatcccggggccatgctgagagtggctggggtgccctggccagaccctgtggagtgcaggagcgcgcgtgtgtgcgcacgtgtgcatggagtggcgggctggatgacaggcagctccagcccatgaagacccaggcaaggatttgtgactgcttcatggaagggcgtgacctgccctcccctggtgtgggttcggggaggaacgggatctggggactcccaggcctctgcctctgggtcacactgctctggactcgccaggactttgtgctgattccgtggccactctgccctctcccaatgaaccgaggcccacggcactgcatcctttcccctggccccagcaagaggtactctgtagcattgtacttgtttgtgggggcttttaaatacaggagaagggaaaggaaataaccacaaggggtggtcctggcgctgtcatgagacaaaatggagccaagagagctgactcgaagccctgcaggcccaacccagccagcagagccatctccactgctgaccccattcctggaacacgggaaaagctgtttgtgtgtacacctacacgagggggcaaaggcacagaaccaggcagtgaagaaaggctcccaagggaaaacagagactccctctggggaccgtggggaaacgccctttgtcactcatagacttctgtattgtttgcaggtttttcctgagcacgtgttcaggtactactgcataattacaacgaaaactgattttgaagtacagagtgcatcccaggccccagagcagtttcacatccagatctgggggactgggcctctctgtccccaaggactgctccccatgacactgtgcttgtcccatccccagagtgctctcactttccccaaccccgtccctgaagcatgtagggcccaggccacgcttcacagtcaggtggacacagaccccctgcaggcccctcccatct

SEQ ID NO: 103962 - DNA, 1009 bp, Homo sapiens
aagatggtgccactgcactccagcctgggtgacaaagcgagactctgtctcaaaacaaaacaaaaaaagccccagctttgttctagtcaaggaaacaaatggggtaaatgacgtgctggaaagtggaggcgtggcgtgtcaggtggtggtaaacaggcaagagttaggcagggtaaccagggaacgcccctgcaaacaggacttctaaataaataaagacctgaaggaagtaggcaggcaggccacggagatacctcgtggaaggaggaacagcaagtgcatgggccgagtgtgggacttgcctggtgtgctcaaggtctggcaggcaggcctgggtggctgcagcacaatagcaaagggcgggttggggtggagaaatcaggaatggtggggctggatcagtggagcctggtggggagctgctggagggcttggggccagggagggatgtggcctgacttgggttttaaatggacccctctggctgccgggaggagagtggactgaagggaaactagggcagaaatagagagacaggtctggaggctctttctttctttctttctttctttctttttctttctttctttctttctttctttctttctttctttttctttctttctttctttctttttctttctttttctttctttttctttctttttctttcttttttgagacagacactgggcagcatcgtgttcttccagcggacgtgtctagaacatctgtgcccgggcctagagcagtcttgtccctctctggccccacagctcccctgggcccattcctttttgatggcaccttcttatctgtggtgagggccacccgctgcccctccctccttcctatccctgtatcttctgctccctggtcttgagcatctggggcccgagctgcctgggcattggttggaagtagccctgattcagagctcagctctggagtcactagctgggtgaccctagacagtttgttcgacctagccagccttgttaagccttca

SEQ ID NO: 103963 - DNA, 1030 bp, Homo sapiens
ctggctcaggactgtgctgagacggtgacctaacttgtgatgggaagtggtgaggatgggagaggctggctgaggtcaatctgtaaggtgaggagagaggagccagtggtcagtgcacaatgtttaaaatacacaacggccgggcacaatggctcacacctgtaatcccagcactttgggaggccaaggtgggcagattgcccgagaccagcctgggcaacatggtgaaaccccgtctctactaaaatacaaaaattagccaggcgtggtggcatgtacctgtagtcccagctactcgggaggctgaggcaggagaatcatttgaacccaggaggcagaggttgcagtgagccaagatcgcgctactgcactccagcctgggcaacaaagtgaaactccatctaaaaaaaaaaaaaaaaaaaaaattaaaggacaaatatttctccagagaaagtcaccctcttgtcattctctggcctctaggatcagagaagcaaggacttctgctttctccgttgtaaagttttgttctctggtttgttttctcaccctggcctggccaccccagtctccagaacacagaggagtccctgcgccatgtggatgccagcttcttcttggggaaggtgtgtttcctcgccacaggtggtaagtacgttcctcgcctgttactgcccacccccagccaagggaaagctggggcggccgtaggcttcttgctgaggcaccctgggtgatggaaagagcatgtattttacacacactggggcctatcggagggtggagggcaggaagaaggagaagatctggaaaaataactaatgggtactaggcttaatacctgggtgacaatgatctgtacaacaaaccccatgacacaagttttaactacataacaaatctgcacatgtacccctgaacttaaaataaaagttaaatttaaaaaccgaaagaacacatatacacatactttggaatctgacctgttgtcagcctttctaagagtgaatatgagcagataactctgcca

SEQ ID NO: 103964 - DNA, 1032 bp, Homo sapiens
gctctctgaggcgccaagccagcgcgcgctaccgtggcgggggcggggaataggcggagagccatgctctgaaccaattggagtagccgctctctgaggttgagggacgcacccaccaataggtgctcggcggaccctttcccagcttctgattggcgagttcccgcgcctggaattggttttcccgcgtctgggggtctggcctcctggagaggccggcggtgggagcgagggtcgggtagtagagagtgcggtgcccacaggcctgcagcgggtccaaacctcaggcccccagcccgtgccgcttcgcggggtccacttctcgggaaatgtcctccgagccgcctgctggcggtgtcccgatccccccgggagtgggtcgaagggccaggccctccccagggggtgctgtgcctagggctcgactgtccgctctctctccctgcgcagctggtgggcacggaggatgctcttctgcagcagctggcggactcgatgctcaaagaggactgcgcctccgagctgaaggtgtaagtagccgcggctgtggcctgggcccacgtgtctctcactccagagggattcggtcctagctgctaaactccgaagcccagcgccccctcctctgaggctggtccttctcccagcatgcagcgtagctggctagtcccatgccgtcttatatcccaacctccccttgccgaggtggtgactaaacagagcccgtttctggcagagggaatcagacaggagtaatctgaataggaccggacctgtcctgcctctgtgctggcccaaggagtcgtggccacaagagcctcgggtggctaggatgaggtggggagcccttgacggcctctttccacatgaagggcagcatttaaacggtcgctatgaggggggtacggatatcttgagtcctgcaatttcctgtttttcagccacttggcaaagtccctccctttgccctccagtgtgaatcggccccgaattgacctgatcgtgtttgtggttaatcttcacagcaaatac

SEQ ID NO: 103965 - DNA, 1117 bp, Homo sapiens
cccagcctcctcctcctctcacagtgccctctctggcatgtatcttcacaggacactaaggcttctgggagcacaatctaaaaaccactacactagaagaaagagtggatatagagccaagatgttattagggtttgagttcctggtcttgcatgtattagttatgttgctctgcacatattttgttagaagaggattcatctctctaggaccatctcaactgaggataaagatagttctgcttcaggatccacagggctgatataaaaatgaatttggctaacaaatgtgaatgtacaatatgcactgtgaggcagtatcaggatgcaaagtcattctatttttccttttagtatcattaaaaagtgaaaacctaagcaaaaaatggaatcacgagaaaacagaaaaccacgacactagacatatgcagaggttgtcccttttcccagtggtcctgtggctctgggaaggagagaatatggaatccaagtgatgtttccccaaggccctctgcagtaagcaggaagccattcccacctgcctgcaatccccactcagcctggccatcccccagtgagtggtcagacaaggtgtggcctggatcatggctctagaattctgtaagcttatggagaaatattaggctcaggaggtggatgcagagtctccctacctcctcctcctgctttgctgtaggccagagtggactgggcaaatcaacgctggtcaacacgctcttcaaatcccaagtgagccgcaaggcctccagctggaaccgggaggagaagatccccaagacagtggagatcaaagctatcgggcatggtgaggaccaggcagggacccctatgggctttgttcagtgagtgcctctgctggaaaggggaaagaatggggcttattgaagaataagatcaataaaaggcaaccttaagacaaaacagacgtgagcacttcactctgaagcaaactccttagactgcaggttcagggaagagagagcagggagctcgaatggaaggaggtgagatttgaggtggatgataaagtacaggatttagacaggtagaaagaggtaaggagtgggcaggtacggtggctcatgcctgtaatccca

SEQ ID NO: 103966 - DNA, 2262 bp, Homo sapiens
tggccaatgatttgcaaatactaggtattcaatatatgttgaattggatttgtcatgtagtgcatgacctttttaaaatggctcaattattattttctctgtgttacttccaaccggattataagcttctgaagaatgggaagtgtatcttaggccttggccagtttctcagacttggtattagttttctcttctataaaatggtaaaaattatagtccctcttggctattatgccacagcgtctagaaggatgtcgtgcccattgtagctgcttaatatttgttcaatgaatcaaatccagtacacccaagtgagcaaatctctggaagggttacaaaaaatgacctgtcccatagctttctcctaaatgcctccgtgacccaaacagaagctcacctcctgggtgttgctgtattaatgaactgactacctgttttgctttgttttgttttgttcatagtggaaaacctcaaccactgtgagtttgccctgcttcgagactttgtcatcaggtaagatgtctcccctccagctgtccagacagcaggttgaattatttggggtcagggtctatctgttcagattcacctcctgcatctccaggtctctctgacagagctttctgccccagttccagctcctgttgcaaaatggaaggtgctgtagaagaatccttagctcctgggagtggttcccattcactgggtccagtccctcgaagtgatgtgtgtcaccgcctcctcttcctgcccctaattgcagccctcttcttctcaccctgtgtcctctaggacccacctccaggacctcaaggaagtgacacacaacatccactatgagacttacagggccaagcggctcaatgacaatggaggcctccctccggtgagcgtggacacagaggaaagccacgacagtaacccatgacgaccacttctctgtgtcatcacacatacccacttcacacacacacatcccaaataccaccaccaaccaccttcttcctctcaactctgtcccacaggcctgtctggtatttgtggagcatcttgtctgtgtgtgtgtgtgtgtgtgtgtgtgtgtgtgtgtgtgtgacagagagagagcgagagagcctgtgtgtgtgcatgcaggggtgaggtattttcactgccctccctggagagtcccttgtaagtttggctcctccatgcctgtccattatctgtctcctttccttgtgtcccaaaacaaagctgtttgcctcactcaggagatctgggggaggtttcatttaaaagtgctgggagcaggtgagccacaggcaactcttctctcggaacctgcacacaaactggggctatagagattctccaaggacagatggcagtggagctagacctgagtagggggcagggagttcaggacaaccctcctgtaagttgggggtggtctgggggtaaggctggggcttcctgggaaaaggaaggccatgagaaggcagagaagtaggccagagctgggttcttgcagaaagcatcagtgcctacaaatggagctccacccttcagtctgtgtcgtgttcagtgtcacaaagctaccacctgtcaccagagcctactgctgctctccactcaactggcctctgctgccaggccactgcctgtctctgcttccgactttgtcttctttctccctttccctccttccctcatacattgctttctctccctctcctgcgtgtctctgacatctctcacttccttttagatgaatctactttaggttcattcctatatttagcatttatgcccagtctacttccagaaatgactttagactgcctttcacataaaatcacaaaactacaggacagtacaaacagattgccagagaaatctgggtcaaagaaaggaataggaaagaaagtttctgtagtcaagcacctgaacaggccctgagctcacaggcagccaatgtaaagagggaaacacagtgagttatgcagttcccagtgtccagttaaaggaagcacacatgctagtcatgtgagacaaccttttattgggacatcaggttctagaactaattctaaagaagtatcagaaacaatatacataatttgtctttcttagtaatttggcttcaaagacaaatttttgaccacacctccgttttctccgtcagacttctctcccttctaagcaggcttctctgttgctccatttgcttcatacatacttgacctctcttttctattccccatcacttttgtgctgaag

SEQ ID NO: 103967 - DNA, 1027 bp, Homo sapiens
ctcaccaccacagcccctctcagccctcagtaggtgggaggggccagctgcctctttaggccagttgcatcctccatttatccaaaccactcctctcctcccagtggagtggggttctgccagtacagccctactgcatcatctgcgtcagccggtcctagcccatctgcagggtgaaagaactcatcaagagctccttctgcccttgtaagcccatcccagctacttgtaaccatctctaagggcaatggcattgctccctacccattcatctgcatgagctactcttggcttccttaaagggtcaagaaagcaatttttctgcttactagattcattgagatcagctgtgtgagccccaaagtgggacaagggtgtctccttcattacttaaagatattcatgagggtgggtcactacagatgttggggagcaagggctaggatcactttttaaaaaatcaccacttgtggctgtcccagagtgcggttgtacatcctccccacctcataacgcagccactgaggaagagtggttttcctaagaagacattgctggagttgactttcttctgtccaaacaaacaaacaaaaactaaacacacacacaaacccccagaaacccacaatatgtacacgctaaggaaaaactagcacccttctgtccactcagcaataagagggatctcttcccacctaccctacctactcctacccccaacccccttccccattaatgtgagtaatgaattagcctgaccacaggtggtcactgtaggctaatggaaaatacccaagggagggcaaagccccccatcagatgcatgaatgtttgcgaatgttgactgccactgccccacacactgtgtctttatagaattcccctttgcccaccctcttcctgtctccacctggacacaacttgctcaaaggctggtgacttgtgggccattcatctacaaccaagtcctgatggagcaagaggcccacgcctaggggatgcaagaacaacccgtttcttaaatgtt

SEQ ID NO: 103968 - DNA, 1045 bp, Homo sapiens
ggtcctgtaattgttgctagactttatgtgttgtacaactaaacattgctgtttgaacagtaactgcctggcctgtcttatttgtgctccttgaccaaatcagccattatgtcatctcacccatgtgtggagggtgagactctcttggtaagaaatagccacagatattagagatgaaaacactttgtgaggtcagttcatcttcagttggcgtcaggtcgggcctcagtcattattttctagtgtttcataaccaaagtgagtaatggatgggaggttgaggtgggaagatggcttgagcatgggaggttggaggtgcagtgagctgagatcattcctgacaggaccaacccaagtccatacctaaaggcagggggctaagggggcaggtgaggtcgggaggccactcacctatcactcaccccttcgcgctcgagccaattctcagggcccgcctctttctcccctttctcggcgggggcctctaccctgactccgccccgctccccgggcactgccccaccacgtgacccggtctcgctcctcctcctcctcctccttacgtcataatctccgccctccccttcagaaccgcgccccacagctcggcgcaggtcccgcccctttccatctacggggcggcaggaggcccgaagcaagatggcggtgaatcagagccacaccgagaaccgccgcggagccctcatccctaacggtgaaaggtgcctgaggggaagcacggcgtgctgtcggaggagaggagacgaatgagatagacatggcggctcgcaaactctcagcgagtcagggactttgccgccttttttgggcgcggcgctcttagctccgcccccgacctttgggagcgcgcgcccctcactggtgttccggcatgtggaggtggcggaggccggaacgcgtggcctcgcgcgtttgaggggtgggggtgggaatgcgccttttcaaggcgcggggcccagacgcatgtctcctcagggcggggcggggagggggtgcgagacgcgtgtgtccttcgaagagaggc

SEQ ID NO: 103969 - DNA, 1095 bp, Homo sapiens
gccgggctcagagtaggtgttgatgagtatctgctgagtcagggaaggtgggcagatagggttagataagctggggtgctggaggcccgtggcatcctccctaaacctgtgtgacatggagctgtgaactgggggacccagaactcagggagggccagggaggcaatggtaggtcctgtctgagcaagggaccccagccagtagccaccttctgtgcccaggaaaaatctctcatcgaagtgtacatgcggcctctgtccaacaaggctagcgccttagtcttcttcagctgcaggaccgatatgccttatcgctaccactcctcccttggccagctgaacttcaccgggtctgtgatatatgaggtgagcacccggctgcctgcagccacccgcctgggcttcagatttctgtgggagggtattatggggggtggttgttcacatatggcctcccctgagccgtgggcttagggcctctggcaggtgcccatggggagctgcaggcactgagagctgcagccagtgccgtgctctgcaccagtattttcaacctatgcaaacagaactactgcatataaatatgaatcccattagcctctacggctgtactcctcccaagggtcagcccttgctggcacgttcctcacagttttccatgggctggggctttctccactgcccgtgcttgggcacctgctggatttgctggtggagaagtgatggggattcagggctcccacttctgtagggcatactggaagcccagcacagacaggccaaagtccaggcagaaggcttctacatcctctagcggggggggtctctgtgccgccactctcatggtggcattggtgatgtccctccccactgcaggcccaggacgtctactcaggtgacatcatcagtggcctccgagatgaaaccaacttcacagtgatcatcaacccttcaggggtagtgatgtggtacctgtatcccatcaagaacctggagatgtcccagcagtgaggagctgggacatgtgacaggctgtggtggcaccactgagcctagaccatggagccttggcatgcccagggcaagtggggaggtt

SEQ ID NO: 103970 - DNA, 1050 bp, Homo sapiens
tttgacaccaaaaagggtgggctcaggcctctggagctgagaagaaagcagacagcagtttctcactgagagaacatgggggtgggtgggtgtcagggagggttgtttgtgggtgcaccagcctgggcccacaccctgggtttgacccaagctggcatgagaaggcagggtaggctcctggcaccagcatgcacagaagggagaccccggtagccccagagcagggccaccctctgaggccctcctcatcctgagcaagccggtggggcctgttctcttccctcttccccactctctgtctctcctgctgagcctcctcaactcctgtgtgggtccctgggctgcagcgtgtgattctggtgctggactctgccttcccctcgacatccaggtgaactacagtctgctggcggacatctgcaacctctggcgtaactatgatgacatccaggactcctggtggagcgtgctctccatcctgaattggttcgtggagcaccaggacatactgcagccagtggccggccctgggcactggaatgaccctgacatggtaccaggatggagggggatgtccctaggcccaccatctgtgacgaccctgctccccactgccctgtgctttcttccttcttggaggctcactgccgggttctaggtcagcgcttctgaaatgtgtccctgaactggttgctttagacttgacttagaagctggtttccagggccccatcccccacgttttgcatcacaatgttcaggggaagaacactgttaaccatctccccaggcaattctgatgtttctgaaagctcaagaacttgggtctgtagtgaccctggaataagatgttattgctctgcaggttgaagatcacgaccttgctattcctagtgcctggactgctctcccccgtgtgcctctgatccttttgtcaatttcctgcctcatcctccacagggacaactggccctcacagtcctgcttctagcccttccattctatctcggtcattgccctgtgacattttgttgttgttgcaatttatagc

SEQ ID NO: 103971 - DNA, 2415 bp, Homo sapiens
tgggattacaggcatgagccactgcatctggctgatgtgatattttcaacttacactgggcttatgagaacgtagttccgtggtaggcctaggagcatctgtactgttaagttctatatatgggatgggaggagctgatgggggttataggaaggttaggacataaggtgttagttttgctaattccagcaatgctgtggtgacggccagacctcaagccactgcctggcccaggcaccatcctcccacttactgctttgcaagagccagccattgcaggaagagccaattctaccctaaacccaggagtccagtttcccttatatataggcaggcagcctctgtagggctgagcaacatacagatggggtgggatgagggctggagctgtgggggcaactgatagtcaccatcccctcctcccttgccccctagtgctcttgctgggacatgtggcccaggtgctgatgctggacaatgggctcctgcagacaccacccatgggctggctggcctgggaacgcttccgctgcaacattaactgtgatgaggacccaaagaactgcataaggtgagtaaggtccacactcacctgatgagccttgcccagggccctgcagattcgggggcaggaagtggagagtccactagaaaagagggcaaggtcagagttctccatcccagagactgcagccagaagtcactcggactgtctgacacctagccccatgacctgtctggagcctctgcagggactctcaggccccaacctggtcacgaggcagggaccttacatggacccagcccctgagataactcttagaaggtcaggccaggccccctgtacttcccctgacccagtcctgccttttagcctggggccagccactcctttcaagccagcttgcttatggctcatcgcacaatctctggtggtcatttacactgatacctggcttagggctcagcaaggtcatggtttttatagcccagattcaatcagagctgaggcagggtgtgggtgagggccgggctgggtccctgagctaccccatccctctgcccctcactagtgaacagctcttcatggagatggctgaccggatggcacaggatggatggcgggacatgggctacacatacctcaacattgatgactgctggatcggtggtcgcgatgccagtggccgcctgatgccggatcccaagcgcttccctcatggcattcctttcctggctgactacgtgagccgcaccccagccctgcccttggcctcagggctagaccactcctttcaccctacctcgcttagggctcacttacatgattgagatctcacagtctagtgggggaaacagacaaatgaacaccgacttttggcctattctgttgagtgagagccagaaagggcatctcacacagcctggtattctaggaaggttccctggaggaggcatttcttgagctgagcccagagagatggcattggaggcagagaggatggcaggagcaaaggcctaggggcaagaaacagccgctgggaggtgtgtgttgggggagaggtgggccatcatgggcagaggccgggccagcatgctgggaccatctcctttggtccgtgggagccactggaggtttaatgggacggggtcagatatgccttgaggaggctccttgagggtcctgcttgagcccactgtgtcctcaaacccccacaggttcactccctgggcctgaagttgggtatctacgcggacatgggcaacttcacctgcatgggttacccaggcaccacactggacaaggtggtccaggatgctcagaccttcgccgagtggaaggtagacatgctcaagctggatggctgcttctccacccccgaggagcgggcccagggtgagttacgcagctggctggggcacgtaggcaaacggggagggtggccatggagacccacccagcgcccacctggctgagcttcccaattccccctacccaggggttagggggattgtggctcccaggctccctaaatatgagtggcagcatagcccaccctggaagcatttgaggctctgggtatgtggggaggcacctactgtttggagcttgtttcttcacatctgttgggaaaaggtctgggctaaggccccagactgcctcctgcacttcctcaggactgaaacaggttgggctttctctagggtaccccaagatggctgctgccctgaatgccacaggccgccccatcgccttctcctgcagctggccagcctatgaaggcggcctccccccaagggtaagccattctgccccctgcctgatggcgcttcccacacccaggcctccttacctcctgagtgccaggcttcagggacggggccttccagagccagggctgctctcaccacagg

SEQ ID NO: 103972 - DNA, 1096 bp, Homo sapiens
gccttttgtcttttttttagacagagcctcactctgtctcccaggctggagtggaatggtgcaatcttggctcactgcaacttctgcctcctggattcaagcaattatcctgcctcagcctcccgagtagctgggattacaggtgcgcaccaccatgctgggtcaattttttgtatttttagtagagacgggatttcaccatgttggccaggctggtctcaagctcctgacctcaggtggtccacccacctcagcctcccaaagtgctgggattaaaggtgtgagccaccctgcctggccttctccttttctaattacttttcttgccctgaatttttccaaggactttaaaatcaagttgcttatgatgggtctgagggtatgtctgtgagagggccaggtcttctttggtcctgccagagtgggctctggagctcacagctgccactctgaccctctgcagatgtccttcggccttctccgtgtgttctccattgtgatcccctttctctatgtcgggacactcattagcaagaactttgctgctctacttgaggaacatgacatttttgttccagaggatgatgatgatgatgactaacaggtaagacttgctttaccctagatggagcaggaagcagggtggagcatctgtctgtgatgcagtctggcctggtagcagcatttggacactgggggcagaagcattaatgaattggcccacttggtggctaatgttttcgtttgtttgttttttgagacggagtttcgctcttgttgcccaggctggagtgcaatggcatgatctcgactcactgcaacctctgccttccaggttcaagcgattctcctgcctcagcctaccgggtagctgggattacagacatgcgccactgtgcctggctaattttgtatttttagtagagacggggtttctccatgttagccaggctagtctcaaactcccgacctcaggtgatccacccaccttggcctcccaaagtgctgtgattacaggcgtgagccactgcgcccagccaacttcatgtgctctaatatgtgctgcatggcattctgtcaagagatgaggacactc

SEQ ID NO: 103973 - DNA, 1032 bp, Homo sapiens
gaatgcttttttatctcattttagtgcttgtgatggcatctttcatctaacacgtgcttttgaagatgatgatatcacacatgttgaagaaagtgtagatcctattcgagatatagaaataatacatgaagagcttcagcttaaagatgaggaatgactgggcccattatagataaactagaaaaggtggctgtgagaggaggagataaaaaactaaaacccaaatatgatataatgtgcaaagtaaaatcctgggttatagatcaaaagaacctgttcgcttctatcatgattggaatgacaaagagattgaagtgttgaataaacacttatttttgacttcaaaaccaatggtctacttggttaatctttctgaaaaagactacattagaaagaaaaacaaatggctgataaaaattaaagagtgggtggacaagtatgacccaggtgccttggtcattccttttagtggggccttggaactcaagttgcaagaattgagtgctgaggagagacagcagtatctggaagcgaacatgacacaaagtgctttgccaaagatcattaaggctgggtttgcagcactccaactaaaatactttttcactgcaggcccagatgaagtgcgtgcacggaccatcaggaaagggactaaggctcctcaggctgcaggaaagattcacacagattttgaaaagggattcattatggctgaagtaatgaaatatgaagattttaaagaggaaggttctgaaaatgcagtcaaggctgctggaaagtacagacaacaaggcagaaattatattgttgaagatggagatattatcttcttcaaatttaacacaccttaacaactgaagaagaaataaaatttagttactgctcagataaacatacaacttccaaaaggcatctgattttttaaaaattaaaatttctgaaaaccaatgggacaaataaagttggggagatgggaatctttgacaaacaaattatttttgttttaaaattaaaatactgtgtaccctctcc

SEQ ID NO: 103974 - DNA, 1027 bp, Homo sapiens
gcctgaggcatgagaatctcttgaacctgagaggtggaggttgcagtgagccatgatcatgccactgcactccagcctgggcaacagatcaagactcagtcttaaagacaaaaaaaaaatactgagtcttacacacttttgcatctttgtgtctctatgggtcttcacacagagcttggcacattgtagctgctcagtcagcactgtttgtgctgaattgaaacaatgagatatgtacaaaggggctgtctctcactactggggatttaaagccaccccgaggcatttgacaagctgttctggccaaggttgaagaggttgtcctgtcataaagcccccctaagacacgatgtcacacatagacaccactctctgtgcgaaagggggggcctgtgcactgaactcccagacttagctgggcctcagtgctcttcttgggtttggtcatagagcccaagaggaggtggataagctgcctgacactgatatggtaaaaggattatctgcaaatttctagcgtcatcaagactggcctctttggtaagcaggcctaaaaggctgccctcaataaaccacccaagcaggtgaaaattatctttttaccccaagcctaccttttctacatccttttctacttgacatgccccttctactcctcttctctcctttaggactcattctctctcctttcctcctctaaacctcctcccagaaaaagacctgataacttcacttacaccgggttatagatgactaacaaagcttactattgaatatgttgctagtagaaatctgaataagatacagcaacttttcaactctgatcatggctttaagcactaggatgaaccacagccatgtaatcattcatttggttacttagctcttgctgtgtcccacgcataggggcagctactgggggtttgacagtggacggacctaaagtggtccctcagtcaggggacagtacagtaccctaagagcactgaggagggccaccccacgtgaactcaggtagtcaggggag

SEQ ID NO: 103975 - DNA, 1033 bp, Homo sapiens
cccagcatggctactgccaggtgggcccactctaggaaccctggccacctagtcctcaatgccaccacactgactgtccccacttgggtggggggtccagagtataggcagggctggcctgtccatccagagcccccgtctagtggggagacaaaccaggacctgccagaatgttggaggacccaacacctgcagggagagggggcagtgtgggtgcctctgagaggtgtgactgcgccctgctgtggggtcggagagggtactgtggagcttctcgggcgcaggactagttgacagagtccagctgtgtgccaggcagtgtgtgtcccccgtgtgtttggtggcaggggtcccagcatcctagagtccagtccccactctcaccctgcatcttctgcccagggaacgacactcatcaccaacctgtcatcggtgctgaaggatgaggccgtctgggagaagcccttccgcttccaccccgaacacttcctggatgcccagggccactttgtgaagccggaggccttcctgcctttctcagcaggtgcctgtggggagcccggctccctgtccccttccgtggagtcttgcaggggtatcacccaggagccaggctcactgacgcccctcccctccccacaggccgccgtgcatgcctcggggagcccctggcccgcatggagctcttcctcttcttcacctccctgctgcagcacttcagcttctcggtgcccactggacagccccggcccagccaccatggtgtctttgctttcctggtgaccccatccccctatgagctttgtgctgtgccccgctagaatggggtacctagtccccagcctgctccctagccagaggctctaatgtacaataaagcaatgtggtagttccaactcgggtcccctgctcacgccctcgttgggatcatcctcctcagggcaaccccacccctgcctcattcctgcttaccccaccgcctggccgcatttgagacaggggtacgttgaggctgagcagatgtcagttaccc

SEQ ID NO: 103976 - DNA, 4184 bp, Homo sapiens
gagctggtgtggggtcctgttcttctgagtaatgagcaagattggggtgcaggcccaagactgctgtgtattggtaaagagggcaaaccctgccctgtcccctccttgagcagagcctggcagggtacgtgtgggcattggccttgattcacacgggcatcctgcagccccaacaagatgacacccttctgtgttcttggaggtaggtgcccattagctcaactgctggcctgcattcccagggcttgcttttacttgtctgtggtgatgttgtgccatggcctctgtgtgtgttcctgcttattggtgttttctgccaagtagtcaggaacctccttgggcaagagcatgtgcatgtacgtgcttgggaacagctcaatcttagctcccgcaggccccagccgccttagcagttctgcgtgtgtgaactttatggaagcagaaagggctggtgacacttgggttcttggggtttgtcaggggagggcaccaaattggtcttgaggaagcagttaggtgagccccagtgacagtcttaagcacagtgattggcagatagcaagtgaaggaggggcaaggctgccaccacttctggcttctggtgaaattttactggactgattcctaggaaactgctgtttgtctttgagacctttccacatcagatggcccatgaagcgttccacagggacctttggtacaatccatctgtcctacgtgggccatcagaatccccttctgcacatgggctggaagaggagagaagccctccagcctggggatgggagacctaggggtctcaggttcctgagaggtcgaaaggattaacatagtccagctctgtctgagcctcagaaaacctgccctccctgttagaggccatgggaagagtgttctttttaagcatgaagaactgactgtgggccaggtgtagtggctcacgcctgtaatcccaacactttgggaggccgaggtgggcagatcagctggggccaggagttctagaccagcctaacatggcaaaaccacatctctcctaaaaatacaaaaattagccgggtgtggtggcgtgcacctgtgatcccagctatttgggaggctgaggcacaagaatcacttgaacccagggggcagaggctgcagtgagccaagagcacaccactacactccagtctgggcaatagagcaagactgtctcaaaaaaaaaaaaaaaaaaaaaaaaaaaagactgtcattagccaagcatggtggcgtgtacctgtagtcccagctacttggaaggctgaggtgggaggattgcttgagcccaggaggtcaaggctgcagggagccaaggcgacagagcgatgtcttgtctcaaaaacaaacaactagctgtgttgactagaggcagctgtgaaactgtcctaaaaggctggacttcgagaagtttcttccacagattgaccaggtactgtaggtttcagtcacaactggggtcctgacactggcaaaaccccaccagctgccccacaagtggggcctgccctgaggtcagggagttctctgctgtactggttcctttatgcactaggaaggcagacatgccctgaggagccctcagagtccaaccccagcacccccactaggtcattgctgcctttaatcacattccagatccagagccacacagtggccctggcattggtctcgggtgtgtcccatatcagcagcacatctgcagaggggcgtgagtgcaggctccctgctgaaagctcccaggggtaccacggaacagcggctgttggtggtggaccctgtggaggctcctggccttcactgtgtgtcccttgtcttccaggtgagactgtggagatgagaaggtggtggacactcgtgatggaatggaaatcgtcctaccgtgcagccacaccctgccctgccccgccccgccccgcccgcgtgcctgcccatgccagcacttccttaagttctcacatcacactcaaaccagtgacaccacaggaaagaaagacccaagacgttggaatggctgtttccatggacacaatctccatagtgacaatgtggggggaggggggaggggtgggatgatggggaaagggtggggggaattaaaagggagggataaatatatatatataaatctatttttagtctggaaagactttgtttaaatgaaaggtgcgctatcccttttgattctgttttaaaattatctcgttaaagatctccaaatttgttccgatgacaagtgaaatttaaatgtgagattgaactgaacaaaccctcatctcatgaaggacggggtgtgtgtgtggcgttgatctttagcctgtctcacaccagttcagaaaacactagacccaggattgaaaaagcaaaccacagcagaaccatccttttgtcattaatttgtctcaaagtgggaaggttttgggggagggggaaatacagggatggtccatgttttcaagagtaggggaatgatgtttaaacacaaaaataaattttttttcatttccagaaacactatttatttatggttttttttttttaattttttctttttgggggtgaaattggcagatgcctgaggtcatagctgtgtcctgggtcactgtggctggtgaggacctcaaggaccccatcaagtgtacacagcagcagcaaaatcaagggatgaccctcctctggggccccctgtcctcagcacattccaggcagctgtgccctgacccacagggacccgtggggatgggaggaggtccaggcctgtgttgccagagctggcagtgtgagctgtaggcagggacggggagggactgtcgctgtgatcagagtgggttaagctgaccaggaacacccatttaacccctttttctttttgctttcatttttataaaggaaaagaggacctgtcagataggcagccccatgctacgtgattctttatgttgtgttgttttgttttgtaaattgtataatttttaaatatctgagttttaaaaaaagaaaaaagtacaaaaaaatcttgttatggccttaagaaggggttagtgcatctttcaggggtcactctgccatggggataaaatagctgtttcacaaacagttttatttaaaaaaacaaaaaacaaaaaaaatcaaaaaatcaaaaaaataataaacttcattttaaccttgtttcctcttctgtttactttaaagtgaatgcgtctcttccttctcccattctaacccccaaagggtagctctggttctccagaggaggccatgatcagaacctgtctgtcccattcctggcctctcgatggccacgcagccgggaagcaaacaaaatatagggttcttctgccactcctctgggcaggtggagtgtggccagtgtatggggacagtcagatttactcaagttgatatgaagacatatttccaatcaacattaagggttataaaaaaataatggaatgttaatggacttttttagagaatggaaatactggaaggaatattgtgaagcagaaataagcaattataaatgagttctgtgttcatcaatttggggcagcagaaatggcagattaattgtattttaatggctacatcaagcagtccatttctcatttcactccgccaggatggaggtgtgggtgggtgcgccgtgccggccgtaggaccaagcttaggcaactgaacaggacctgcacagaaatgatggcttttttgagctagttgttgtctcattctggtcttgacttggcattaatacagttaaaatgaaatggatagacttcaggtgtcaagggctaaaccacaaaacttgaaaaatatgtatcttgaggaaaatattttcctgacagcaaatgtttgtcattttgtcttttattcttttgtccccttttgatttgcctgagtggagcacttgtgattgttctaggtctttccttaaattggcttcagtaatgaccttcactggggagtggcagtgatacacgcatgcctcctgactccagtttctggcttctgcagttctcctcaactgctcaagtgccttttagttcctttagtgtttgtcttaattgatttttttaaagtagttttatgttcacagaaggattaagctgacggtacagacagttcccatataaccccttccccccgtatgcatacctttccctcta

SEQ ID NO: 103977 - DNA, 1022 bp, Homo sapiens
tctcccgcctcagccctcccgagtagctgggactacaggtgtgcaccaccacgcccagctaatttttgtattttttgtagagatggggtttcaccatgttgcccaggctggccttgaactcctgacatcaagtgatcttcccgccttgacctctcaaagtgccgggattacaggcgtgagccacggcgcccggccaactcttgaacagaacaatgagcttcatccttctgggttgaagcacagtgatgaagtggcctcacccattgaagagagtcgtctcaggtccattgaggttgaaccattccattcagctcttggagggagaggatggactcactgcatccagtcctgtccatctgaaatgttttttatgtgctgttcccacaaggcatatagcttttcctggtttcccagttcagcagtgacattgagggtggtcaccgtccttcatttgtggtagaagccctggtgactggggatagaatcacacctctgactaaaggaggactcatcttgggccccatgctggggacagagagccaccattattgggtgccctgacaaggcagggaacagacagcgaatgtgcgtgtgtgtctgcctcctagtgcgccatgttctgacagagtgatatgataggtgctgtgtgactaagatcagactactccatgtctctgtacttcggtttcttctgtaaaaacaggaatagcagtgccaaccttttgagattccattgggaaatgtctctaagtgccagcacagcacactggctctcagcccgttgatctgccatgcctagctgtgggtttctcttgggagttggaggggtcaaggcagcagattggaccctgcagctgtctcttatagcaaaaaatacccaaggcttggggttaaaagatgccgcccctgcctcccagcctgtgaggtatctggtacctgaccctcgccaggagtgcggaggggaaaagtccttctgcaggcccgtggttgcccactgtctctttgtgccaagggggttgcct

SEQ ID NO: 103978 - DNA, 1050 bp, Homo sapiens
cagtggatgggctgtctcgggctccacttcccagtttatttaggaggtggtctcgtggtcgcttcctttaggaaagggtgggaggtaaggggtgaatggtctgtttgtggataccacatatgtgtgtggggagggtgtatatggagaaggagccccaagaaaggatcagaacggagaccactgccacctgatgtttcctgcaggggctgcactgtgtctctggctgaggtcacactgacacctggtggtcactggtcactcgcagtcttaaatctagtagggccgaaagtactagaaggaggttgtccagagaggtctgccctcaaaatgctcctgaaagatgcttgcttatgcttttctttaaaaattatttctggggaagggcggggagtggtcacaggatcttatattctctttatttttacttaatttgcatgttatttttagaactcccctttttaagggtcacattttgcctcagaaaaccctgtctgaatgtctcctgtttgtcggtcaggactgactctgccttttctttccttttccatgtgccactcctgtcctccctttgccctccctgatttctgcactgtcctctcccacctgtctgtctcctcttggttttgcccgtgtcagcctccccttccgtgccctctcccccccttgcagaacaagaccgcgaaaggcagcctcagcacagagcagtcggagcgggggtgaggggggcagtgtgctcgtgggaatggaaaggacagcaagcacaggtgagtcggggccaccgggctccctgcatcctgcccggctcccagcaggcgtcgttgcctctgccctcctgctcgctctatgctctgccaccagcatttcatcctgtggatgacaacgccaggtggatgcagtgttcttccattggttacttagctccccagattatctgtggaaaggagtgggggcttctaaactgtccactgccaatggggtgcagggtgactgttcctgaaggcagcccttcagggcacagctggccaggggtggccttgtgagtggacacaa

SEQ ID NO: 103979 - DNA, 1003 bp, Homo sapiens
gccatcacacccagcctttcagtatttttttttttttttttaatagtgacaggatctcactgtgttgcccaagctggtcttgactcttggattcaagtgatctttctgcctcggcctcccaaagtgctgggattacaggtgtgagccatggtacccagccccaagtctttttttaatgcgtagaaacattttaataaaattagcacatttatacatttgtacatcctggttttttcaagcagttttgtttcatgggtgttttccataccattaactcttttcaaatgttaatttttaagtgaccgatatccatcatgttaaggtatcatagcttacttgggttgtctctaatgttttcctattagaagtaagtgtagcgacctgctacctttatgtctgaccctgtcaatcccagccagcatgaccacacctatgtccagctgtgaagtctccatctgactgtccccttctgtcttccagattgtttgctacatgaggagaacttctcggtgaggtgccctaagcacaaggtgagtcagaggccccaagagctaccagcagggatgggatcgagggtggctcctcctgaaagacctgaagaccaggtgttggtgggcctcacccacacctgtccccacctgtgcctccggctgttagtcccctcctggccctgggagggtggaggggcatgatgctgaagggagacccgtggcatgggggccagcactcggagtattatgaggatcccaggagaaatgtgttttgggagagggggtgtttgtctgttcattaagagaggtgagaatatctaactcgatcaagccactgatttccacttgaggtgaatagaaccccaattcacaggttggcgtttggtaagtctggttctaggccttgaggcctgtgcaaaggcatcttcccagactagaagtcgagctgaccacaaggctctggggaagctcagtctcttccaggttgtgcttctgcagaagcagcctgatgc

SEQ ID NO: 103980 - DNA, 1246 bp, Homo sapiens
atcccctgagctccagttgtctggctcctgctgtttataaactctctggcagattggagcagcgggagtcttggtcacactatgtacttgtgggttttaaattaacacatttcatttattgccttgctagttgcttgctgggggaggggcttggaggttagtagtaagttgctgagctcttgggcccacggagccaagaaggctgccgcccactctcttagatactcatgggctccaacgaaagacaggctatgatgttccaggtctggccaaatataaaagggtctttttgatttgttttaggataccgggacctgaaaagttttcatgtgtatgttcattgcttattactattgcacttgaaatctgtgggtgcacaggctgctagtctggatctcagtttaaatttaacaaggataagtaccgtggctgcctcctgccatggtgcctgggagctctctgagaatgtgttatcaatatttattaacattctgccaccgcgttttgcaccagtgacctggctgtcggtctccaggagctgtggtgtgcagagtgaactcattaattagatttccttgccctgatccatgcactacccttgtgtgagagctcagctcacctggaggcagatgtgtccttgctgccatccaggatgctgtcatcatgttacaagttggaatgaatcatttttcctccaaggattaaaagcatcctcatgggattttaccttcctctgaagcatttagtgtggattatgtgatttgtgttggaggcttctgtgtctccgtgggtcgtggggcaaaggtgacagtggggctcttgggcctggccacctttctgtctcagacacctgggcattctctgtacagagaagaaaatacgcgtctagattttaaagtgtttttacaaggaggctttggcttgagcctgagaaatggggttagcctagaatcaaggatttttaaaatagcatttattggtgatatcgtgggaatatagaaaagataaaatttaaatcagctgtatcttcttacccaaagagaattattgttacatattcatagatttcctttcagtctttttttttttttttttttttttttttttgagacggagtctcgctctgtcaccaggctggagtgcagtggtgtgatctcggctcactgcaacctccgactctctggttcaagtgattctcctgcctcagcctcccaagtagttttttttttttttaagacagttttgc

SEQ ID NO: 103981 - DNA, 1849 bp, Homo sapiens
agtggaagcttgtgcccaggttgtcaccccagcccaccagcagagaagcgcaggaccctcattattagctgaggacttgtgagtaaatggtgtctgtcattttctgttttggggcccatcttggtagcctgcctagttaagctggtagcatctctatttaacagaagttggtggccgcgtgtccagcaagacagaggggtctgggttgggaggagtgagggtagggctgtcggcctctggctttgctgcctctgctgctgtgcactttgctccttcatgtggagacctgggacccagaggcagtttcacaagatgaccatgtcttggtcattgcggtctttttgatgacccaagtcacagtgacccagaggcctgcactgctctgtggggatggacgcttgtattattccacacagtcttcttggaaattgctctctgtgtatgatgtaactttgtatccaggaaacaagtttattgatggacttttctttctaatcataacaaaaataagtccttggtttgagaatccctaacctcccttatggagtaaagagcagtttaacattttcatctctgccttgctgtcaacccacccagatctttaaagagctgttgatgtctcagggaagacttttattactgggacatctccatagaaacagaatctttgtttcatgatctgtgactcctgccaccttcccccccacctgatgttgaccctgcatttctgacatcatggtcagctgttttgtgttgcttgttatgtcataggcacaggatttggctccaggtggggggggttacagtaataagagcatgagctctgtttttttttttttttaattaatgtatttaatgcaatgagccacaacaattaagacgagaaaaaaaggctgtggtagctcattaataattccactgtgcgtaaagaaccttgtgtggagggttttttttttttcttctactctcatgaaaaaacagctgggaattctactttctgcagctctcgttgcagtagcattttaaagctgctatctctgctgcagactttgatcttgctggtgccatcagagccctggatgggtcattaggaaatgccagtagtctgactcctccccgggggacagccgtctgcctcacaggagccagtcccagtgccaagagccccatatttccctccttatggcccaggagcctgagcctacccttcggcaaggcagggtggggctggcaggcccctgtgtcccaagccctgcagtgtgccaacataaggaataacagtagtactggggtagagtgtaggtgaattggagtctgtgtctgctacacaacagatccaaaggacattaaacccttcttgtttttcctacctccctccttgagcccaccatcctcagcctgggagcatgtggatgcatgtgggtatctgaagcttcacagagcttataatgaggagcttagtaaatccattctgcctttgagcttgaagagggaaatgaaagtggccttctcttctgggggttgatgtttgtgtctgcaagccatcttgttgactaggccaccttgtaggtctttttgagcttggatgatgatctcgcaagctgtttactttgacttcactatgcagaagtgctgactgcgccctctggacagtgtaggatggtgcctgggccttgaagaacacagattgagagaccttgactggctggccatgtaggtgcagttgcctgttcagagtcctcagaagaggttttactacacctactgctcttcactcttccctcccagcagggactggtaagaggagaagctcccctgtgccctccaggtttctgagctctctagctgt

SEQ ID NO: 103982 - DNA, 1038 bp, Homo sapiens
ttttttttttttgtcacttcataaaaaaacttcccacccattagcagcactcatctcccttcccttccctccagtccctggcaaccactattctgttttcttttttaaatttttatgatttttttttccctttaagctctgttggactcaatcctttctatctctgtgggctttgctgtacatttgggttacttccactttttgactgttatgaataatgctgctatagaacattcacatgcaagcatttgtgtgaacatgttttcagttctcttggatgtgtacctgggagtagaattgctggatcatatggtaactctgtttaaccttttaaggaactgtcagactgttttccaaaatggctgccccattttacgttctcagtggcagtgcatgagtgttctcctttccccaggtcctccctgacacttgctgtcatatgtgtttctttttttttttttttttaattgtagccagcccagtgggtatgaaatgttatttcattgtggtttttatttgtatttccctgatggctaatgtcgagcatttttttcttgtgcctattggccatttgtacatcttctttggagaaatagctattcacatcctttgcccattgtaaaattgggttgtttatctttttaatgtcaagttttaagaattatttgtaggccgggcgggtggatcatggggtcaggagttcaagaccagcctggctaaaatagtgaaaccccgtctctactaaaactacaaaaattagccagatgtgacgcgcacctatagtcccagctactcgggagtctgaggcaggagaatcacttgaacccgggaggcagaggttgcgagatcacgccactgcactccagcctgggcaacagagtgagactctgtctcaaaaaaaaaaaaaaaaaaaaaaagaattatttgtaattctggatatgtggtttgcaaatgttttcttccattctctgagttgtctttttactttcttttcttgatagcatcacacaggtaattcaccattggacaccaactggg

SEQ ID NO: 103983 - DNA, 1028 bp, Homo sapiens
agatcattcagtctgagcgtggcgagcgcttgggctttgctgttgctggcgttagtgtagttttccatcagtatctgtgtcgggggcctgagccagctcagtgtaattgcttagggaacacttttatttttcatagaagcaggaacaagtttctgtctcttccagctagtcttgctggttgtgtgcctctgctatctgaagagccagcatccttagtagggtcacatgtggttgagttttatgaatgtgtttgttgctgataggacacatttcttacctgacaggatgagcactcacagcagccacatcacagggctgacagagatgtgccccactttaagaaaacctgaccatataaggaggagtgtctcaattacaaaataatgtctcacttagccagaaattcatggcaggttttctggtgcatttaaaataagattcatgtataaaaataccatttgcacacaggagcccatattttctgaaaagggaaatgtattgggcatttggggtaagtagatcaaaaataaaaataaaatcttcttacaaatacaagaactagaaaccaaattccacttctaattctaaaaggtttatatataactctactaccttaccctctcttaccccagattttcacagcagaagtaaacagggaagatctgcaggccgctcacgatagcagcaaggaaatgcctggcatagtgtgtgggtgggtggatggcgggggtaccagaggcagggctggggaccccactctggcatgtcctttatgacatggattgctcatctcaccctgctgtattgttgatttgagaacatttgtgaggcttggtctaaaacattattgctggatcccttcccatggtgtggtcagtgaatggcatttagaaattgaccagctcatcctgccaccacggactcctctaaccacagagacacgtgctgaggtctaacagatggggaccagggaaggcctggaggagagggccaaatctgggatactgacatgcctgacttttcccttc

SEQ ID NO: 103984 - DNA, 1389 bp, Homo sapiens
accccgtctctagtaaaaaaacaaaaagttgccaggtgtggtggttcatgcctgtaatcctagctacttgggaagctgaggcacgagaatcacttgaacatgggagtcggaggttgcagtgagccaagactgtgccactgcactctagcctgggtgacagaacgagactctgtctcaaaaataacccaaaaaacaaaactgcatttctgacaagtccctgagtgttgctgatgctgctgttccaggggaccacacttcaaaaaccactgaactaaactgtctttaaggatctttctctaagtccctaatacagcctgagagtctttcccctttggatgcaatgttataaattaatcatagtggagtttgcacactgcttgccaggttgtggagttgaggtaggaagcaaatggacattgttcagatctaagctccacgtcttctctttcctcttgtaaaccgggatggtgatgaggcctgctgtgtggttgcttttcatgagatggtctttgtagattatctagcatatgtctgacacatggtcatcttgggtcacatttacttagcacttttgacccagccactgttttaagcctgaattaattcatttaacccttatgacatttctatgaggtgagtgctattattagtcccacgtctgtaggttgaggaacagaggttaggagtttggccaagaaggcagagctagaaagtggagccacttaccaggcagttatttaggttccagagcatgcatacttaacccttctacagcagcacccaagtttcctgtaacaaggctagaggtggcctggtcctgggtttgggtgatttagtgcttgacagtgtcatggtaggcccaggtctctccatcttgccactcttctgtcctcagcaggctggctttgtcttcagggctgtcccctcatggtgatactgtggctgccacagatcccactgtctaatcctcacagaggctgcgcaagaaaaattacctgttcctccctcttgtctctttttgagagggtgaaactttcatgcttgtaatcttagcacttttggaggctgagatgggagaattgcttgagcccaggagttcaaggacagcctgggcaacatagtgagaccctgtctctacaaaaacattttttgaaaaagctggatgtggtagcacacaccctgtagtctcagctactcgggaggctgaggtcaggagaatcacctgagcctgggaggtagagactgcagtgagccatgattgtgccactgcactccatcctgggtgacagagcaagacatcgtctcaaaatatattaaaaaaaaaaaaaaaaaggttggggggagtgcaaaatgttttcagaagccctttttcctgcagactttcctacc

SEQ ID NO: 103985 - DNA, 1027 bp, Homo sapiens
ctggccaacatggtgaaacctcatctctactaaaaatacaaagattagctgggcgtggtggcaggtgcctgtaatcccatctactcgggaggctgaggcaggggaatcgcttgaacccgggaggtggaggttgcggtgagccgagatcatgccattgcactccagagcgacaagagcgaaactccatcaaaaaaaaaaaaaaagaacctaaaaggaaaatgaacaatcacttgagagtcttgggaaatccccgtgtattagttttctatcattgtcataacaccttaccacaaacttgttaatacagttctgcttacagttctgtaggttcaaagtccaacacaggtgtcttactgggctggaattgaggtgtgggctgggctttggaaaagtccagagtcttaggggagaacatgcttccttgccttttaaaaattctgcagctgccgccctgtcccttctcccatcttccaggccagcagcattgcacctatgaccctgctggcaaatcatcaggtctccctgaagctgacaactgtaactccctctgggggggaatcgtttgcttttatgggcctgtgtgattagattgggcccacctggataacctagcatattcttcccatctcaaggtccttgacttaatctcatccacaaagttgattttgtatatataagatcacaggttcttgggattctgcctaccatatcccaagatctgattgctctgtaggagacagaacactgaatggctctcaggaaaccagtaatccagtaatcctagctcacccagtcattgtgtctctctgggtttcttttttccgcatctgaaaagttggggagttgaattagaccagtggtcctcaaactgcattgtacatcagaatagcctggaggacttctcacaacacagatttaggtggggctcaaaagcgtgcatttctgccaagcacagtggctcacgcctgtaatcccagcactttgggaagccaaggcaggtggatcacttgaggtcagaagttcaaga

SEQ ID NO: 103986 - DNA, 1065 bp, Homo sapiens
ttattacaggtttataatttgacttgaaaggttttcccaaagaaacaaatacttgtcaggatctgtagcagagccatgttttgattggggcttttatgggaggagaatggtgatctaaatatataattttatttcaaattatgcttgaaagatgatcagattaaagaaagtttgtgtgagtgttttcatgggcttgtattggagggaagcagatgactgggtcccaggaggcagagaagatgaactattgggccctaagtgtgttgtaaggaatagtaccatctgttggacctaagatccacatggcagcagagggtccagaatcagccacagcagattattctagattaatgtgagtagggacaggtttggagaagtatggctaggagcacctggcaggtgactctgatgcaggcagcaaaggagtcattggtttccaggtctgctctccacataacagagggcactgtctgtagagtacaacaggcaagcctgtgaggcggtttttctcattctagttgtgctcaatatgccattttggggcagttttcaatgctttcgaaatcctgctagaatttaatttgtatgcagttgtgtgtcattattagtccccatttatttaacatcttttcttgtaatgcaaaatgctttagaaagctttaaaaatagttttagtttgtattggtcccagataggagaattgagaggggagatacaatgaaagtaatagtaaatagtagctaagaagtgaagtgtccagagacttggccaagaactgaccttccacaccgtcggagatgaaacattactgaaacatacagcagctagacttaccaaaaaaacgaccagcagcaggtgtccagacccatgcagggtctgcttgtttaaggcagattgtaggagagaaattacttaacaaaaaattaactttaaactgtttgtcttaatttaatagactgtactttgtattatatctgattttgatatcagtaattgccaaagtatgacagagatgaatgtatgttttatgtaatttttatttaaaagttctaataattacataac

SEQ ID NO: 103987 - DNA, 2909 bp, Homo sapiens
cctcaaactctttggcttgatgaatgagtgacagagcgagaccctatctcaaaaaaaaaaaaaagtgtaggtggaggaggaggagatgtattgaggaattatgcaggatttctaaacttggttatattacttccagatctctattttcttcatggagactcttggagtttccttttctttttttcctttttccttttctgttgaaatgaggattgtactcttgctgagtatcttcctaatctggtaggaatcttctgaaacagaaatgtagaagaaaatttccatatctatgaagatgaattgaaccaatagttctaaaactttcttgaggataagaacctgggatgcttcccattcagtctcttctgggacagtgtcctcagtctgtgttttttaactcaagcttaggaccatgctggtgcaggtggcagagttaccctttgagaaatgcaaaaatcaattctgaaaactgaaggttcataagctagtcacagatttgggtgccaaagtttccattctagtgtggacgtagtttttccttccagtaggtttccaggaagaaaaggccccggtttgagcatgacctgtgggagtgacctgaaatgagatgtgagactatgtctcatgttgttgccaaattaaatgaccccactgaagcttggctgagaggtggcaggggctggcttaggatttgaggaccagtgatcctgtggtagtttcattggcattagcttcagtatatcaagatatcctcgtttttgaaagttcctttctgctgggactctgctatttcctgagcctccagtgtctgtcctgtcaggctgcccctgcctttgaaaaacttgccacttccaggaatagggtggctttgcctgacaatacctcaacctgtttgagaagatggacaggcgagagcgttggtgagatggcagtggctccgggtgcgaaagaggaaggtaatatgaatgcaagtaggaagaaaggagtaaaaatgagaaagacctccagagccaagtgtttggaacagctttggagatttccgcttcagtatgatcttcacagatttgaaatcttgttaagggagtcctattgtggcagcaggtttgtcgtttctgcactgaaactgtaaacatttcagtatgggtgccttgtgaataagcagcttccagtaattggctttctggaagcacagacccaactcctgggtaggatgagccatggagagaagcagcttacaccaagagtcacttccctggagtgtaatttctttaaaaagatgcctttttagattcagaaagcacaaaatgtaatcatttctctttataagctaatccactgtttgagcaaagggtaaaataaaaataagctagtgcaagaccttgtgcaacttcaatttcagtgtttcaaactatgtaagtatttctctccctgtacttgagaaaaagctcttctctttcttcatcacagggctgccgcaggtctcctactcctgctgggttcagccttttctcaggttctctgcttttattcagaggaaaagtgctaatcaatggcttatacctagtcctggactctagcactctgtgcccttcctttctaatttcttaaagggcacaagctccttttaacataggaaaaactccgttagacaaaatatataaggttttcagcacagtggcaattttcttttggggctataaaagaaaccctctgattaggattattttaatggagtatatataactgtagataagataaaatgcaggctgggtgcagtggctcatgcctgtaatccccgcactttgggaggccgaggagggtggatcaccttaggtcaggagttcgagaccagcctggccaatatggtgaaaccccgtctctactaaaaatacaaaagttagctggacgtgatggtgggtgcctgtaatccagctactttagaggctaaggcaggagcatcacttgaacccgggaggtagaggtttcagtgagccaagatctcgtcactgtactccagcctgggcaacagagtgagactccatctaaaaaataataataaaatgcaaactgtgtttcagaaaaaaaggcaagtttggttagcacaaagaaacatcattagtgacacctgtgttggccttctgagttatgagacttcatattaacattataacaaactacgtatacattttgtgcaagagaaaaattactaaaccaggccttcttgagtaatgctttaattttccagaagggggacatagattggatttaacttaaattgaggcaaatggatgtattttatttgggaaattgttttttgttcctcctttgttttgcctccataaatttattaatgcagaacctgaaggctgtaaacccaggataattagagttacagtgttacagaacattaaaaacccacagcaagtggctgatatctgcctaccatatctgcagttgaagttcataccatgtgtgataattacgaactttcttttttgtgggcaccttggtagaaattattagtatcacctgccatattttcacatgttacttaaacatcaataaagtgtacatagtaaagcagatagctgagggtggggaataagtggttaaatactgtgtctgacctgtaaaatacgctctaaatagacaaaaggaacccctttgtgtggcagcatagctgggtttggtttagtagcaatagtagattgttagctttaactcctcctggatgtctgtgctgctgcccatagccttgcagacaagcacagacggcctttgtagtttcaagggaccatccattccacatgggactagagagtaacaaaatgactagggatcagtgctggtacttcctgggaagtatgtgcagggtgtgtgtgtgtgtgtgtgtcagtcaaggtcttgcc

SEQ ID NO: 103988 - DNA, 1059 bp, Homo sapiens
tagaattgtgtcctcatgtgttggtttagtaaagataaccctcctgtctctaaacttattggtggaaattaaactgaagagaaaattcagccctatctgatgctgtccacgtaaacctggtaatagtggagtgattttggttgtatgcacttaagagctgacacttaatttgaagatgttggcagcatactgctgtcagttaacgtgccttatgaaaatagaattgaagaactgctacacaggcagatagacaataccagggtcaacagaataacaaatttccagccgaactcaaatctgaagtggtgctagtcccttctgatggactagcaccaccagtgggacctgggtgccctgacattgttcagcggtggaggcatttcatctctgttatgtgtttctcacggagcagctagtggaagtttctagtaaaatgtatattcatctaacaagtctcaggcctattcattgtggctggctccctaggggtgccatgtggttccagactttgaaagctgtgattgtgaaccttaaatcttagttcagacacatgtcaggtgaaggcctctggtttgcttgaaagttatttttgttttttcatacaaagctggttgctaggataatagtgtaattcattaggataagtgataggacagttcccaaattattctgtttgcttgtttctaggtagggttctttattgaagtaataaaaatatactaatgctttgaaagggcaacccctcaaaaatgaaatgtatttgtttgctgatataagactttgtgtctccctcctcttcagagagcaggcctgggcattttaatccactattatttgtgaaaagcacatcgatttaaaaccagctcacctgtcacctcattccccaggcagcaagtgctgcccagctgcactcccattttacctgttacaccacttagcacccatgggtcaaatcccccaagtcactccaatagtggcaggtctgagtgcctcctcactgagggtaggacagacctctgagaccttactgactcagccttccctttgcaggttacacag

SEQ ID NO: 103989 - DNA, 1055 bp, Homo sapiens
tcacagttctggaagctgtataggaagcatgatgcctgcatctgctcagcttctggggaggcctcaggaaacttacagtcatggagggaggtagagggggagcaggaaggcttcttgcatggcaggagcaagacagagtgaggtgcgaggtgttgcacactttcaaacaaccaggtcttgtgagaactcagtatcacaggaatagcacccacatgatccagccacctcccaccaggccctgcctccagcattgggtgctacagttcaacctgagatttggtgaagtcacagatccaaaccatatcagggatctattgtatttgaaggatttagcctttaatttacgggcagtgcaaaaccattagtgatttctaagcgtgtaagtcacatgtacaggtttgtgttttataaaggaaactcaggaaataagtagggagacatcagaagcagacaggtcattcgagaggctgtgggattaatttgtgcaagagctggtaaggaccgagtatgtggtagaaacgggagtcagaaggattggatggatctgagaaacgttttagggattcaaagttgatagacttttttttttttttttttttgagacgaagtcctgctctgtcacccatgctggagtgcagtggcacgttctcggctcactgcaacctccaccccccagtttcaaacatcctcccaggcctcagcctcccaagtagctgggattacaagcatgtgccaccatgccgactaatttttgtattttttagtagagatggggtttgaccatgttggccaggctggcctcgaactcctgacctcaggcgatccacctgcctcccaaagtgctgggattataggcgtgagtcaccacacccggctaaagttgatagattttaaacactgactagatgcagcaggtttgggaaagtgaggaggcagaggtcaaggatgaagttgaggtttctagctccagcaagtcagtgggcgaggtgaggggtcatcaacataccaataacagaaagaagggttgaagaaaagaaatttaggtttgcgtttaa

SEQ ID NO: 103990 - DNA, 1327 bp, Homo sapiens
agtcttaatgacctagtctcaaaataaataagtagagaaaaatattcaaaaaaatcccaaaggaccataaacaaaaatattgataaacaagccacaacacacaagttattatatgttaattactcatccctgggatgttaaactagttattgctaatctgttaaaagagctaacagcaaatagtatgtaaaagcaggcatccctttcaattcaacaaatatcttgagtctctactggaaaaccagttgaaatgtgaagttaaactcctgtcagggaacttgcagggtgactcagcctcagcctcggccccttagctggtgtgtggttagagaagctctatgtcaaggcttctgaacttcatgcaggaaagtttgtgtgattctgcagaaagcaatgccttgccgcacacaggtcctgcactagggcttcgatttttccaaaagatacggcttgcttcatccaatactgtttcaggaaaatggaggttcctcctccgcaccccaagccaaggccaatttcgcgggaccctcaaggcttgctactgcagatcagattcgtccaatttattggaaaaacgtatgagaagagaaaatcaaggcagctaaacacttgccccggaaggtcctggcttttgccgttctcctcaacagctgtgtagaggggaggcctgggtgagagccccagagtcacactgcttcatatgaattccaggacttgttgtttccttgcgaggtcactagctcaagtcacttaacctctgtgcttcactgtccttaccatacaaagtatgaaaactgacagcacctacagtaaagaggtatgttaggaggattaaatgtgttgctctttggaaagtgcttagagcagtgtttggcacatttcaacagttaggtggtttcagaggaaatgcaagctgcagactggtgaccgccctcagatggtgtcctccctcattgttgtcttagtaaagatgtgttcctgttagcaagctcactcagtactctatagcttatgttgtagttccatcatagtgcagctagctcatcttgccaggggtgttcagaacttaatctctttgaaagttgtccttggtggaaataaaaacattatctcctttttactcttgttggaaactcaagtttgctgcggggggaagggtggcagggtgtgaggtatttcaggtgcagtattaatattatgtcttatgaaatagcatcagccaacacgaacacactcaggaattatatctctcaaaagacagaaggcaaaagggagggactaaaatctaccttgcatgttaagtaaaagcattaacattctagtgaga

SEQ ID NO: 103991 - DNA, 1049 bp, Homo sapiens
tctcctgtctcagcctccccagtagctggaattacaggtgcgtgccaccacacccagctaatttttgtatttttagtagagacgggatttgaggatgttggccaagctggccttgaactcctgaccttaaggaatccaccctcctcggcctcccaaagtactgggattataggtgtgagccactgcacctggccagtttaggggcttatttttaatacaagtttaaataatggataattatttacttcccccatctaacagactcacatctttcttaaatttactttaaattgtgatggaaaacatgatttggaaaatataaaatagattgattacattatgaaaatgaaatcacatattaaaacatcaaaacagccaagtcagaaaggtaggctctctagtttaactgtaaaatagagccaccagtctacatgctctctaaattctcaactatatgttccttgaaggtggtcatttccagggcctggcaaggcccccatcctggtgaaggctcccttcaactcctgttctctgctcctaactccagtacctcacccccacccctacctgattgttcttcctctgtgcttgctacaactgccctttctcacattcccacactccctttctccattctcctctccctcccagccccctctctctggcaagcacttgctttttgttacttctgctgggacccatcttcatttctcactctctaggcggtggcgccctgttcccatggctttcagtatatagcagagacttgtatctaatttacctgtttttcttaacactgtgtggtatatctttttatatcactgcatgatgacattgacactaaatttccagagaaaaggttcattttctttcaggatttcgtccaaattctaaggaatcaagtgaaattttcagttttgaattttattgcatatattaccttacagaataaatcatgacaaattgaaggactcaaattttactacgatttatttcttgactttttttttctctctagaggtagggggatgatgtggggagcattacac

SEQ ID NO: 103992 - DNA, 1245 bp, Homo sapiens
gattcaatctctaaaaaaaataagaaaaaagttaggcttgttgtctctttgagctgatgtaccactatcactataagatccgtttctagcttttatttacctagcttttattctacttttctcagtgcactcaaggacaaattaaaattacactaacttgccttttatttaatttgacagatgatgtttcaattgtccaggatactttgagtctagttttatcttactaggttttagcagatagatgcattcagttttggtcttgcttaatgagcatgcccttaatcctatcatgtaagataaagtcacatatatttcattagagatccattttggcctatgtatttatcaggtgttttgacaagcacgatgttatattaaaatattgggaagtcctcaagagacattgctcctctccctgtgtcacactactctgaaaattgccgaaaactagaacatttctatatttaaaaatggtgtttacttcccttcctttttcccttcctttttcccttcccacaagtgtgggacttgtgaatctattcatttcagcacaagtcccctttgcttctgtccaacattgaccactgtttgccttggtataattgtgtatgagaatcacaatgacctctgacatgaatgatattacagaggtaattgcctctgaatgggtatggatataacttggtatgtacaaatcacctttgagacattaaggaatgccaaggcgtgcagggatgtgacagaaggtagatctggtggccatggatcccttgaggctggatagccctactagtgggggagtcggggagtctttgcttgttcccctctcatagaaggtgcccctcccaaatttttccaaccccccttgggaaacttttaatcttttttttttacctgacagtatatgttaactggttttaggttaatttttattttctatttttatttttattttgagatgagtcttgctctgttgccaggctggagtgcagtggcacaatcttggctcactgcaaccacctcctcgtgggttcaagtgactctcctgcctcagcctcccaagtaactgggactgcagtcatgcaccaccacacctggctaatttttgtatttttaatagagacagggtttcaccatgttggccaggctgatctcaaactcctgatctcaagtgatccacctgcctcagccacccaaagtgctgggattacaggcctgagccactgtgcctggccaattttc

SEQ ID NO: 103993 - DNA, 2699 bp, Homo sapiens
aagatggtatgatgtatggcccaccagtggggacttaccatgaccccagtgcccaggaggctgggcgctgcctaatgtctagtgatggtctgcctaacaagggcatggaattaaagcatggctcccagaagttacaagaatcctgttgggatctttctcggcaaacttctccagccaaaagcagcggtcctccaggaatgtccagtcaaaaaaggtatgggccgccccatgagactgatggacatggactagctgaggctacacagtcatccaaacctggtagtgttatgctgagacttccaggccaggaggatcattcttctcaaaaccccttaatcatgaggaggcgtgttcgttcttttatctctcccattcccagtaagagacagtcacaagatgtaaagaacagtagcactgaagataaaggtcgcctccttcactcatcaaaagaaggcgctgataaagcattcaattcctatgcccatctttctcacagtcaggatatcaagtctatccctaagagagattcctccaaggaccttccaagtccagatagtagaaactgccctgctgttaccctcacaagccctgctaagaccaaaatactgcccccacggaaaggacggggattgaaattggaagctatagttcagaagattacatccccaaatattaggaggagcgcatcttcgaacagtgcggaggctgggggagacacggttacgcttgatgatatactgtctttgaagagtggtcctcctgaaggtgggagtgttgctgttcaggatgctgacatagagaagagaaaaggtgaggtggcttcggacctagtcagtccagcaaaccaggagttgcacgtagagaaacctcttccaaggtcttcagaagagtggcgtggcagcgtggatgacaaagtgaagacagagacacatgcagaaacagttactgccggaaaggaaccccctggtgccatgacatccacaacctcacagaagcctggtagtaaccaagggagaccagatggttccctgggtggaacagcacctttaatctttccagactcaaagaatgtacctccagtgggcatattggcccctgaggcaaaccccaaggctgaagagaaggagaacgatacagtgacgatttcaccgaagcaagagggtttccctccaaagggatatttcccatcaggaaagaagaaggggagacccattggtagtgtgaataagcaaaagaaacagcagcagccaccgcctccaccccctcagcccccacagataccagaaggttctgcagatggagagccaaagccaaaaaaacagaggcaaaggagggagagaaggaagcctggggcccagccgaggaagcgaaaaaccaaacaagcagttcccattgtggaaccccaagaacctgagatcaaactaaaatatgccacccagccactggataaaactgatgccaagaacaagtctttttacccttacatccatgtagtaaataagtgtgaacttggagccgtttgtacaatcatcaatgctgaggaagaagaacagaccaaattagtgaggggcaggaagggtcagaggtcactgacccctccacctagcagcactgaaagcaaggcgctcccggcctcgtcctttatgctgcagggacctgttgtgacagagtcttcggttatggggcacctggtttgctgtctgtgtggcaagtgggccagttaccggaacatgggtgacctctttggacctttttatccccaagattatgcagccactctcccgaagaatccacctcctaagagggccacagaaatgcagagcaaagttaaggtacggcacaaaagtgcttctaatggctccaagacggacactgaggaggaggaagagcagcagcagcagcagaaggagcagagaagcctggccgcacaccccaggtttaagcggcgccaccgctcggaagactgtggtggaggccctcggtccctgtccagggggctcccttgtaaaaaagcagccactgagggcagcagtgaaaagactgttttggactcgaagccctccgtgcccaccacttcagaaggtggccctgagctggagttacaaatccctgaactacctcttgacagcaatgaattttgggtccatgagggttgtattctctgggccaatggaatctacctggtttgtggcaggctctatggcctgcaggaagcgctggaaatagccagagagatggtgagtatgagaaatctcttaccagcttgggatttttatttcatttggttccttttcttgcatgtttttgttcttacatgtcacatgattattcctccaaattaaagtgcctatgcccatgtgatggacagaaaatgaaataggtaatttggaagatttgtatagacttctaaaatcgtttttcattttttgaaatgtataatgcttatgaagcatattattatatttcaagtttcttgggccacatcttttctaacgcacactttccagttaggatatttattctttggatctgtttcataacttatcctggggcagatcatcaacatcatcatcttcatttctttctctcctctattgaatgttctgtttcctgaatcccatttcttcctcattcttaaagtgagccttcatttaagggcgtgcatcatcctttagtagttttgtgagaaagggtgtgtg

SEQ ID NO: 103994 - DNA, 3339 bp, Homo sapiens
accagtcagcttcatctgggcctctgattcatctttattccctccatcatctagacttgattttatttgtaccaaggagatgcgtgtctaatgtttttctttcttctatttctaggagggctgttggcctgctgctgtgctgctgaacagtatgcagtcctttcgggagcaaagcagttaccacggaaaccagcaaagctacccacaggaggtacacggctcatcccggctagaagagttcagccctcgtcaggcccagatgttccagaattttggaggtacaggtggcagtagtggcagcagtggcagtggcagtggtggtggacgacgaggagcagcagctgctgcggcagcgatggctagcgagacctctggccatcaaggttaccagggtttcaggaaagaggctggagatttttactacatggcaggcaacaaagaccccgtgactacaggaaccccacagcctcctcagcgaaggccttctgggcctgtgcagagctatggacccccccaggggagcagctttggcaatcagtatgggagtgagggtcatgtgggccagtttcaagcacagcactctggccttggcggtgtgtcacattatcagcaggattacactgggcctttctctccagggagtgctcagtaccaacagcaggcttccagccagcagcagcagcagcaagtccagcagttgagacaacagctttaccagtcccatcagcccctgccacaggccactggccaaccagcatccagctcatcccatctacagccaatgcagcggccctcaactctgccatcctctgctgctggttaccagttaagagtgggtcagtttggccaacactatcagtcttctgcttcctcctcctcctcctcctccttcccttcaccacagcgttttagccagtctggacagagctatgatggcagttacaatgtgaatgctggatctcagtatgaaggacacaatgtgggttctaatgcacaggcttatggaacacaatccaattacagctatcagcctcaatctatgaagaattttgaacaggcaaagattccacaagggacccaacaggggcagcagcagcagcaaccgcagcaacaacaacacccttctcagcatgtgatgcagtatactaacgctgccaccaagctgcccctgcaaagccaagtggggcagtacaaccagcctgaggttcctgtgaggtcccccatgcagtttcaccagaacttcagccccatttctaacccttctccagctgcctctgtggttcagtctccaagctgtagttctaccccatctcctctcatgcagactggggagaatctccagtgtgggcaaggcagtgtgcctatgggttccagaaacagaattttacagttaatgcctcaactcagtccaaccccatcaatgatgcccagtcctaattctcatgctgcaggcttcaaagggtttggactagaaggggtaccagaaaagcgactgacagatcctgggttgagtagtttgagtgctctgagtactcaagtggccaatcttcctaacactgtccagcacatgttactttctgatgccctgactcctcagaagaagacctccaagaggccctcatcttccaagaaagcagatagctgcacaaattctgaaggctcctcacaacctgaagaacagctgaagtcccctatggcagagtcattagatggaggctgctccagcagttcagaggatcaaggcgagagagtgcggcaactaagtggccagagcaccagctctgacaccacctacaagggtggagcctctgagaaagctggctcctcaccggcacaaggtgctcagaatgaaccccccagactcaatgctagtcctgccgcaagagaagaggccacctcaccaggcgctaaggacatgccattgtcatccgacgggaacccaaaggttaatgagaagactgttggggtgattgtctcccgggaagccatgacaggtcgggtagaaaagcctggtggacaagataaaggctcccaagaggatgatcctgcagccactcaaaggccacctagcaatggtggggcaaaggaaaccagtcatgcatcacttccccagccagagcctccaggaggaggagggagcaaaggaaacaagaatggcgataacaactccaaccataatggagaaggaaatggccagagtggccactctgcagcgggccctggttttacgagcagaactgagcctagcaaatctcctggaagtctgcgctatagttacaaagatagtttcgggtcagccgtgccacgaaatgtcagtggctttcctcagtatcctacagggcaagaaaagggagatttcactggccatggggaacgaaagggtagaaatgaaaaattcccaagcctcctgcaggaagtgcttcagggttaccaccaccaccctgacaggagatattctaggagtactcaagagcatcaggggatggctggtagcctagaaggaaccacaaggcccaatgtcttggttagtcaaaccaatgaattagctagcaggggccttctgaacaaaagcattgggtctctattagaaaatccccactggggcccctgggaaaggaaatcaagcagcacagctcctgaaatgaaacagatcaatttgactgactatccaattcccagaaagtttgaaatagagcctcagtcatcagcacatgagcctgggggttccctctctgaaagaagatcagtgatctgtgatatttctccactaagacagattgtcagggacccaggggctcactcactgggacacatgagtgccgacaccagaattgggaggaatgaccgtctcaatccaactttaagtcagtcggtcattcttcctggtggtttggtgtccatggaaaccaagctgaaatcccagagcgggcagataaaagaggaagactttgaacagtctaaatctcaagctagtttcaacaacaagaaatctggagaccactgccatcctcctagcatcaagcatgagtcttaccgcggcaatgccagccctggagcagcaacccatgattccctttcagactatggcccgcaagacagcagacccacgccaatgcggcgggtccctggcagagttggtggtcgggagggcatgaggggtcggtccccttctcaatatcatgactttgcagaaaaattgaaaatgtctcctgggcggagcagaggcccagggggagaccctcatcacatgaatccacacatgaccttttcagagagggctaaccggagttctttacacactcccttttctcccaactcagaaaccctggcctctgctta

SEQ ID NO: 103995 - DNA, 1059 bp, Homo sapiens
catcattgtcaatgtcttgaggatttaaaggcaaagaaggagaataagcagaaaatcatgacagaggatgaaaaaattagctggggccaggcacaatggctgaattctagcactttgggaggttgaaacagcaggatggcttgagcccaggagtttgagaccagcctggacagcacagtgagactctgtctctatttttaagaaattataaaaattagccatagtcccaattattttttaaaaattagccaggggtcccatgcctgtggtcccagctacttgggaggctgaggcaggaggattgcctgagctgggagttgaggccgcagtgagcctgtggtcatgccactgcactccagcctgggcaacagagtgagactctctttccaaaaaagagaatggattgggaagtgggatgttgttggacatatggaggaagaaggacagagaaagccaatgttggttttctataagagggcaaggtcatcagccctctaataggatggggagaacaagtctgcagctggttatgagtgagtttgtgaggtcggcacatggactctggaatgtttaggcacagagttctggacctcactaatacacctccacagcccttctgaaactgttcagaaagttaggaatataggagaaaaacaggaaagggagagtcattatggatgggaagtacatcggtaggcctcttttttatttatttattgagacggaatctcgctttgttgcccaggctggagggcagtggcgcgatctctgctcactgcaacctctgcctccgaggctcaggcgatcctcctgcctcagccccccgaggtgctgggactacaggcacgcatcaccatgcctggctaatttttgtattttttataaagatagggtttcgccatgttgcccaggctggtctcgaactcctgagcccaagtgatctgcccgccttgacctcccaaagttcagggattacaggggtgagccactgtgcccagcctcttttttagagtgtgtatgcaagttccttaggtgacttattcctttgaggtatcagat

SEQ ID NO: 103996 - DNA, 2284 bp, Homo sapiens
aaaattacattaatttttccccctcattcattaattgagttacaggtaaaaccacacagtgactaacatatatagattgctaaataaatggcaattatttatttatttactgggacaggtcttactgtagcacccaggctggagtgtagtagcgtgcagcctcggctcactgcaacctctgcctcccaggctcaagtgatcctcctgcctcagcctctggagtggctgggactacaggcacaagccagcacacccagctaattcttttgtattttttgtggagacggggtcttgttatgttgcccatgctggtctcctgagctcaaacagtctgcctgcctcggcctcccaaagtgctgggattacaggtgtgagccactgtggccggccagcaatttttattatatcagtggtacataccttagatactggttaaaggtaaatactttaattggtttgtttttactaagcaaggtaaagccaacacattctctgcttagaggaagatttgtagagaaaatcacatggataacacattttaggagctcttaagatacagcaggacacattctaagagctcttaagaaccatatgatctcatgtggcaagaaggaatttatgggcctggggatgcttaaaaggctccaagttgagaccaaggtgagagtgggccgatggcacaaagggggctgagcaggcttgtttgagagggtggggagaagcagaaattgtgttgggaagatgtcacagggcttcagggcctatgggggggtgtgatggtgtcaaaatggcagttaagcaaaagaaagtactgggaaagagaacttttcaggtgttattctagcccaagaaagatgaaaatgacagtgacgagaatggaatgggaaaggacaaatacaggaaggagagtagtgtcatgatgaggtagcatggtaaatacagagtcaaagtgaaaggtcagtttggggttattctaaagcttcttgcttgggatgatcatggttttctttgagaataggcagttgggtcagttgaggaagaacaaccttatctttgtcattgaaaatgagttagttactgcctaataataaatgcatttgttgtcttttagaaatgattacagtcacaagtgacactgtccagagtccttaagtactgatctgtctagagggccagaggccttgctctgtctctgcatggtcattaaaacctttgccatatggggccgggcgcggtggctcatgcctgtaatcccagcactttgggaggctgaggcgggcggatcatgaggtcaggagatcgagaccatcctggctaacacggtgaaaccctgtctctactaaaaatacaaaaaatcagccaggcacggtggtgggcgcctgtagtcccagctacttgggaggctgaggcaggagaatgacgtgaacccgggaggcggagcttgcagtgagccgagatatcgccactgcactccagcctgggcaacagaacgagactccgtctcaaaaaaaaaaaaaaaaaccctttgccatatggttaataagccctatagaccccacatccttggcattcagagcccagcacctgcctgcaactctcttcatagtatctcatccaattttggactttgggcatttcttactttcttgcaacttggctatacattttgtctgacatttctaagtgttttgttgagggaggatttttagtccctgttctatgtcatagtgcatgaaatagaagtctctcattccccaagtggcaatagtctactctgaaatcctaggaatgagaagaactcttatcagtcagggtcccagtagaaaacagatggcacattcaaactgggtaatttaaggagtgtttaattgtatcattcagggttcattcaggaaaagagaagttgtctattccggtatgaatggttttgatacaggaattaaggctttacccaaccctggaagaactggaattgggaaggttcctgatgatttcatactgaagtgtcatagtgaatggttctcgtgagctcatggggaagccgctatgaatccacgtgtgctgcatctacctccagggaatatcatcaacctctacgtttattttgccttctaaatctctcttgcacttctcattgcaaactctaacccagaaccatgctgctaaagggttctggaacggaagttctcagcttctgatctgcagaggagagcttggaaggagggtggtcacgatgctgagttgacaacaatgcagaagattaataaagggactggaaagggtg

SEQ ID NO: 103997 - DNA, 1043 bp, Homo sapiens
gagcttttttgggttgttcagtgaagtctctaattttcatatagcttttgcccacttctgctttggattggtcattgatatcttttgaattttaattcagaattgtatttgtttgttttattattatttctttttaagagacagaatctcactctgtcacccacgctggatggagttcagtggcgtgatcttggctcactgcaacctccacctcctgtgttcaagcgattctcctgccacagcctcctgagtagctgggattataggtttccgccaccgtatgtggccagtttttgtatttttagtagagacagcatttcaccatgttggccaggctggtcttgaacttctgacctcaggtgtgatctgcctgcctcagccttccgaagtgctgggattacaggcttgagccaccaggcccggcctcaaaattatatttgaatgaattataaaatggaacatccttttagcctataagtggcaacactaattacctcccttttgcctctgaaggtttagaaattatgtattaatacaacctttgaatgaaaaaatatattcaatgacatctcagaagcccctacgctcagcatttaagaaaatcccacaggagcctctagctagccccagagatgtcctgctcccacccttctcctgccccctttttgggaactgtttggccatcctgctcacatatgtggtcatctgaagtgatcttgggatgcccctgtgaaaataagacagatagccatggagtgggggtggggccaggatagggcccaggtgcctttggtctgctcaggagcagatttatagcatctccttgcagagttacagaagcatgtggtggatataggatgcttgcagcctcttggctgtttgaaattatgcctaataataggcctgccgactgtgggttggaattcagctgactttaggcctgattctcaaaaaataattttgagctagtgaccctgtgtgcacacttgcctgggcactgtggtgtccaacaaccctgtgtgtggcattggcaccaggtttcc

SEQ ID NO: 103998 - DNA, 1038 bp, Homo sapiens
ccaggtgaatgtggtaaatatcagcagtagtgggatgggttgccatcagtcttcttcttatgcaatgtcctgggaagaatacagcaccatgtgtctggtattgccgctaaggaagcatgacctgagtctggtcacgaggaaatacagatcagattgagggttatcctgcaaaatgaaaagactgtactctggcagggacatggaagtcaggaagagaaaagggaactattccagattgattgacactggtgagatgtagctctggggtagactcctggactagaaaggaaagacattgttgggacagctgacaaaattcaaatggggtctatggattggattgagagtgtagtatcagtgttgatttcctgatgtggaggcttgtatgctggttatggaggagaatgtccttgtttttggaaataacgcactagagtattgagcaacaatggagcttcatgccttcagcctgctctcaaaggggtcaggaaaagataatggagcaaatgaggtaaagcatcagttggagaatctcgttgaaagagggtatgtgagccctttgaactatttttgcacttttctgtacatttgaagtaatttaaaattactatttttttttgagagaggctgttgctctgtctcccaggctggagtgcaatggaacgatcttagctcactgcagcctccagagttcaagtgattcttgtgcctcagccactcgagtagctaggattacgggcatgtgccaccatgcccagctaatttttgtatttttagtagagacggggtttcactgtaatggccaggctggtcttgaactcctggcctcgtgtgttctgcctgccttggcctctcaaagtgctgggattacaggcgtgagccaccacgcccagtcttaaaaattattttttaatatcctattgagattttgactggaacctattagaattttataaactaatatgtggagacttaacgtctttacaatactagccctttttatctagctataccatttgttctgctagtttgtttctt

SEQ ID NO: 103999 - DNA, 2190 bp, Homo sapiens
atttatacatggcaccctccttatcatagttatggcttgcaccctaaaataaggtctagagcgacagacatttacaaagttctttttttttttttttttgagacagagtctcattctgttggccagactggagtgcagtggcacgatctcggctcactgcaacttctgtctcctgggctcaagcaattctcctgcctcagcctcccgagtatgtgggactacaggcatgcgccactatgcctggctaattcttgtattttttttagtagaggtggggtttcaccatgttggccaggcttgtcttgaactcctgacctcgtgatccgcctgccctgccctccaaaagttctgggatttacaggcgtgagccactgcacccggcacaaagttcttatgctaccgaaatgatctttttgttcttctgaccctaattattaggttttctgaccctaaattaatttgctaattcttgatgctcttcttggatacttagatgtaactatttcaccttagtttggagttagcattttgatgtttttaatatatttgaaataatcctgcaaactattttttggtttgggcttttaagtgggacgctcaatcttcagaaggacttttagcttatggacacttaaaaaaagcaagaactagcacattgtttcttggtattttggaattgtggtgagtttgaggcaaccgtggaagtgtagagtgtgttgactcacctccgctcctcctaactcctgtgttcatttcacaggaattaatcgtccagacaatattcctcccatgcctgcatccccagccatatggagaggaccccataaactgtaaaaaggttcattggcttttatctggaggggactaaacccatagaactcggttctgctttttgcttcatttgacaggttgacctatggtgttggtacgtccagtaaaatcaagtctaaatgctttggttgactgcatttctcattgctttgctcaggaaggccaaggacacattaaaatctgtttgtcccctcctatattttctttctaaggttgttagccagcacttttgttttacagtgtgtttttgtttggactcgacttctgctcgtaaattaggatgtggtcagttaagagcattttgaattttaaacgtgtctgtttcactggttttgtgtctccatgtttatgtatagggaaagtaagttttcatgtttttacattttgtttgtactaaacttaagtgctttctttcaagggctagaggcattgaaagtaattttaaaaactctaaagaaacctttttattctcattgcttacatttttaataacaagttaggtagcttttattcttcagaagtgggatttattatgtaaagccactttttggaagaggtgaaaattaacctgcctttccttatgcctcagtgagaggtgaggttcagagcagagaatgcaggtagggattatggaaaccctttcttggtattaattttcctcacagattaaaacttttggtcttcatctgttacctttacatttgtcagaaagagaatttatattgtcaacttaattcacccagtgttcgattgcttgctctgtgcgtggcagtaagagaactaaggtcccacgctgtgggggaaatagaagggtagataactctggtaatgcttatcatggcttgtgttctaggaaggtgttaagggaaaagtgcgatttgcactggacttgaaaggtgagtggtatgtcagcaaagctggtattattcacgcagaaggaccaggctgaacaaacgaaaaggtgcagaaggtgcctgctgggtgtgctgggaatacacagaacattgctaagaacagtagaagttagggcacattccttgttagtcccagcctgtcttccttactgactggctgtataaccttatgagagttactaaactttctgagcctttgtttcctcatctgcagaatggctagttactgcataatagagttaagattaaatgagactataatatattgcattgcagctgggtgtgatggctcacacctgtaatcctagcactttgggaggccgaggcaggtggatgacttcaggtcaggagtccgagaccagtctggccaacatggttaaaacctcgcctctactaaaaatacaaaaattagccgggtattgtggcacaagcctgtaatctcagc

SEQ ID NO: 104000 - DNA, 1056 bp, Homo sapiens
cagcaaaaagattaggactccctgaaggctcagatgattgttagcattttttaacgataaagtattttttaaattaaggtatgaacattgtcttttagacataataccatttcacacttagtagactgaagtatagcgtacacatataaaagttaatatgtgctggaaaaccagaaaatttgtgtgactcgctttattgccacggtctggaaccagacccacaatacctgcaatgttatgcttgtggctgatttttcatagaatgtttgtgtctctttgacttttttattttcaaaatttaggattgcaggtgactctccattggcttatttcagaatgactggggttagggtgtttgctaattgcatgccagtggtcagggaagaagggaaaactcttgcactttagaggccatctgcctccaagtagagctccaactgtcaggccactgtccctctgtggggagggtggggattggtcctgtggcttgtagttcttgccatatagattaagaatgcgctccgtcggcattcttcattgtgaattagaggattgatgaggatttaaccctgctgtgatttctatgaatggactgtagatcccagggtgtgggatctttcctaactcgagaatgacaaaaattacctgtcacagagtgctgttacaccaatcagtagttatttattgtgttttttagggtttattttgtttgtttgataacctcttttccatttttttccttgttgtcttttacttgtttttttgtttttgtttttgtttgtttttttgaagtggaatctcactgtcacccaggctggagtgtgcagtggtgagatctcggctcactgcaacctctgcttcctgggtgtacaagcaagtgattctcggattacaggtgcctgccaccatgcccagctaatttttgtatttttggtagagacagggtttcaccatgttggccaggctgatcttgaactcctgacctcaagtgatctgcctgcctcggcctcccaaagtgctgggattataggcgtgagccaccatgtctggtgtctt

SEQ ID NO: 104001 - DNA, 1109 bp, Homo sapiens
ctccacccgcggctaatttttgtatttttagtagagacggggtttcactgtgttggtgaagatattctcgatctgctgaccctgtgatctgcctgtcacggcctctcaaagtgctgggaccagctccttttggatttttatggaagtttcctgatgtcaatttcttctcccagggtatagggctggacgccctctgaggagggtcttaagagccacagtctgagaggtgggaaaggattagagtcctgccttagggcaggtgaatggaggacaggtgagagattgtttccccaggccttaacatacccaatattataacaaaacactgttacaagggctggacaatacccagtatatatcatgataccacaggcaccctggctctggactctgtgcccttaacctgtaccctgtgtgaatgtttaatttaaatgagctggaatataacttgcaggataagtttgtggccatttgaagaggaagagtttagttttggattatagaaacaaagaaaaagaaagtggagtggagctgggaagtaccatcctgggatctacctgggagaatagtctgctgtgtgagggcaaggacttgtctgttgcccatcatattcccagcatctagaacagtgcttgatatgtagctaatgcttagcagatatttttgagtgaatcagtaaataaaatttcgctgccagctctcaaaggaatatgctgtggaagcttcagttactttttttttttttttttttttttgaaagggagttttgctcttgttgcccaggctggagtgcaatggcacgatctcagctcaccgcaacctccgcctcccgggttcaagcgattttcctgcctcagcctcccaagtagctgagattacaggcatgcgccactacacccggctaattttgtatttttagtagagacagggtttctccatgttggtcaggctggtctcaaactcctgacctcaggtgattctcctgcctggcctcccaaagtgctgggattacaggcatgagccaccatgcccggcctcttcagttacttttttctctttggttcatggttcaggatcctttctgaattaataaatttattacttgtttt

SEQ ID NO: 104002 - DNA, 2949 bp, Homo sapiens
agattttaagaaacttcctgccaagcggatagagctgactaaggaaacagtaattgtagggataaagtaagaaagtagttaagatgagctttctacttcctgggattttagagaaactggtcagacctttataatcctttgtctagttttggattccagtgatttggacacaactttttgtgccttgtgtctggcaattccactgttccccatatattagagcaatcccatttattagaccagtgacttgtaaattatttcagagccctcacattttatttaaaaaatatgcatgtagcactagctgtatagttaggtggcagtgtgctaagtgttatatcaaaacagaataagatggaagaaaggcggcaggggggcactctcatctcttccgtgctgggctcccccaggtctgcagaggcattttgggaaacaggtggcctggctggggtagaagtgagggtcatcctcttctcaactccagccagagcagctcatcatctctcttatcttttgggtatatcaacataagatttttgctgaaaaaagacttgcagaatattttcaaacaccatttcactaggctctaaggtccttatagtcagggctgtgttttgcttttatagccccatcatctgcattgttgcctgccagtgcattgagaaagaatgtaccattttgcctctgagcctctgctctctaatacttctccctccttcccatctctagccgtatattagagttaaaatagaatgtgtctgtttcatcgcaaatttgtatattcttaggtgatcaccatgtcttattaatctatgtctttgtgtcctgttcacataattctattaaagtaatgttgaatttggatttgttgtagaaaacttgcaaagctcttctaagagtaactaaaatcagtaaagaataggggaaaaaatccagagaaaatataagcaggaaaaccatagcagacagggtcagatggaatattagcggtttaggtgaagaacccagagaaccgcctgccctgtaaggaatgctgggtatttctcctggagggttttattttaatttttgagacaggatgttgcactgtcacccaggctggagtgtggtgatacagtcatggcgcactgcagccttgagttcctggactcaaatgatcttccttcctcggcctcctgagtatctgcgactacaggcacatgccaccacaccctgctaattttattttcttttgtagagattggggtctctctatgttgaccaggctgattttgaactcctggcctcaagcaatcttcttgcctaggccttccaaagtgctgggattacaggcatcagccactgtgcctggctcctggagagttttagaacaataaaatagaattgttactccatggcagaagtgtagagaacatgcctgccagattccagccagatgactcctataaacacaacatacagtcagtgtaaatgaacctaaacagatttaccagtacctgtacattactaaacagatgtaaatgaaaagatacactatgcattgaacttaatgctacttttttgttttttgttttttgtttttctagtagatgtgagtttaaatatagcaggaataggattttcatcttctcttgttgaaagtcttcgtggaagtggatttaagttctagcatattcagtaggagaaatttgagctggaatgaaggacatcacagcctgcataatttgttaaatgtctctttaaaaaaaaaaaaaaaactttgctacattggctagcgcatgtgctgaaagttggcttcccctaaagataagggacacaggccaaatgaagcctatgggaatgaaacacatcagagaaaataaaagaaaaaagaaaatttctgttcagccaagtttgctaagtagttgccatgctaggcacacacacacaaaaatcaaataaaacacttcacttttccttagagttcagggtctgtgggagagtccaatatggaaaattaacatttatcaaacgtatgaatgattgataaggctgtaatagtggtgtagctggagtgctggggagaactaggcaagaggctgctccctcctgatcaagtatgggaagaatattggagaagccggtagaggagggagcatttgggtagaccttgaaggatggacgagagagagagacaagtggaagagtggagaaagagcattcctaagagaggtcttttgggaaccaaggctcaaaagtatgtagcatattatcaatcaaaccctgggcccttaggctaagggcctagagatgacagaggggaaggtcagaagggagcgtgggcctaatagtatgagagcaaggtgggaatagctttgaacctggggctggggcacttgagtctcataaatggaacaaagttttgtgaagagaggtgtgaatacatggttgggggcgttgttctgactgaggagagatggtggtgggaaggagaggggagggccggaaacagatgatgaattgatcatcttggcctcttactgttctgattttctcatgcccaaagccctagtctgcataagaaggatctgtaaaatttagcaattggtttaaataaaatggatttacaggaaattttggcatcaacccatgttgattccaaaacaggtcggcaagcatattttatttacccaaacatttataacaataaataatgtggttttgttgttgttgttgttgttgttgttgttgttgttgttgtttgagatgaagtctcactctgttgccaggttggagtgcagtggcgcgatctcagctcatggcagtctcctcctcccgggttcaagtgatgcccctgccttagcctcccaactagctgggactacaggcacgcaccaccaagcccggctacttttttttggtatttttagtagagacggggttttaccatgttggtcaagatggtctcga

SEQ ID NO: 104003 - DNA, 1302 bp, Homo sapiens
ctacctttcatataggcaggaaaaaatgctggcatttgtataaaaaacaagcttttgtgctagactctgtccaaggcattttaaattgtgttacaatatccacccagctgaccttagagatagatgacctttcctttccctgagagctggtagagctaatgaggctcaaggcttagatataaccctcctgctgttggctccagagcctgtgctgtactaggtttgttgcctgctcaaggcacaaatcagtcagtggtaagtgcggccctggaatccatatcttcctgctgtgcccctctttttttttttttttaattttaaagctatgatgaacctgaaatctagatttaggtgaaatactggaaagggtggtttttgtgactgcttatggttttgtgaccccctgggagttccctaaacttttaccttgcccatacttggtcagttttgccagtgtacttgagatttaatctgtgaaaaaatttctcttttcatacttaattccgtcattctgtcctgagctgaaaactttggtatcagcttaaagagtaacataatacgtaaagggctatctcttcctgactagtttacaatgcactagaatcattttgtatggtgactgctctcactcagttcgactgggtgggactcaaaagatatatttaccaaagacagttctttccacagtatgccttaagccttcttactcatggggactttgtgttcaaggcaccttagtactcattcattctgtctggggctttgtctctgctgtcttcattttctttttgtggaggtaaaaaagtaacaagataaagcaaaacaataaaaccattgaagtaaaacggtacatgacagtgatacctttgaaatacagtaagcctgggcaacatagtgagacctggtctctgcaaaataaaaaaggccagatgtgacgtgggtgcctgtagtccagactattcaggaggctgaggtgtgaggatcatttgaacctgagaggttgaggctacagtgagccatgttgttgccattgtactccagcctgggagacagagcaagatcctgtccaaaaaaagaagaaaaagaatacagtatactgaaatcaaggtatttatagttagtagagcataatttggtcacattgcactggatagtttttgattattggttaggctgttgaaagtcctgtaatacccttggtacatgtggtatgggtgaaaaggttctcatggcgacaaacacaatcagtactttctgtgtaagagcaatgtttgctttttgggtaatatgcgtgacccagca

SEQ ID NO: 104004 - DNA, 1055 bp, Homo sapiens
ggattacaggtatgagccaccatgcccagcccacaagtagacacttttatatagccacacagattatttgtgattttctagaataaacagtttgttaggatttgaattatgaccttgcgttcagtgtggtgtttaaaaaaactccgattactcaaattggttttgttttttctgttgttgttttgagatggagtctcgctcttgttgcccagctgggagtgcagtggtgcgatcttggctcactgcaacctcagcctccagggttcaagcgagtctcctgcctcagcctcccgagtagctaggattacaggcatgcgccacctcgcctggctaattttgtattttcagtagagacgggatttctccatgttggtcaggctggtctcaaactcgacctcaggtgagccgcctgcctcagcctcccaaagtgctgggattacaggcatgagccaccgtgcccggcctattaaattgtaagcagttatcatgctcacatgtatattacacttgtcttataaaacttacaagggaaaaaattgttataaaattttcattctacaaagtaatttgtgtgtattcacgtgagaggttgccaaagttggtaagatatcgggagacatggcttttaggttccataacctagtagtggtatacttttttgtttgtttgttttgagacggagtctcgctctgttgcccaggctggagtgcagtggcacagtctctgctcactgcaaccttctctttctaggctcaagcgattcccctgcctcagcctcccgaatagctgggattacgggctcctgccaccatgcctggctatttttttgtatttttagtagagatggggattcgccatcttggccaggccagtctcgaactcctgatctcaggtgaggtcaggaggttatcagcctgcctcagcctcccaaagtgctggggttacagatatgagccactgcacctggccaactttttaaaactctgtaagataaaatggaatgtaattgaaatgatcacacttaattggagttggactttttctcatgagtccaa

SEQ ID NO: 104005 - DNA, 2258 bp, Homo sapiens
gcccgagggtgcggagggaaggtctacctgctggtcgcgcgaggccttgggtgcaaaggcggcgggtgtgagcgggcggcgtccgggagtcagcgccgcctgcttcggggcccctggcagccccgggggcaccggccgcgctcgcctcttggctacgggctggaggcgaggccagcggggctgggccgggatgtgggcgggagggcgccgcgctggggcgcccaggagagcaggggcccgtttactgccatgtgaacacctgaagccatgtggacgcggctgcttctcgcctgttgggggcggagggcaggtaccggcgggttgggcgcaaggtcccggcgcaggacacacttcctgtgtggggcggcctctcctcccgcgccgcggggaacagggcggggtgtgcaagccggggtctctgggcgagggagcgctcgtttggggacctgaggctttcgtccctttttcgggggaaagtggtggtttgaaggagcgtggccaatcgggccgatccctctcaggctacggcgggaggtgcactgtcctctggacgccggaatgggagtggaatttagtgagttggggggcggtgccgaggagcggccgtcttcctctgcttgtgggtgggattattgtctgtttttgtggttgcggataccaatacggtctgctggtctgtattcaatcctttagtttgaccttaggggtcaggtcaaaattaggatttcccccttttcctttttgcttttttttcctcgaagattagatgtctctggtaactgctgtaaaatggatggaattttcgagctattatctaacaggctgatctttgaatgataattggacccttatgttaacagcctcagtgaagagtgaagagttttatacagcatcttccgtggggtggcagttaggtggatggggaagctacactgaattccgacctgggagaccaggaatctgcttacagctttgacgccaaataaactgcagcccagggcaagttactttccctggtaattttctcatctgttaagtgaggactcccgggtcagacggtacaggggtttgtggttttgcttttttatctctcattttgtgctctgttttagccataggcaacttttctgagaaatgcagactgtaccttagctggcttttaaaagcctgtctttaagcttccagcctctgccttcaacagagcataaaagttggtcagggtacgctcttttttgaaatcccacttgctgttctgtgcttcagatcagaaagtgtattattctgacctaggtggaatgcaccttaacatattttttgtctttgtgaaagaagttatcagaaaatgtttcagagaatatttgtctacttggaaaatgtgtggataacatgtgattgggtctgtgtatgttggctcagaggagttccaagatctttctacgcaggggattttggaggatccagattttattaaagttcttcaaaggacatttgacatttggctaactgttgaaatttccagccagtttcagcattctcagagtagggggatgaagtagaatgccataacatctcctgtgaaatggtatgctagtggaattaactgtcacctcagggtgcactgattatctgcatccccaactttctccttactggtagccagtgctccgcagatgctgaagaaccgcaattagtttcactgattttatggtgtgtgaaggccttaggctgtgcttttgactggtaagtatttctataccaacctcagaatttgtcttaaatttctagaactgtgctgctgggccggatatgagcccaatatgttacaatatgtctttctcagatcactttttatttttatatattatttaatttttaaaattaaatccccttttatttacttatttattttgacacagtgttgttctgttgtccaggctggagtgcagtggcacgatctcagctcactgcagcctctacctcccagtttcaggtgattctcctgcgtcagcctcccgagtagctgggattagaggcatacactaccacacccggctaatttttgtattttaagtagagacaacatttcgccatgttagccaggctggtcttgaactcctgacctcaggtgatccgcctgccttgacttcccaaagtgctgggattacaggtgtgaaccactgcgcctgggctagatcactttttgattcagtctctttgaacagtttccaaaaggatcccagcataggggcagagtgctt

SEQ ID NO: 104006 - DNA, 1010 bp, Homo sapiens
cctcacaacaaacccatgaggcagggattgtcatcttcattgtacagagcaggaaatgggtgcacacagaggttaagagacttgcccaggtcacacagctaggaagaggctgtgatttgaactcagtcttctggctccaaagcccccacagagtcactcagggcactacaaagagttaacctgaatatgaaatgatctaagagtcgcagtgacaaaggcatgctctaagcgcttttcctgcagtaacttgcttaatccttacaacaaccctataaagtgggtactgttctcgcctcattttgcagatgaggaaactgaggcacagagcagctcggagggggcagagctgaatctgacaggctacagggcccctgcgttgctttgttataagatgacaataaggaagttcctttcctttgggattatttctgcctgaaagctcaagacttttagccacatcattgtctgggctccacgggaaggcagtgccacatgctgaggcatgctgggaaaagactttgttccatcctgttttgttgacatgctcttcatttttaagcctgaaaccgaagcttcctgctaagaattcaaaccatggagaaaaacgcagccatgataacggccactacttcctgagcctccagtgttccctgtgcttggggatccatatatgtcacttaaccttaaccttcacaacaccagggcagcctccattttcacaagtgaagaaatggaggcccagagtcacttagaagatgctcgaaggtgcacagctgctaagtggtggtgctgggatttgtcctcaggtcctcaagagtcctgactcttatgtgctggctccccacggaggcgtggagtcttgtttgctgggcatttgacagaaatgtttctgctcatcttctgccacaggttggtccttcagcgtcaagattcctgggccacttattaatagaaggcaccaggacacaggtgcagggatgcagagctggatgctgccttctcaataggag

SEQ ID NO: 104007 - DNA, 1067 bp, Homo sapiens
ccgaaggtcacattgccctctgtccttccttattttattttatttattgagagggagtcgctctgttgcccagactggagtgcagtggcgcaatctctgctcactgcaacctctgcctcccaggttcaagtgattctccagcctcagccttccaagtagctgggattacaggcacctgccaccagagatagggtttcaccatgttggccaggctggtttcgaactcctgacctcaggtgatccgcccgcctcagcctcccaaagtgctgggactacaggtatgagccactgcacctggcccttcctttctttttcacacccacctactaccaagaaggcacagaggcagatgatgatgctgggagtccatctgaggcaggacgggtaaaggaagcctagagagccctaggggaggaggctggggagacacaaaacttgtgaagaagtggttaccatgcatgtctgtcatcatttgcccacagagggatatactgataatgggaataatggtcgtcaggtgggcaggggaaggggtaccctgcaccatcatgtctgctgaggaagatacagtcgtggttccctcttcccaagatgtttctgctcacctttgctcaggacatggggttgcttaagggcaatgtgtgggttcagatccggcctctgcactcacctgccgtgtgatctcaggctaattatttattgctctgagccttagcgtccacgcctgtacatggggatggtcatcgtattcacagtgttgtgaggatgttacgagtggacgcaggtaatgcacttagcaccatgcctagctggcgggagagctctaggaatgttctctgttgtcggcctcttgaatcagccttgcctctcctcagcattccctcagcacctgctgtaagtcagcgccaaacccaggcagcctcctcctgtgccctgggctaagccgccagcctccaggcctgggagctgagcgtctggatctgccgcgcagggggaacagcctctgagagttggtgtgttggctcccactgctggcgtgacagacatcctgaggaaatatgtcactt

SEQ ID NO: 104008 - DNA, 2788 bp, Homo sapiens
gccaacaatgaagaggcagatcgagggctttgctcattcaggctgtcgagggagccgtcattttgtgttagcgtgtgtgtgtctgaggtgggaggaggaagagagcggagaatgacaggagaaggattatgacattgtgttgtctctgtttgtggtaaatgcaaatttggcaccagtggtttcccgggaaaaggagcagcaagtaacccaggccgaggccctggcccagacccacggagggagcccgtgctgggcggcgtggggctttatttggccctccctttttttctatctggcgtgtgcttcttgcatttattttacagtgaagagctggagacagacaggccggcgaggcaggaggagccggccccctcctcccaggcatggcagcccctcctcagctcaccccggaggaggcctgggcagctctcccaacccccaggcgctgtcccagctctccggcctccctcccaggtctctgcccccagccagggtcaccgttccatcattctcttagcctgggcagcctgaggtctctgaaggctacttctgcccgcagctgcttcccaagcgtgaccagagaccgagaacctgggaccgaggctgggatggggctttgcagaacgaaggccagggctgggcgctcccccggctacagtgctggcctggctggcctggaggttggcaaacagctctgcagccaggggctgttagcacagcctcctggaccttgactcctctgacgggcccatgagggcaagggagcttgagcctgccctgggccaggaagcggccatggtacaagtctctgggctgccacagggctcaggcaggtgcagtgacatgggcgcaggtggtcagtgtgtttacagcaggcctccagagagggcatggtggagtgagttttaccagggccaggccgtagctcaggccctagcagagactgtgagttctaagctgagaagccagggcaggaaccatctacaggcagaaggtcaggggaaggctgtggctctccttccagtctcccttcccctggagctggtccctaacctgacgtcaccacctcctcttttctggtcaagtcttctggtctcaattcacttcctccaggaagccttccctgtccttctctcaggtggacttgggtcctgtgcctggcccaccttctttgccctctcacagtcctgaccacacagacgtgggtctgtctccctgttaggcctttgggtgcagagcctgggtgaccatccttggttacagggacacttaaggcctcccctctgcactcctggcacctgcccagagctgggcatagaggagccctgttcctagagctcagaggaacacacccagactcagaccccccaggaagtgggaccaccaggatggaacagctgccctctccccatgtcctagacggtgtgatgggctcacttcctttgggcaaactcaccccaaggggttttttccccacagaaatcttttccctgagtacccctgtgaggtctgacagggaaatcaagagaggcttcacagaggaggtggcatttgaaggccttgaagagtgagtaggagtttgccgtgctaaggcaggagagggtgtaccatcagagggaagtgcaagaacagcgcatccaaggtgtaagaggcgggttgcactctgtggctgaagccgttggaagggaagagtggggagaggcggcgacagtggaagtggggcccttgtttcactggctgggggagccacttgtggaggaagggagaacctgacctgatgacagactgggcggtgccacatggacaccgcagtcattgcaaactcgccttctttggacccgttttcaggatcttgcaaagctggcttgttctagctgctcccaagccagcctctctcaggctgccttgtgctgggattcccagatggcctcagatttgaatttaaagaccagcttgggtcttcttttaatttggagtctcaggaccagcccaggccacattctgagctggaaccaaattggcgggaagcagtttggatgccgatcaaggggtgaagggttcaggagcagctcctccagcctgggaccccgagatgactggaggctcctgtgggagactggggtggctagtcccccagacctatccccaacggagatggcagcacagaggggtggccaacgtcctgaggccagactgcctgggttcaatcctggctctcccatttcctagctgtgtggcttcaaggaagttacctgccctctgtgagtctttgtgttcttgggtaataataatacctacatcacagggctgaggtgaggattacatgagatcattctcacaaagcagtcagccagagcctggctcccagggggcactgaataattgttagcttaaaaaaagataactccagagagcaaaggctctagcacctagtgtctggggtctaatcactcaatccatctgagcctcagtttccctagttgtaaaatggagatggtcatcgtgtctggtaataatagccaagactgaggagcactgactgcgagatttgcaggctgtgttctagttgcctaactatgtattagcttaatagtctctccccaccctgagccacatgtaggggcagagcaggggccagggcagcctagaaactaaaagtgtgcagggaaaagccccagagatttggtagtttctgggtgaagctaaaccagtccccttgcttagcaaaggcaagaacagagggaagtggatggctggagtgtgaggcatggagaccacaaaggcccac

SEQ ID NO: 104009 - DNA, 1092 bp, Homo sapiens
ggcgtgtgccaagtttggggcagccagtggtcagcagcccagctgccccgtggcaccagggaagaggggaagggccctgccgtggagtaggcagagcagggcctggaggggccctgggccaggggcctcaggctgaagcgagcatggccgagtgaagtgcatggcctctcactggagggcagaggctggaacactggacagggaagtccccaccaggccaaggatggcttgaacagctacggagtaggcggctcaggtcaaggatctggccacggcccagagtccaggcactggacacttgggtctctgttgtgtcccaatgcttcctgggccttggtttccccatcttgacacggggcgttggtgcttacctctcaggcattgccatggggtaggaagggggtgtgaagcgcctgtgctgggcttgcaggtagtaggtgctcagcccctcggaacggacgctgctgttgtacacagagaaacagagccaggaccccaggccaggcctcctcttgctgtggcctccctgagatgggacttgggacaaaaggtggtcgggactgccatgccctgccctttccaagcccacctttgtagggggcagccagggctcactccagtggcccatgaaggctttagccctggagctgcccagctagcccttcaggctctgggccactttgctggcctcacatcccagctcaccttcctgctctgcagcctcagagatgcccttccctttctgagccttgccaggtaaaatgcagccctctctggtcctcgtgacgaccacctaaggtgctgggtgcaaatccccagcacacagtaggtgctctatgaacggtcacacttgcctttaccccacagtctccaagcacagcagtgagctgcgattctcacctgtggtgggcgttggccccttttaagccatttactctggggccaattataaatagacacataatcgcccctatctatagagataagacatactcttcagatgagcccgcccctcccctgcccccctccacgctggcacgcgctctccgcagttgaaggcgaggggggatcgggtgctcccctccctcctcc

SEQ ID NO: 104010 - DNA, 1076 bp, Homo sapiens
tgggactacaggcatgtgccaccatgcctggctaattttttgtattttagttgagacagggtttcactatgttggccaggatggtctcgatttcctgacctcgtgatctgcctgcctcggcctcccaacgttctgggattacaggcgtgagccaccgcgcctggccatgcctggctaatttttgtatttttagtagacggggttttaccgtgttggccaggctggtcttgaactcctggcctcaagtaattcacccacgttggcctcccagaatgctgggattacaggagtgagccaccacgccaggccagcactctgatctcttaataggaaaaggtcctgttctcctgggagctcaagagggctttctgtagggtgcccagcacatacaactggcctgcctcctctttgcccagggtgctggacttgccgaaagctcttctggtgaaggaattcaaccattgcactttttcgctcaattgcttcactccctgtctgttgaacatttccaaatctgatttgcaggacttttttttcttttcttttctttttttttggctagtgaggctttagacttccatgcaactcaccacgcccagaaatggatgctggaccaattgtctttactccccctttcccatgcaagcaatgtaacggcctttgaaagggggctggtttgtggttttccagcagtagaatggtctgtggtcttgagcagctaaatttgaaaccgggcttttcaggaggatcaactgagctctgaaacagctgggcacagtgcaaggtggcaggggtcagggacaggcaggtggggctccttgggcttggctgtgctttcactgctgactcctcagtgccgggaacagtaagagctcacacagccctgcttgaatgaatgcatgcatacgtgatgggatggatctgtgctatgatgagatgcagtagagtatgttggttaaaagcctaggctctagaactggacagcctggagtggaactctagctctgctctttgttagtggtgtgactgggtaactcagttccgttctctgggcctcagtttgctcatctgtgaaa

SEQ ID NO: 104011 - DNA, 1288 bp, Homo sapiens
cccagcggtggggagtgtggagtgaatggggctgaaagggtagggctggctcacagagggtggggaggctgcagcaaaagaggagtttagggtggctatggtgcaggggcagctgtatgcttcacctcaaatgttactgtcttctctctccatcaaggaggaagggcccaggctggggttaggaggcttagggaccagactgtgtcaccctctctcctcctgtgccctgccccccacgctgtcatctccctcagtggcagtgggggttcatcactgggtcttcaggtcccttgcccatggctggtggtgttccaggtgggcccaaccaggcggcccctgcctctaggcagcgcgtaggtttccttgggcagcctcaatcctgccagcgccagcatgtctccctgcacagaagccatcaagcacctttggatcctatctgagggtcatccctgtcccccagggccctccacccaaccacagcaccggtgtgtattcccctctgcaggctgccaggcactccgcctgcacctgctgcagttggacagtccaggcgtggtgtgtgaccacagcaagccactgcccacctctgagcctcattgtcctcatctacagagttgggacatcagcgtctactttgtggttggctgtgaggcctaaatgagataatctccatcaagtccctgccaggagcctagcctggcctccatcagtggccgctgttgaaaatgtgagtcctaaatccttgtgaccgctgggcccagcaccctggacagcaacagcctggccctgccctctcccggagctgggagggagggccctttcccaacctgctcgcctgggagcactgcctgccagtgacttccctgcctctgccacgccgacccccagcagccttccctggcctccctcccgctcctggagtctttagtcttcagcacagtctggtaattaaaaaccttcaaggggaactttattgagttagcattagttattttgtcaggctgggagagcaagagaattatctgtcctccgggagagggggctagggcggggtcgcgggctgagattggcaggtgcctgccagtgtagtgcacgcagggtttgtgctctattaatgcaccgcactgcaggtgcagtggcaggatgtgaccggggtggagcgggctggcgggtgtgtgtgtggggagggaggattccccactgtgaggctggccctgcggggatgttcccacttcccaggctcttcctggctcctgtcctagggctctatcacttcctggctttcaaa

SEQ ID NO: 104012 - DNA, 1006 bp, Homo sapiens
cttcccctcctctcctttcttcctctgctccctttccccctcctcctccacccgctccaagcttcccttctacccctttctgtcttttccctcctccctcctcccctccgcttccttctcccccttctctcttcccctcccccatccccaccacttcctcctcctctgctattctctcttaccgaccccactccaggtacctgctaattgcacttccctcctgctattaattacctgacctagagagaccccagccaggtcactcctaggaggtcttgaagtgttggggtgcgggcaggggggcctgcgttcggggagaggtacagaggttggagagctgctagctgggacagaaaggcaagagggactggtgaccagtgggacatgtgattcccctccacccccattccagttcctcggggttcctgggtgacccaccactgccagcatgttctgttcatgaggccttgaggcccctttgtcctgggggaaattgaggccccagggcattggaggttggctaggagtggggaggggagatgggagagagagtccatggggagggagagcaaggtaaggactgtgtgagaggcagatggagagagtgccagagcagggggctggatgtggggagaggggctgggaaggaccctcagttcctgcacccccagccagacatggcctcacctccttgccgccgtcctccctgtgattgtcctctgggctcactggttgctcttgctgtctgcctaccgcccccttgcccccatcctcccgtgccttctaaaggccagagaagcctgcagggccaagtccagatttttgggggtacccctccaggtctccgttcccctccacagcaggggtctgggcaggcggtgggtgtgggaacccttggagcccacccatcactgccatggttattctctgtttcagttggtccacagcttctaaggctgaggacacaccagtgggtgcctcctctgtgctggccgtggtgcccggc

SEQ ID NO: 104013 - DNA, 1041 bp, Homo sapiens
aggtctccgagcccccaggagcacccctgccctccacggctgccagtgcctccctcctgaggggcttttcctgccctccagctttgagagcatctgagggccaggcctgcatgaggatggagatggggtgggggagggccagatctggggtgggaggtccagggatctcccagccacgggggaggcaggtggcacactgatgatgacacccatccaggggccactgtcaggccaggggtgtggagaccagggaaggcagtctggggaggccagggtctggaaggacgaatgggaggtggctgggaaagtggtcccccatcctggaacagcacagtgcatttccaggaacagcaccttcatccatccatttgtcctgtagatgttgacttagcagctgttcgggagataacacagcaggttctggtggggtgagccaggtgtccagggccaggggtctggtctcccctggggactgggagagacttggtcagatgtgcagtttagagagacccatggagtggcaagtgtggagtgtttgggaggcagtcataggaggaccaagaaggatgctgggggttaaggggtgggatggccccatgtttctggccccaggtggatggcagtgccatgccctgaggggggcagggagctggtcctcattaataggaagtagtcaatcactgcctagtatgaattaggggattgggccagctcttgaactgattcttaccagcagccttgggggccaggaggcagtgctggagctggagcgtgggtctgacatttgctcaggttgtgtttgcagtgctgtacgactgcatggggaggggctccagggggttatttagttcaggtcctgctttctctctcccatgggcgaccagggagagggtctgctgtgtgctcaaacaccccacaggctgtgcattccctgggcatctctgagcctatttcctggtttggaaagagcacaagctgtagagacaaacccccaagagtacggggcccctggtagaaactggggccaggttaagctggagg

SEQ ID NO: 104014 - DNA, 1064 bp, Homo sapiens
tcagctcactgcaacctccgcctcctgggttcaagcgattctcctgacaacgagtaacctggattacaggcatgcaccaccacgcccagctaattttttgtatttttaatagagacgggatttcaccatgttggccaggatggtctcaaactcctgacctcaagtgatccacccacctcggcctcccaaagtgctgggattacaggcgtgagccaccacgcccagccttgtctttatatctttactcctgctgttccctctgcctggatgcctttcttgtctcctccacctggggctacctctggttcatctgccactctaatgatgcctcctctgggtagtcctctctgaccagccctgtcccaggatggtagatgtcttatgtgcccccctctctggccccctaggcttccctcattcatggcactgtccacaccttcctgaagccaccagcttcagtgaggaagtctcactcagtgttggccccatggccagcccaggactttgcccagaggtagaaccagtgaaagtttgttgagtgaataggcaagggagtggatgttgctcttcctgcctatgtccagcccattccacctgcctgggctgccctcctttcctctcttaccctgtgtgcctggcctggataccccagcttcaagctgcctgtccttcagagagtccttcctctctgagcctgtcctcacctgcagcccacctgccatgaggaccccagatggagcccactgtggtgcctctcctgcacccccagcatggtgtgtgagcaccctggggctcccactggcttctcccacttttcattgcttcaggcccccattaggtggctggtgattgctgacagactgaactgttccagaacctcccctgtcaggactgccctggggaaatctctagaggtgtccacagcctcctgtctgccccctccctgcttgggtctcctcagaccattccttgattccaggtttctgaaaaattgtgtgaaaactggctttgtgtcatcagatccaatttcctgccacctcttacttttaaaggaggcacagcca

SEQ ID NO: 104015 - DNA, 1092 bp, Homo sapiens
ggcagaacagaacttgcaagagtccagaggcccaaaggaggctggtaagtttgagaaacagccagaaggcgggtgactggagcagagtgagcaggggtgagaatggaagtggagaaggcggagaggtcaggggggccagtctcaaaagtgaaagtaggagctcgctgtgcttcttcatcttactcctgaaccgagatggcagtggtgggaatggagggaagatggaaaacagcagagcagagccttggggtagagcctggagtagagcagtggggcaggatctgggggctcagggctgggagagaccaggtgctggggtgggagggagaaggagacttcctgggaaacaccctgcaggtgggggtaaggggatccagtgacacagctgcggcacagccctgctccggggtgggaaacccaggactcctagctggcttccccggcctcctcgcctgtccaccgtggagttcatccaggccgctgcagggtgtgaagaagggctcagagtcagccctgacactttgtttagttgttcatttgtcctcagttcctccatctgggaaatggggatcctgatactcatcgggggttaggaatcatggttgcaaagttccagcgctggtagaagtgaaaaccctgcccgttgactacttgcttcctcatttgattctgtgggctcaaataatgtcctattttactgggagggaattgaaggtctgaaagggaaatggcttgcccagagccctgctggccaggctcaggaggcaggggaggtctggggagagaagcctgggatgaggtcccctgtctccccaacacacacgatgagagcccccatggctttccatggctgcccaggcaggagtggagccggggttgcttggagcacttggggagtttagagcagcagcaggtggcctggcccccagatccccatgcctgtggagtggaagggcagggccagaggagtactcttccccatgctgtatgtgctgcttggaatgtcctcccacagcccccagccaagtcttcacccttcaagccttagctctggccagcacctcctccaggaagtcttcctagactttacgt

SEQ ID NO: 104016 - DNA, 1940 bp, Homo sapiens
taacaaacaaggggctgcagagtgaggtggagggtgctgggagacccatgtggacagagcaggctccagccggcctgggcctggggtcatgtggttcaggcgtttcaggcttcccacacagtgggcagggaggcacgaggctggagagagcaccaggatgcttgtggcttgtcctgccccagcctgtgactttcaccggggatgcccttccctggctaagacctggggtgggggctttcccccccgtctggggcaagctttagcaaaggggtttagtgaaccagtgaacactgacaatcccaaaggggtgctgagccctgaccgtgtgccagcacctagattaagcatttcacatgtgtgatccctttgactctacccacaaccctgtgaccaggaaacggaggcacagagaggttaagtgacttgctcagggcgtgggtgagtgggaggtgagccagggagtaggtgagctggcatttgatcctgggtgatctgaagctagagcctggatgtgcaaccaagagatgaaggtgggaagggggctggacaggggaccagaccaggttcacggggggctgcggatgggagctgtgcttgagccttgtgggactgggtactgctagagccttagagctgagctgcctccacacacaccctcagtgggcctagacctcggagccacatgcctggaccctgagggcgcccatcccgtcttgcctcaggggagcccacaggatgccccacagggctgctcatttgctgaaaatatgttgcagagagctgggccctgcagaggctgtgtccagtctggctggagcggacacgtgggcagaacagctagagacgtgtggttctcccgagtagagagcagctcacgccccctgcatggctgagcctgggagggtgggtggagaaggggcatttgttcagttgagagaagacaagccctgacccaacaatagtaatggcaaatcagatattcacagaggtgaaagtaacgtcgcagctgacataagggctgtgaagactgaaggaagtcagggaggcttcctggaggagggggcccagagctatgatgggaaggaggtaggaattaaatgagtaagcaggaaacagtgtgcaaggctaagagaaagcctgtgcaaagcccctgcggtagggagtgctatactttgaggccggggaaggcaacctgtgttttttgagcaagaggatctgagggcaggggtgtggtgcctgatgagctgggccctctgggagcggtcacatgagatgtcagacatggacttttggattctgtgaatctggaatgtccttagagccccaggcctagaagtctcagggttcacagcccagctccacctcttcctctgcattcagtctcgggtaaggagggtgccatctctgagcctcggttttctcatctataaaatgggctcactgtcccatcaaagcctgcatgtgaggacttattgtgggaatgtgtgtgaagtgtctgtgcgaggtgccctggcccgaagcttccgcacaggaaatgagtgagccgtgtctcctgtcccatttcctggggttcccactcaccctttgggcccagctgcaggttggtggagaggcctgtgccctgcacctctggcttctatctcattggcaggttgggggagggggagttcatggccaaggtcagaggtgccttccctcagcagggttttctgagggccatggcaggtgcccactgctccaccttctgatccttcagcatgaggcctctccccacctggggatgtcttcaggaagggttacatctagcaccattcttagctcctgcgccaagggcattgccgtggcccctctatatcagtgccagcctccagactcagccctggggtaaaccctggcttagctctgtgggcacccagtgcctccgccccctcccctccaag

SEQ ID NO: 104017 - DNA, 1050 bp, Homo sapiens
ctgtagcatcgtgtttgcccatgcagttgctttatcagaaattggctgtgcggggcacggtggctcatgcctgtaatcccagcactttgggaggctgaggcaggcagatcacttgaggtcaggagtttgagaccagcctggccaatatggtgaaaccccatctctactaaaattgcaaaaattagcagggaggctgaggcaggagaattgcttgagcccgggaggcggaggttgcagtgagccgagatggtaccactacactccagcctaggcaacaacagagcgagactccgcctcaaaaaaagaaagaaagaaagaaattggctgaactggtatttgaactctcccgctcactctccccgtcgaacccagagtgctgcccttgcttacattgccatcacccttggaatgagaccgagatcctccccctggctgttcctgctccagctcctgcactggtcactacactccagccacatagagggaccttttgttctcaaaagccctgagctgcttcctacctcagggcctttgcacttgctgttccgacctcccaagcttctccctgcctggctaataccctcagagcccagctggagtatcacctcctctgccaggcagggccttcctggtgcatgttatcaggctagttcgtagtgcccatgtcatttgtaatagttatctgttatgcatctgctcgccctagacagaaaactccaggaggcagggatggtgtctgctgagttcacggctggaccccggtgcctttcgttggttcactcactcttccttcctgtcatctgttccttcagcaagtcctgagcacctgacatgtgatagcatcttgctagtatttgttgagcggatgagtggatgaaggaatatccatctgtctctaaagcctgtactctttccactacattccgtgatctctgacacccctctcttggccccattttccccagttgtcaaatgaaggaaccagaccttcccttcctggctaagttcagattctgaggatgtaaggcaagtgggctggcttacagccca

SEQ ID NO: 104018 - DNA, 1057 bp, Homo sapiens
gccgtgccatcctctgcaatgaggagttcacccaacctgctctgttttttggcgccagctggtttgcttgactggaggaggccacgctaatggggccaaggtcacaggttgcagcctgcatggtggcaggttggctcccagacctgtgggtgggtgccaggactgtattcctggtgtctgggcagaggaggagtgatggctggcccccagatttggttgcccaccacaggtggcctcgggggtaaagttgggctaggggccaggctcgttgctggtttgggcagggctgggggcgtgatctgagtgctggggcacccccaccccagagctggcaccctgaagggctccctgtcacccccttgccaccctactggctccctagtctcacgtcctgtgcttctgccgcactcagaagctgcacttagaggtcccagagcccagttctttcttgccctcaggtctctgcccctgctatgccttctgcctgggacacttccccactctctgcccccctgctgtctgctcagagtcaggggtaacagatgcgtgcactgtgttctcgcattctctctgccagtcagtattcattcagcaaatgcagtcccttaataaggatattgcagccctactatgcaccagatgtggtactgattgggggtgggatggggagagctacatttgtgaataaagcagaccaggttctcaccctcgaggagctcacagtggagtaggagtgacagacagcaaacaggtgaaaacgtggctggtgccggcctgtgggcagggctgtgtggaaaagctgagtggtgccagagagagagtgggaggtgcagggggtgctgatagaggcagggtggccagggagcctttatcaggggcaggagaaggtgccagccatgggaggtgtgcggggagagcatcccaagtgggactccttgctttcttgtctgtttccccacccctcttgcctggtgggggccagcacaaaactgggatctttgctggggctgagctgatgtgggcagggccccgggagcaggaatggtctcggatgtct

SEQ ID NO: 104019 - DNA, 1032 bp, Homo sapiens
cctcctgggatgattgaatctcactgtggctgtgccactcactagctgagggtcactctctaaggcatgtggttctgtttctgcaagcctcagtttcctcctttggacaatgggaatcccgcagtagtaattgtccagcacatgctgacgcagagtgggtgcagagtgagcgccgtttttgtggtcatttctggccccaccagctgccccaactcctcacttggccttccatgcagttcgctgcccagagaatgctgggtttagtcgctatgggcttctctatggccccagatctttccttcaacaagccagggggtaccaggtacccactgtgccctgcagaatgtttgaagaaaaagtgagtagttttggattctgaaaccccagccctgagtcctggctctagatctgtccagctgtgtggccttggatatatcacttagtctctgtgtgcctctgttttctcgcctggagctgcagtgagatgtaaactggaaaccacagtgtagattgcagtgaccagtaagtgcccaccttgtgtgaggacgagcgctaggccaggagtctgagccttgggtgcagcgactgcccctgtggcttcgctgtgtgtctttggtccggactctttggggagcacctgttaagggggttcgtggcatctgcctgcctcacagagcttttctgagactggaaagacccaggggtggggaggagaggggctgctcgtgggagggctttaaagggctggatgccttctggaacaaccctgtctccctggatatagatgacctctcctatctgaaaaatgggaccagacaccctgctcacccccatccttagatctccgtgattatggctttaatcagaattttagcctttatatttataatgcatctgaagggactccagcccaatttaatacgagatgtgttgaaataaactgtcatctggactttgatatattaagattgccctttgaaagtcacgtgttgagaggcagatgatgaagaggtgcctattgttgccgcctcg

SEQ ID NO: 104020 - DNA, 1075 bp, Homo sapiens
cagagatagactaggcatggtccctgccctcaaggggttcccatctggtgagatgctggtgggagcaggactccgacatgacccagtgcaggagccgtgaggccagggacagggcctccaagcccagctgagctcaatactgactcgggcttcctgggaggaggcttgggctatggggggaccgtggtcagagagtgggtggcaggagcttgagacctccagggaggcgcatatgggtgatgacagcagcccaggtggcccaggaggggtggctgaggggaatgaaaggaaagtgacaggcaagggggatgaggggtgtgctgagaaccaggattggactctggaatcccccagcagggcacaggctcgatgaccagggagtgtgaccccagtgggtgcctgggttatccttgaatacaggctggggtgggggttggggagagctagagggtatgggtgggtgggaggaccctcacaggggccggggctttgaacaggggggtgaaggcagaggtcatgggggcatcctattggagcagtggccacaggtatcatgcagggggctgctggctgccaagcccttaagagcctagggacaggcagggacagcaggaggaggcctggccctttctcttgccagccaggtggaagcctggatagaaccctccaggtggaatacaaggctctactggaggtccttaagggaggttagggaggtggccgagaacagagaggggtcagccctttacaggcagggaaggggaaaggtgactctgggaaagggggtggcaggtgcaaaggtgtggctgggcttcaccctcccctgggctcccacggtggggtgtgtaacaggcagggggctggctgctggggccagggactgcccctctacacacttgcccctgatcctggcaccccgtttcctgtaggctctgcagcgccgcgagaccgaggtctatgcctgcatcgagaatgaggatggcagctcacccaccgccaagcagagccccctctcccaggtacacaggcgctggggcaccaagcctggcttcttgctccatctgaccctcccatc

SEQ ID NO: 104021 - DNA, 1094 bp, Homo sapiens
accagtgtctcctggacggggcccctgctggaaaggggccgagacagggtgaagcccaccaggggttggagtggggaggcttgggtcccgtctccagctcttcttctggttgtgtggcctggaccagtctcagtgccaggttcctcatctggcggccaccctgctgggctgttccagctttgcttctgagcggaaggtcaggggctgccagggaggagcttcgtggggaaagcaaaggggaagctgtcagcgccggccgtcccctcctgtgaactaaagagtcgccgcagacaagcaggcccccagatggagaaccagcctgtgaggtggcgggccctgccaggcctcccacgccctcctgggctccccgcagccccctggctcctccttggcgtgctgctgctgcccgggaccctgcgactggcaggtagtgtctgtcttcctccttctctctactctctcgctccagaacatcagagcggctttcatcccgcccggcgcagctaattcccagggacctgtctctggggatttgctggttgtcgtttgaacgctgcagacttcacaggggaagccttctgggaccgagaagatgtttagctaatgccttgccaaggtggcttttgaaggggagggggacagcgctctctccctcgctgctgtgacagctttgccccagcagtctggcctcctggcccttaaacaaggagggtgggcgctgtgtggctggggccaggggcggggcaggggggagggacagctccccatccgaggaacctcacgtggctgctgcgggggacactgcgttgaacctggcaagtggtggggctaccctctgggttgttgctggcattggccagggagagcggggagaggggggagggggggataccagggccagccacagggctctgcgcccagaggcacaaaactgtcagtcaccagaaagggtctcacctcccagttcctgaaacacaaccagaggccaagtgttttaggatgcaagtgtgtctttccacgccagcggcgctcctttcctggttccaggctttcttggaagctgggtggccgggatccgagccaagctgtggggt

SEQ ID NO: 104022 - DNA, 1078 bp, Homo sapiens
tcccatatttgagaggtgcttcgggcagtttccgaagtgtgagagccagggtctgtttaaatgcagatttcctggccctgcaactctctggggtggagccagcgtgtctgcagaatagtggcagccacacacacaccctctgctcacgggagactgaggctctggtctcacagaacctgagaactgtgggtgaggaagcatgaatagcctcaggggaggctaattgcttccttaattagctgaacccgcgctggggagccctgcccggaaagtcccagttgctgggaaggatgggactggcttgcctggcggccaataaccgtttccgctggcggctgcccccgaggagactgtgcggcgtttccagcagaaacagcacgaggggaaagggccgggccaccgcggtgcccaggaagggatttaaagaggcaagctgaggtcctgcagccgccacgccctgcaccctgtaccgacagccctccgccggcacactcttggttctgcctgcaccggacccccccggaacccccactgccctatcccactgccgctcaagccctatcttgatcttgctaggcggtggcctcagggcagcccaggacccctagagggggaagaagggtcacggagaggaaatctcaggtgagggcgttcccatgtctaccaccaggtggcaccatcagcacaggccaaccctggggccgtcctgcgtggccaggaggggaagtgggtggcaccgttagtgggggacttggtggctctggcgtctgttgtctgagggcctcctggttctgtgctcgtctctttcagggacatggttgtgtcaagggcccgagcctcccagaaccttggcacatggtggacgtggaataaatgttgaaaattgtggccgggtatggtaggtcacacctgtaatcccagcactttgggagaccgaggcgggcagatcacttgaggccaggagttcgagaccagcctggccaacatggtaaaaccccgtctctactaaaaaatacaaacatagccgggtgtggtggtgggtgcctttaatcccagctgcttgggaggctgagacagg

SEQ ID NO: 104023 - DNA, 1044 bp, Homo sapiens
ttccctagaaccttcagagggagcacagccctgccaacaccttggtgttggacttctcgcctccagaactgggaggaaatcaatttctgttgccttaagccacccagtttatgttattttgttacagcagcctgggaaaaggaatatactgaataagaacccaagtgagcttattagaaagaatattgaggcctggcgcagtggctcacatctgtaatctcagcactttgggaggctgaggcgggtggattgtctcagtccaggagttcgagaccagcctgggcaacaaaaatacaaaaattggccgggtgtggtgatgcacacctgtaatcccagctactcgggaggctgaggcaagagaatcccttgaacctgggaggtggaggtggcagtgagccgagatcatgccattgcactccagcctgggcgacagagcaagactctgtctcaaaaaaaaagaatgttgaacctcctcaagaggaggtaagtgattttaaacactctgaagccacacagggacaagccttttacaagccaagaggagaaggaggaaaaattgaagtcacttttttttttttgagacatagtctcactcttgtcgcacaggctggcgtgcactggcgcaatctcggctcactgcagccaccacctctgaggttcaagcgattctcctgcctcagcctcctgagtagctgggattacaggcgcccacgacggcacccagctaatttttgtatttttagtagagatggggtttcaccgtcttggccaggctggtctcgaactcctgacctcaggtgatccacctgcctcagcctcccaaagtgctggtattacaggcataagccactgtgcccggccttgatttttcttttttaatggttaaaaaataccttcaaatgtacacacagtaaaattcacttcttttggtatatagttcaaatgcatagagtcctatcaccatgaccgcagtcaagatagggaacatcccgtcactcccagaactcctgtgctgccgctggcaaccactgctctgttctcccg

SEQ ID NO: 104024 - DNA, 1094 bp, Homo sapiens
cttatcttgctggacacgccgctctttctcctggaatcagatgtgagaagcgggctttcgtgcatgctgtcattagggaggacctgggccccgggcagcgctcccagccctgtctcctttggtggacactagggaagcacgaggaggcggcagagggtgggaaaggggagtcagggacccgctccccaacagatgacaggcttctgctgcttatacccctagcagtggtcaggacaaggggtgtgggggaccccttggaaactggatgtgtggctcgggatctgcagaatgccaggctgatcacgcagtggcaggcagtggaagagggcagcggccatgggtggaagatgttctagggcacacagctgggccggcacactgcactcacacccagtcgaatgcctttgcactgtgtccacattgcaccaccacacatgacagccctaaatgtgaactgaaggaacaaggactgacccctctgaccaccactacccataaccagtactgtctctgcgtctgagtcctggcctggtttacctgctgggtgacccctggcaagttactttgcctctctgggccttagttcccgcacgtgtaaaatgaggttgggctcaatgacctggccagctctgacatcctgtcattttcttgccaaggtctcagcctatcagttgtgacacaagtctcatcagtttcagttttcttgtccatagaatgaccacagatcggccagatgcggtggctcacgcctgtaatcccagcactttgggaggccgaggctggcggatcacctgaggtcaggatttcgagaccagcctgaccaacatggagaaatcccgtctctactgaaagtacaaaattagctgggcgtggtggcacatgcctgtcatcccagctacttgggaggccgaggcaggagaatcgcttgaacccaggaggcggaggttgcagtgagccgagattgcgccattgcactccagcctgggcaacaagagggaaactccgtctcccaaaaaaaaaaaaaaaaaaaaaaaaaagaatgacggcagatcccataaggataaggatcatgtccatctctgtcaccacatccc

SEQ ID NO: 104025 - DNA, 1061 bp, Homo sapiens
ggaggcctccaagtccctagggttagacacctcctggggtgctatggactgtcggggctccaaggagccgagtgtgggggaaactcactgtgggaggcgctcctgacctgcagggagctggaatgctgtgggagggccctgaccccggggcccatggagctccctaggctcctctggccacacctcaccacccaccccctcccctctccagcagttccagtttgtggaagtcccaggcaatcactgtgtccacatgagcgaaccccagcacgtggccagtatcatcagctccttcttacagtgcacacacatgctcccagcccagctgtagctctgggcctggaactatgaagacctagtgctcccagactcaacactgggactctgagttcctgagccccacaacaaggccagggatggtggggacaggcctcactagtcttgaggcccagcctaggatggtagtcaggggaaggagcgagattccaacttcaacatctgtgacctcaagggggagacagagtctgggttccagggctgctttctcctggctaataataaatatccagccagctggaggaaggaagggcaggctgggcccacctagcctttccctgctgcccaactggatggaaaataaaaggttcttgtattctcactgcttttgaggcttttttgttgccagcaagggcttttgcattgagggaaaaggaagcacagaacggattcatccagggtcctcaagggtgtggaggcaagaggtgggaaggacaagtcctcctctaggcacgcctgggtctccaggactgctgaagcacaagacccgaggggtggcctggtccttcactcctggcctgtgtggactctgatggggctgttggacgcgatggccttcaacctggggcccgttggccagagctcggcctctcagagaccgctgcaggccctgcctcacctcatgttcctcctggccctgcacctccagccatccactgcggctctcacggctcagtagggtcggaatttgcgctgggcccgcagcagctcgatcctctgcttgt

SEQ ID NO: 104026 - DNA, 1488 bp, Homo sapiens
ttcacagttagtactgcgggaggggtctggcgcctcctttctgggctccgggttggcaggacactctatggggacagtgtctgaatgtcacaagccaagtccatgctccctgagagcagcatgtggaggcctgggcaggaggaccatggggctgtgtctgggtccccagggagtcattagcctgagcccctggcacagagcggcacaggcatactgggcaggcagagcgagggcgcagcttgcagcccctgggatctccttagcgcctgtgccccgggccctgtgggaaaaggtcccaatttgcctggcaggccctggggtggggcccaaatgccaggcctgaggaagccccgtttccctggctcccttttcctcagaatggatcagtgactacgcagactctgtgcccgaccctgaggccctgagggtggaagtggacacgttcatggaggcatatgaccagaagatcgctgaggtagaggccccgcggggtcggccgagccccgcgtcgcccgtgtggctgtgggaaggtggcgccccagagggagggcggtggtgtcctgtccttggccactctgtagaggccaggctccctgtttccctgctggatcctgggctgcctggttgggtgacacatgtagtctccacatggtctacagtggagaaggaggcagcgccagcaggtccgtgccctccccgccctccttagccccaacactgtgctgggaggaggggagcagccctcccctgcgggggctcagggcagttctgactttgggaggagggcgtggagggcgcgctgctggaggctgcgggaggtcccaggcgcccaccggacgatgggatcaccttccttgcaggaagaagctaaggccaaggaggaggagggggtccctgacgaggagggctgggtgaaggtgacccgccggggccggcggcctgtgctcccccggactgaggcagccagcttgcgggtgctggagagggagagacggaagcgcagccaaaaagagctgctcaactacgcctggcagcatcgagagagcaagatggagcgtaagccaccccgagtccatcctcagacccctcggccttggccccagccacggatgaggcctgtggccagtgctcctgagggcgggcgctggacttggtggtcgaggagggagggcgtccctaagcacggggctcgcaccagactctgtggaaagaggcccagcctggcagcaccctgtgtggcggttccccatcaccccccaggggcagatgcatttgctcagtgggtggggaccctaggtcatcagtgcccacctctgggttcctgtgcacttagtgctggcgctcgtcagcctccagctaacgcgttcaagtgcagagggggcttctgaacccactgtgggtgcagagaaggtgctgcagagtatgtgtgttgggttggtggtgggtgtgtgtgtgtgtgtgtctgtcaggtggccccgcacaggaccc

SEQ ID NO: 104027 - DNA, 1040 bp, Homo sapiens
gtcccctgctggttgggagtgaagagaatccaggctggcagagctggagccagttggggagcacggttctgggagctctgcaaaatcagtagcaagtgctggaaaaggcacatgccgaagatactcaagagctcccaagatttgcttgaggctagcccagtgaaaaaaaccagagactcatgtttccaggggtcagtctgtcaggcaggaaggacccaggatttgaacccagcttcagtgtgcaggctctgaggctgcccaggacgggaaagtccaaggaaggggcctggtggtgctccacttgcagttctttaaagaatgctgctttttattctcctaaccctttcaagtgggtgcagacttctcgttagcagctggaagacattcctcccacacttttcccttcctggcccaagagagcatccagaaggcagtaggacctggtttttcaggtactgggagccgggggctcactgcttgcactgtgcttagggtagggatggtaaatatcctccctgcatggctttatcctccctctcatcccaaagcaggtatcttctggttgtcacagagtttcattgagtccagctgcagccacgtggccatctggagctggtgctataggtgaccatctggtacattgaggggacctgtttgcctcctccactctataagcagtcatcttgggagaccgggaggagaaggtggtgggctagtcctgtgtcctcctccacttcccatgcctctatgttacccatctgtgtctcctgtgcagaaggagaggaaggggcattaagagatgaagggtgattatgtattacttatccatttctgaataaacatttgttattcctacctttgagttatcttttttttttttttttttttttttttgagacaaagtctcactctgttgccaaggctggagtgcagtggcactatctcagctcactgcaacctccgcagccagactcaagtaatcctcccacctcagcctcccaattagctgggactgcaggcgtgcatcaccatgtctggct

SEQ ID NO: 104028 - DNA, 1004 bp, Homo sapiens
agtgcctagctcatgacagatgcccagtaaatggtgggtcccctccccatctaaggaaaaactgacaagaatttttgactcttctctgctctccacaggcggctgagtgacagcccatcaatgaaaaaggagagcgagctgcctcgcagggtgaactctgcctcctcctccaacccccctgccgaagtggaccctgacaccatcctgaaggcactcttcaagtcctcaggggcctctgtgaccacgcagcccacagaattcaaaatcaagctttgagcaggggagtgaggcagccagaagtgggggcagaggagggtggctctgtttccccaaggcaaagcttatgaccaatgggccatcggactggagacccctgattgtgggaagggttgccagggataaagagcttcctcactggatgggacccgcctttctgtgttgtgttctgccctgtgctcttctctctacgttaacgtttcctgtagtatgtttcttcatctcatcgccaaggtaggcttgtgtttttcagtgtgtgcctccccgagcctcagccccaagctgatttcttatctggaaatggtacactgaattctctgggtggctttcttgtggccccatgggatgcagcgtgggggctgtctgaaggaccctgctttttccaggggccgaggggctgcctttcctttgtgtgtattaagcttttcaaacaatggaggggatggagagccctggtgtcctgacgggagccaggtcggcctgagagctgtgccgctcctctgtcttgtcagtggaggtgcctgggtggggagcaggtctcaggcctcttgtcctctccccagtggctccaggcctcactagtggcaagggcaggatgaggctgcaccgctgggaagagtctatctaagctcttggcttggagtcccgtgtcgtctccacccagaggaagttctccagagttcacctttcccttttccttgagttgtgctgaatgccccaccccagct

SEQ ID NO: 104029 - DNA, 1327 bp, Homo sapiens
ctcagattcttttctgtctcttcgtttaggctgggctaagcagttccaagctttccatgtccaaggccctccctctcaccaaagtggttcagaatgatgcatacacagctcctgctctcccttcctctattcgaacaaaagccttgaccaacatgtcccggacactggtgaacaaggaagaaccccccaaagagctgccagctgctgaggtgaggtgatggtggtgactgcagcagttggggtcaggagggctgtatgcttatatgtacctcattgtgttccccacaacgcctttgtgaggtgggcattgccacccccattctacagatgagcaaaccaagacctagggactcttaccctcaaagaccttgcaggctagtggggacggcagacctgctgagagattgcggtatctggtgatatgttagactctctcagaagaaagctattaggagggctgaggacagattatctcattccagttgggaagtctgggaaaaagggctcttttagctgagtgggtctggaagcatgagtagccttccaggtagaggctcagggcctgagaggcttgcgtatttgggagatgggagagggtccatgcttttagcatagagtgatggggggtgtagtggacactgaagttcagggggcccatttgtggtaactctccatggagctttcctctgggccttcctagtcacgtgcctggaggaatttctgttgtgggaatgcttatcagccatctggcttctggtaatgctcttgtctgtgtggcagcctgttctcagcccattggaaggcaccaagatgactgtgaataatctgcaccctcgagtcactgaggaggacattgttgtaagtactgtgacctaccaaacatttaaatctcaaactgcctctgtggcaaaggtctcttaagacccaccctcaggtttgatgactgctaggactcaccagactcagcatatagtcacgctcagggctgagactaatgacagcaaaaggatgcagagcaaatggctcatggggtgaagtcggggggaaacgaggcacaagcctccagaggcccctcccagcagagtcgcacaggatgctgggtgcaactcgcagcaagttgtgacaatacatgtgacaccagggaagctcattaaagactcagtacccaaaggttttactgggggctggtcacttcggcattctctgtgtagcatgtactaaaattccagactcccagagggaaagcagctgttgagcagaaaccatgttgtttgcacagtccaggcacagtgaactgtggggtggcaggagccctcctgagatccga

SEQ ID NO: 104030 - DNA, 1044 bp, Homo sapiens
tgaaatcccgtctctactaaaaataaaaaattagctgggcatgatggcgcgtgcctgtaatcccagctgctcgggaggctgaggcaggagaattgtttgaaccccgaggtggaggttgcagtgagccaagattgcgccactgcactccagcctgggtgacagggcgagactccgtctcaaaaaaaaaaaaaaaaaagaggtcgtgaagctgaatgatgccagtttgtttctttacaaagggaccaggcctttccagtaattagactgctcaagtctgctatcaagggaactatcagcttgctcagtgagtctctatccctatttgataccctaattgaataaatgccatatttatactcatgcgtcttgtaccctgtgagatgggtactgttgattaccctcgttgatggatgagggacaggcatggagaggtgaaataagcctgttcaacatcacccagctgatgagaagcagtggatctaggaatggagcccgagcagtctcgctctcagggccctgtgtggagtcactgtgctgtcccagctctggagacgcagaattccacatgaggaatgtggaattcagcatggggatgacgctgcttcacccagacttggaggagcgtggtgaattgcccgtgcccatgctctgatgtgcctctctggccgctgcgttcctcctttctccctgccctgggtcagtgcctgtaaacactgccctaaatcagcagggcccccgtcacttctgctttatgcacctttttcctcagacacattaatacaggggagttttgtttccaagggaccacatccagatggaggggctgtttttggtgatctgcactgccaaatgcccgagtgtccctgacagtcggagctgatgaggccaaggctgtgtgtggttcctctggatggccagaagaggaaccaaaacactgaattctgggccttcttaagagtggtgatcagcacattgtgatagaagcatatctgggaatgaacttggcctcaagcttttggccttttaatttttttttttgtaagc

SEQ ID NO: 104031 - DNA, 1157 bp, Homo sapiens
ccgccctcctcggcctcccaaagtgctgggatgacaggcttgagccactgagcccagccatggttatattcttatccaattttgtatcattcttttttcactttgtaactcaagcatttctctgtgacatttcatatttactgtacatgttttagtaactgcaaaatctatatagttggcattccagttttatttaaaccattttcctgtcattttcactgttagaaatccttctgctgtgaacatctttgtaaataaagctctttctagggtttggatttatttctgtaggtcatattaacaaggatggactttccaagccaaaggatataaagaaacattttagggactcttggtacatactgcccactgggaaaaagggacttctgatgtatctggaagttgtaggactttcactgggtccttgctgacagggagttagcctgtgaagacttgggccccagtctttccaggcaccgtcacccctgtgcccacttctccttggtccctttgtttctccagcagccatttccttgccatgcctgttctagatgtctgttgagggcccagatgccacatttgcttatatttctttatgttatattctcagaatttatatgacctggatgaagatgatgatggtatagcttccgttcctactaaacagatgaagtttgcagcctcaggcggctttctccaccacatggtatggcatttcatgttttcttacactgcgtgtctgatcaggcaggtgggagaggtcgtgttgaatagaacctgttgttttttttgttttgagacgacatctcgctcttctcccccaggctgctggagtgcaatggcgcaatcttggctcactgcaacctccgtctcctgggttcaagctattatcctgcctcagcctccctagtagctgggattacaggcgcctgccgccacgcccagctaatttttgtatttttagtagagatgaggtttcaccatgttggccaggctggtctcaaactcctgacctcaggtgatccgcacgcctcggcctcccaaggtgctgggattacaggcgtaagccactgcgcccggcgtgaatagagcctttcaatgcagaaatatttctttgtttgggccgtaagattttcagagctggaactagtccattc

SEQ ID NO: 104032 - DNA, 1741 bp, Homo sapiens
ttggaggtgtccgatctcgagttgggatccagcaaggccttctcagccagtcaacacgcacagccaccttccagcagagatttgatgcccggcagaagattggcctctcagatgcccggctcaaactgggagtcaaggatgcccgggagaagcttttgcagaaagatgcccgatttcgaatcaaagggaaagtgcaggatgccagagagatgttgaactctcgcaagcagcagaccacggtgccccagaagccccgccaggttgctgatgcccgggagaagatcagcttgaagaggagttcccctgctgccttcataaacccacccattgggacagtgacccctgctctgaagctcaccaaaaccatccaggtgagttgtggcttttgtcatgaattcccagaaagctagtaacaaaggtagatttagaggcaaggtgccaggagtgactgggcaaaaatactatcctctcaagtgttggcataatacagactttgctccttacagaggctttaagtacgttatagccaaggaactatacaaggaaggaaaggtattatctcagttctaaaaaaaaagaaaaaggaggcccatagaaatttggtgactttcccaggtgagatactggtggaagaaagagagaggaaaggacaaaagatttattgagcacatgctatgtggcaggcccttaatatctgtgaccttacagtcctcactccacccccaggcccagtgggatttggcccctagtccaaggccctggccacccttcacagctgccaccacagagggaaaggaaacaatgtcatttaaccttcatagcagctttggtaataggaacagcagcggccacagcaaacatttactgagccaagtccattaagccctacatgtgcgttaccggcatggtctctggattgatgattcttctgttacttcctactgtggaggataaggccctctgtagtgccttttaccaaagaccaaagctgcatgcccaccatgtatcaagttcagtaacccccttcttctagagaatgcatgtggaccctgtggggtggattctgaccactgagtgtttccaggttccacagcagaaagccatggcaccacttcatccccatcctgccggaatgagaatcaatgttgtcaataaccaccaggccaaacaggtagagtgagtgagtgagagagagagagagaatctgtgtgtacatagcgaacatgtaggtgtgcacgtgttttgatgaggcctacttgggtggatggactgaggcttgctcagttggtagttcccagttggtagtattggaggcagggttacagcgaactttttgcaatttgagtttaaagaagaaattttttttatttttttattttttgagacggagtctcgctctgtcgctaggctggagtgcagtggcgtaatctcggctcactgcaacctctgcctcccgggttcaagtgattctcctgcctcagcctcctgagtatctgggactacaggcgcgtaccaccacacccagctaatttttgtatttttagtagagatggggtttcaccatgttggctaggatggtctcaatttcttgaccttgtgatccccccgcctcagcctcccaaagtgctgggattacaggcgtgagccaccacacccagccaagaagaaacttcttaatagaggaagggaggcatagggggcagagaggctaaaaaaagttttgtttgttttttttaatttt

SEQ ID NO: 104033 - DNA, 2064 bp, Homo sapiens
tttgtattttctgtagagacaaggtctcgccatgttgcccaggctggtttcgaactcctggactcaagcagtcctcctgcctctgcctcacaaagtgctggggttacaggtgtgagccactgtgcccagcagtttcttcctttagatatgagggcatccccagttaagtcagttgacatgtccgcttttgttagttcgatgagtttaaccctcagcggatagctttctgtcagctgcctccaagcagttcagtgtggcagccttgaatgtgctggaggctggagttgagcagctctctgggccagacgcctcatctggggagtccttggagctggaagtgggaggttgttgggggacagggtggattgtaaactttgcagttcagcccaggactctggtcctggtactgactgcttgtttccttgttgaaataagataaaggaaataaagacctaaacacaaaagggaggaaatgagttattacataactctagggaacgaattatgttttaaaatgaaacatctgcacaagactcttgggtaaggggatagtattttattttatttatttatttttgagacagagttttgctcttgctgcccaggctggagtgcaatggcgcgatctcagctcaccgaaacctccacctcctggattcaaacgattctcctgcctcagcctcctgagtagctgggactacaggcatgggccactacgcccggctaattttttgtatttttagtagagacagggtttcaccatgttggccaggctggtctcaaactcctgacctcaagtgatccgcccatctcagcctcccaaagtgcttgggattacaggcgtgagccacctcgcccagcaggggatagtattttagtgtcttgtttttctttgtgtctcttaaacacctaattcagagttgaccctcagtcatagttagaattaagctgttttctctctataaaaatgacctaaacacacacctaaacgaacaccccctaacccagaagctttttttgtttgtttttataagacggaatcttgctctgtcacccaggctggagtgcagtggtgcgatcttggctcatggcaacctctgcctcccataacccagaggattttaaacccatgggttaaaatctgctttataataatccagggccccacttcatgggcctgaatcttttggactggacatctgtccagaatgggctgtagccctgccctccccagacagagccaggagggtgaaatattcctatagcccagacagaccctccctggtcatcacacctatgccaggttcccgtagggggtatagaggagagaatttggggtccagggaacgtttgccttctcacctgccagcagcgctcttgccaggacctcgcggaatacctggtgaagccctggaagcagttgcagagctgtagtttcggtgcgatggaggtggggcattacgagactcagtcaaaaccttcctccttcgccctcccaaacatttactgaggataaaagtgcaggatgtgttttgggaacgtcagtagtcactgcagtggggagtaaggctgcagccataagctggagccagagccgaggcccccccaggggttgggctttgtaaaggagcccccagcagttctagaagcgggagggtaacataattgagtctgtgttttagagacctacccctggcaggagtgttgatttgaaaaatttccgatgactaatgcctgcctgaaaccagtactgctgcctgctgggatgaatagctgtcttttcatgcaggaagagcagctgtgattataaaaagcctgaacactgaagccccctcaagctgttcacgaaagaagttgaaagcactggtggaaccagggaactgagtgcatcagattgagggaaatagcttactccctcccaccgtgaggagctcctactacatcctcaactaccgttaactcccacccctaaatgtgccttttaggctgttcaaatagataaaaatgccagcacaaagcatcttggtggtccttcctgccaggcaggcattgtggtatgcgagt

SEQ ID NO: 104034 - DNA, 1018 bp, Homo sapiens
cttgagggcgacctttacccgctcaaaaattcgtctcacattagcagtgaggattcgggcgtcaccccgaatcgttattttccttactcataagtttaaggcataaggacgtttttagtttatttcctaggtaatgaattctattctcattaggcgtatgatgactatcgtagttgactgttgaggtcatgatccagttccattgaagtttgtctcacttgttaataatgtattttgttgcttttcatttaattttttccctcgaggaaaataaataattcataatgtgccgaacttccgtatgcagatgagcagccagcaccgcgaaggctcacggggaacgtccccgccccttccggttcttgcctgctttgagctggctgtcgcgagagttggtccgcggacgccggaagtagttcgtcgctccctagcggccgaaggggcgggctcgcggggtctcgactgctttcggcttgctcggcggagcaagatggcggacatctccctggacgaactcatcaggaagcgcggggcggcggcgaaaggacggtgagaggcctttcctttcttcggggtttagggtcctcggcctagtggagctcgaggcgggggaggtagcgatccgggagcgacgcggaggaccgggtgcgcccgcccccgaccacagccgcgctcctcattggccggctgccgccgtccccgccgtggccccgaccgcccgcccactggccgaggcgcagtccctctggcggccctgggaggccgacggggccgcggcggggacagggtgccgcctcgtggacctgaggggctgccccctggggcccccgcgttccggggtcctggggtctcggcggcgcagcctccttgcctgtgtggactggcatttgggccccgctccgtgatctcggcgctgcctggtctccacccatcttagagttgagacaaccgaagtttagtagcggggaagtgacttgctccgaccgccgaagctgaggcgcaagcccaaatccccctg

SEQ ID NO: 104035 - DNA, 1147 bp, Homo sapiens
tccactaggccgaggaccctaaaccccgaagaaaggaaaggcctctcaccgtcctttcgccgccgccccgcgcttcctgatgagttcgtccagggagatgtccgccatcttgctccgccgagcaagccgaaagcagtcgagaccccgcgagcccgccccttcggccgctagggagcgacgaactacttccggcgtccgcggaccaactctcgcgacagccagctcaaagcaggcaagaaccggaaggggcggggacgttccccgtgagccttcgcggtgctggctgctcatctgcatacggaagttcggcacattatgaattatttattttcctcgagggaaaaaattaaatgaaaagcaacaaaatacattattaacaagtgagacaaacttcaatggaactggatcatgacctcaacagtcaactacgatagtcatcatacgcctaatgagaatagaattcattacctaggaaataaactaaaaacgtccttatgccttaaacttatgagtaaggaaaataacgattcggggtgacgcccgaatcctcactgctaatgtgagacgaatttttgagcgggtaaaggtcgccctcaaggtgacccgcctactttgcgggatgcctgggagttgcgatctgcccgaccttattcacgcctaaaaagtagactgactgtggggtggtcgtgttttttgtttcttgttggtaggtggtgaatgcgtttttttcgttgttttctccgttactcaggctgccagttgcttggcagtcttgtcgctggctgtggacgctctgcacttcatcaccgtccccagctgcgctttgagccggtctaaggttgcccacagtattgacgttgggacccacgaaactggcaatttccatgtgtgcggccttacccagttctcccaaacttctgcgtataaccgcttctctgtgcttcagaaagataagtccggccccggcctcacacagcagctcagttcgtgacagcgtttaatatgtaaaatggagcaaataatttatagggcgttgggagagttaaagagactaattcatttacgtgttaaatacagggaatggcttttgcattgatataaccccagcctccagcatgcgccagacctgacgtaggtgttcggcaca

SEQ ID NO: 104036 - DNA, 1518 bp, Homo sapiens
ggcagttagagactgtcaccctgagcagcctggggcagagcaccagcctggggacctctggatcctggaaggtacatctcagtcgtgtccctgcctcattgtgtgatcttgagcaactcaactctgggtcctctgggcctcagttgccacatctgtaaaatgggattcatattccccgccctgtccacccactgggttgttccaagggacaccccggaggccaaatggaagcaaaaggctttgcaaactgtaaagtgcagtcaggggaaccatgatgggctttgtacactggtttcaggctgcagggcctgaggccataggcttgagtcagggttgggggcagggggtcctggtgacagtttgctgggatcagcctctccattcttcagcatttaaggaattcaccgcctagggttggtcggtcagcaggttggtgaccacacagccacacgtcagcttacctggtctctcaccccacagcctgggactacggccagggcttcgtgaatgaggagatgatccgggaccaccttccacccccagaggaggagccgctggtgctgatgtgtggccccccacccatgatccagtacgcctgccttcccaacctggaccacgtgggccaccccacggagcgctgcttcgtcttctgagggccgggcacggtcacacggccacccgccccgcgcaccccacgccctgttcacgctcacccagtcacctccccacatcgcacactggggccccgggttcagcctggcctgcccgtgccctggtgaatcacctggctgagcagttcccctggagccccttcgggagcagggctgtgtcccagatgggccacggctgagccttcagagtacgtcctgcctggcacttactggtccttaccagagacgcccagccccatccctgtcctcatgacccctcgtccaccccccacacacactataaggctgagggctgccagcagccccgtctgcccaccattcccggccgtggaccatagtcgggatgtcagcagacacacatgggcagcccaaagctgcaggtgccagggcccaccccagcctcgcctgtcacccccactcccgcctcagggccaggcccaggcctcaccacctgacgctgcatgagacattgacaccagaaagccctcttgggggcactgctccctaccccagggccctggccagccgggagcttggctctcctctggctagagtgggaagagggggctggccatggggccctcccagaacctcagcatttccttccagcccatccaaacactgaggcagccttggggaaccccgagctggggggttggcagcccactgcaccgcctcagggttttggggtcctgggctggggccaccatccctgatggcagaactcccacaaccacatgtatttattcctctgtcctaaaccgtcccctccttccctcacccccagcacagggggattctgagcagtgcctcttgtctgagggacatatcagtgacctcgacgttg

SEQ ID NO: 104037 - DNA, 1049 bp, Homo sapiens
gagtgagggaggtttttagcgacagcacaaaacggaagggactgagtgtccaccaggaggagtgtggcttagtgggcctcccagagccttgactttgctgacgggttcagtgtctcccgttgggagggggccccagagacagttggtgaaatgtgagtgcatccagccctggagttggtcggccttgtacacgaggctggtggtttgctttccccggatatgtcaggtggaggctgactcctgggaggacggggtgaaggacggggtgcaggacaggtaggatttgacggctgggtggatggggctccacgggagaaggccatgtgtgggcctcagaagaagctgcagaagaggcacttgtctcccactgtgggcaagagctcgcccctgagacctggagctggggactgagggctgcgggggtgtcttgcaggtttacttcaaggacacccatcccaagtttcccgctggagggaagatgtctcagtacctggagagcatgcagattggagacaccattgagttccggggccccagtgggctgctggtctaccagggcaaaggtgattcgggtcggaatcccttggttacacggcaggctcagagaattggagagcttgggcgtgctgggtgcagggtgcaggcccctggctctgtgtggatgggtgactctcgtcaggccagctgtccctctctgggaactgagtctccctggctgtagagggggtaagttgctggcacaggggttgcagacaggccactcctgggggccacgtctcacccactgccagcctctatttggctttctcagcatctgaaacaagcaagcaagaggacagagctgagcctccgggttcccagcctctccactgctcctgcaccttcctcatggctcgcgttagaatggcagctgcctctacctcggacctcacagtgggggcaggttctccagccccctctccagcctctccagccaccacacatggcatgtttgatggccgggcctcaccccttctctctccccagggaagttcgccatccgacctgac

SEQ ID NO: 104038 - DNA, 1092 bp, Homo sapiens
ctccctctcctggccatgctgggtactggggaccccacagggagtgcaccctcaggacgctgggtttggttccagctccgactggaactgattatgtgatcgtccctggcctgagcgtaagacccacttaacaagacctcaggggttttagtctcagctccttccctggcccaatctggctcttagccagcccccctcctcctctgccactgtcccagccactgaccatgccctgggtgcccaccctgtgcagggtggaagcctggctttgggctcttggagttcctgggcagggaaggctcccactttctgccctgtgaagcccacctcagtcctggctgccccatttcccaaggggctctcaggtgcagtggcttctgcagcccctctcttgggatgcaggcctgggcacgtgcagccttgtctagctctgccccagtttgcccatccagccctcaagttcttcctgccccttcaggccactgcttgagctgatggcagagatggattcctccctccccgtcctgtctggcatcctccctttgggaccctgggttcattccctgttctggccaccttgtttgtggcccctctaggccagcaggacagacacacccagcgtgcgcctggcctcagcacctcacacgcagcgtgcatgtgtgtgcatctgtgcttggcgtcggcgtcacgtcttacaaggacaagcaggcactggggaagggtggggacacaaaggaggaatgggatgggggctccgaggcctgggagccgccctgggaggcctctgccctggggaccgttcagcagctttgggcctctctccagatcatcagccatgacacccggcgcttccgctttgccctgccgtcaccccagcacatcctgggcctccctgtcggtgagtcacgcccctgctgggcccattcggagcccggcaggctgctggggcactagatcagagagatggaagctttacatttccaccagggagagcagggaagccttcaggaggaggtgacagctgccctgggcctttgagggcgagtctgttggaatgagagtgggaaggcccagagtccctggcagtggcac

SEQ ID NO: 104039 - DNA, 1052 bp, Homo sapiens
aagaccagggaagttgactgaaggaagcaagagaaggaaggagcacaaatacattatgctcaagattaattttactctgagcttcctagtagccaaagtgaaaaaggatatgtgcttagacccacagctctttttggtcctggctcttcagaggaaatggagctttttctcatggtactgagcatagaagcccaggtaatgctcagtgacaggtgtcatgaggctggtctttatagcttctcctagtgggcaccaaaatggatgatgaagctttctggatgagggtggtggggagagggtgctcctggcagagggggcagcgtgagcagaggcctggtagtgtggacaagccggtgtgtttggggaaaggcaggctcctgcactgaccccgcgggtcctgtcgtttcagttgggccatatggtgctcttcccagtctggttcctgtacagtctgctcatgaagctgttccagcgctccacgccagccatcaccctcgagagcccggacatcaagtacccgctgcggctcatcgaccgggaggtgagtgccggccgccgccgctgcctcgtcagcatcacagcattgcccagcacctactctgtgctcagggcatggtcctgctctgaagtagatactgttgtccacccattttacagatggagaaagcaaggtgatgtctcttgctaaggccaccaggaagtagcagaggaatttaaaccctggtctctctgtccacagagccccttctctgaaccacactcactgcctcatgcaaggtcagaatggaaggaacccctcagaacttttaggttcaatcccccatttatggggtaggaatgcagggggtgagagatttgaagataaggtctcctccctcctccccctcccccagagtcattccccacagcctggtactactggacctggacacctttcacatctgtgcagattccctgggtgctctgagctgtgtgggcttcctctgccctgtttgattcttactttctttcattagtgagttcatacttttttttttttgagacagagtctt

SEQ ID NO: 104040 - DNA, 1048 bp, Homo sapiens
ctgaggtcaggagttggagaccagcctggacaacatggaaaaaccgcgtctctaccaaaaatacaaaaattagccaggtatggtagcgggcgtctgcaatcccagctactcaggatgctgaggcatgagaatcacttgaacccaggaggcagaggttgcagtgagccgagatcatgccactggactccagcctgggtgacaagagccaagactccatctcaaaaaaaaaaaattgaataaggcttgtggattagataatagtgttgtaccaatgttactttcctgtaattattctgtggttacgcaaaggaatgtccttgttcttaggagatacacactgaaatatttaggggcaaaggggcaacttactcttaaatggttcaaaatatagacacagttgacccttgaacatgggttggaactgcttgattcacttttttttttttttggaatttctgacaaatcttattttattcagatagcagtctgatcacacctggtccaacaacactcaaataataaatcaaatataatcagatgttaagactggtcttcaaacattctagccaatgatgccacgcttgcctgtgatctctctgacataaaaccacgtcgacacctcagtggccaccaaaccgttcagcaaagcttccttaactgtgagctgtttgaagctaccagtctgagcactactgactatttttttcaggctctgaatagctctagggatctcagcaggggtgggaggaaccagctcaaccgtggtgtagtaccaaaatgcggccaatcgaggcttcaagtaagtcacagcagcattcaccagtgctggggtcttctccacaaggttacggacaaatggagccatggttctgggatggaaagtccatcatcccgaatggccagctgaaggtcaccccccggaaggaccctgcgtggttcacttatttatttatttatttatttatttatttatttatttatttatttgagatggagtctcactctatcacccaggctggagtacagtggtgtgatcttggctaactgt

SEQ ID NO: 104041 - DNA, 1018 bp, Homo sapiens
aggccgaggtgggtggatcatgaggtcaggagttcaagaccagcctggccaacatggcgaaacattgtctctactaaaagtacaaaaattagccagacgtggtggtgctcacctgtaatcccagctactcgggaggctgaggcaggaaaatcacttgaacccgggaggcggaggtcacagttagccaagatcacaccactgtactccagcctgggtgatagagtgagactccatctcaaataaataaataaataaataaataaataaataaataaataaataagtgaaccacgcagggtccttccggggggtgaccttcagctggccattcgggatgatggactttccatcccagaaccatggctccatttgtccgtaaccttgtggagaagaccccagcactggtgaatgctgctgtgacttacttgaagcctcgattggccgcattttggtactacaccacggttgagctggttcctcccacccctgctgagatccctagagctattcagagcctgaaaaaaatagtcagtagtgctcagactggtagcttcaaacagctcacagttaaggaagctttgctgaacggtttggtggccactgaggtgtcgacgtggttttatgtcagagagatcacaggcaagcgtggcatcattggctagaatgtttgaagaccagtcttaacatctgattatatttgatttattatttgagtgttgttggaccaggtgtgatcagactgctatctgaataaaataagatttgtcagaaattccaaaaaaaaaaaaaagtgaatcaagcagttccaacccatgttcaagggtcaactgtgtctatattttgaaccatttaagagtaagttgcccctttgcccctaaatatttcagtgtgtatctcctaagaacaaggacattcctttgcgtaaccacagaataattacaggaaagtaacattggtacaacactattatctaatccacaagccttattcaattttttttttttgagatggagtcttg

SEQ ID NO: 104042 - DNA, 1062 bp, Homo sapiens
cagggctgacacatggtgccatagccagcggagggcgctcagtgagtgccccgggccttctagacaacaggcaggaaggatgaacctcagggcacccccaggtggtgcggaaagccaggcagttgggacagaggtgcccacgagggcagaggccggtgctaaggggatggggaagaagggacaagattcccagagaggagaggaggctgttggtaggaaagtggcagggctgggggagacccagccccaagggtccggggcggaggatgctttgttcttttctggttttggttcctctttcgcggggggtgggggaggtcaacagggactgagtggggcagaggcccagaagtgccagcctggggagccgtttgggggcagccccttctgcccaccccatccttcttcctctccagagatgccaggggggcgtgtatgctctgccccttccctcagacaggggctgggtggggaggctctttaggctcaggagaagcattttaaagaaacccccaccctgccgcccgcattataaacacaggagaataatcaatagaataaaagtgaccgactgtcacttcgggccttgtgattggtgaagtgtgttcaggctcacagcctcctccgctccattcttctgacggggaatccactgggtggactggtggtgactttgccaaggtctcacaacctgcccagcacggaagggctcgggacctggctcatagccccagtgtccctggtgatggagagcccccgcagtggggaatggggggagcctgtttttccctcctcctttttcaaggctcacaaacacggaaggttgggtcccaccagcacaactccccccatgacaagcctgaatctgtttaacataaatgggaccaaatgtggacactgaggagcccaccgccggagcagggctgagctgccacccatccagggagaggtcccagtgagggagctgtgagggcctgtggctgaaatcccgggagggacctgaagtgccttgtgggcggctccaggactgggccataggaatatctgctccccgcagggcga

SEQ ID NO: 104043 - DNA, 1046 bp, Homo sapiens
atcatcggcttcaagttcacgtttttcgtctccatcatgatctactggcacgttgtgggagagcccaaggagaaagggcagctctataacctgccagcagagatcccctgccccaccttgacaccccccaccccaccctcccacggccccactccaggcaacatcttcttcctggagacttcagaccggaccaaccccaacttcctgttcatgtgctcggtggagtcggccgccagaactcaccccgaatcccacgtgctggtcctgatgaaagggcttccgggtggcaacgcctctctgccccggcacctgggcatctcacttctgagctgcttcccgaatgtccagatgctcccgctggacctgcgggagctgttccgggacacacccctggccgactggtacgcggccgtgcaggggcgctgggagccctacctgctgcccgtgctctccgacgcctccaggatcgcactcatgtggaagttcggcggcatctacctggacacggacttcattgttctcaagaacctgcggaacctgaccaacgtgctgggcacccagtcccgctacgtcctcaacggcgcgttcctggccttcgagcgccggcacgagttcatggcgctgtgcatgcgggacttcgtggaccactacaacggctggatctggggtcaccagggcccgcagctgctcacgcgggtcttcaagaagtggtgttccatccgcagcctggccgagagccgcgcctgccgcggcgtcaccaccctgccccctgaggccttctaccccatcccctggcaggactggaagaagtactttgaggacatcaaccccgaggagctgccgcggctgctcagtgccacctatgctgtccacgtgtggaacaagaagagccagggcacgcggttcgaggccacgtccagggcactgctggcccagctgcatgcccgctactgccccacgacgcacgaggccatgaaaatgtacttgtgaggggcccgccaggtcacctccccaacctgctcctgatggggcactgggccgccctt

SEQ ID NO: 104044 - DNA, 1192 bp, Homo sapiens
gccaccatgcccggctaattttgtatttttagtagagacagggtttctccatgttggtcaggctgttctcgaattcccgacctcaagtgatctgcccaccttggcctcccaaagtgctgggattacaggcgtgagctaccgcgcctggcttttttttttttttttttgagatagagtctggctctgtcacccacgctggagtgcagtggcacaacttggctcactgcaacctccgcctccctggttcaagcgattctcctgcctcagtcacctgagtagctgggattacaggcgcacaccaccgcgcctggctaatttttgtatttttagtagagacgaggtttcaccatgttggccaggctggtctcgaactcctgatctcaagtgagccaccacgcctggcctctttgtctgtttctaaatgatgcccccaccagactgagaactcctttagggaaaggctgtgtctgattctccccttctcctgggtaccagtgcagggcctgcccctattccctgagtgtcccctgagaggtggagcgagtgaatgaatcagtgaacacatgagccccaggcctgacctgcctgtgtggccagggggacgaggcctctgagagccagcgacctgtttcactctcttcttgccatcttttgcagatggatttgcagccgctgcaagtgtgtggaagggccgtgttcgtgttggcaaagaaggtcggctgctgagccagggcgtgtctcccggaggcctgtgggctgccaggatccccacctctctgcaatgggctgcccaggctggtcagttaccagccagtgacatcagcgaggttccctgctctctaccctgggaagggcccagcctaagttaccaagccccaggctcccagtaccaccctcagcctatgtggattgccaccccaccttctgcctgtccttgggaggggaccgactcttagctccccttagcaatcaggttgcacccagtcccttgactttatgcccaggtttcctggcacctaaagtagaaacgatgcaactgcccctcgggcttgctgagggtcaaagggggtgtgactttgtcatggagcgtagaagtcagagtcgatggtgatcccgctggctgttaacatcgatacagttcaggtcagcatgcaccaagttcctccaacacaccaggtacattggctagcca

SEQ ID NO: 104045 - DNA, 1014 bp, Homo sapiens
ccacctcagcctcccaaagtgccgggattacaggcgtgagccaccgcgcccggccatgccctgcacctctcctctctcctcacttcctgcctaagatgagtcatggggaatcctggcgatgggagccatggaagggcttagagcaggggagtggccacagtaacaggctaactgggagtagctccctggtgacagggcgggaagtagtgagcctggaggcaggggcaggcagcaggggtgtgccaagcccagctgacaaggtccaggacataggctgcaactgcgaggcccgtctcgggggccaggagcatgctttgggcctgaggtcacctggatattgggctgcggccaacttggccccatacacagtttctattcctgggtcttgggctctgacaccaaatatggcgtggcctgagtctggcacccccaactgtggtccgacgacatatcctgctcctccaagtgggcccggaccccgcccacaccatggagtcagatcatgccagcactcggggcccccaagtgggcagaggctcctgctgctgctactggccctccaactgtccacccgtccgcgtggttcacatggggttaaaagtactcaggaccaaaatagcccctctccctgcagaagaaagacaggggcagggggcaccatgtcttggttcacaccacagccctgtccttgctacccgcatcccagggagctcacccggcctctgccccccacctttcgcactggcccacttggtcacacagcgatctacacactcattggttcactcttactggtcactcactcgttcactcattcattcatttactgatcattcattaattcactcattggttaactcatggaatcactgcctatttattgaccacatactaagagctggacaccgttctaccatttcagagctgaacaaaacacaaaacatacctatcctcatggggttatgttctagacagacaaccaaagcaaataagtaggatgtaccgtgtgttaga

SEQ ID NO: 104046 - DNA, 1003 bp, Homo sapiens
cccccttcccttccagaccagtgtccacataccctcccctgtgcccacacaccttcccctgtgcccgcactgtcacccaccacaagcctactccagcaggagcaccacagccttctgcggtcacgctgtgcagtcagctggcagacagggagccaggtggaccagcacatgagagcgaaacaggaagagtgtctgtcttcacctgtttgaaagtcattgtcccagatatagttacgggacccagagagccctgatcatctgtgaccatcatttgctccttccccttcaggtgggggtaggcctctacccattaagccagacactgttacctgaccttaccagaccctctcagccaccatgctctgttattcccattttacagacaaggagactgagtctcagagtcaagcacctcctcttggccacagtgagattgagcccctagccctggtgcagccccaggcaaatgaggctgggccacaggtagacagacccctttcccccagcaaagggtgtttgaaccccgctctgccgctgcccagcaggccttggtttcctctacacttacactgtagttaatcataagaggacctgccacacaggatggtgagggattgaacaagtcaaagcaggaaaccactttgaccaacggctgcacatggtcagtgctcagaaaatacacgccattgttactattaaaccacacagctccaggcctgacagtgagcttttaataaatgttaactcaacactggagaagccttctcaccccgtcagcagtgcaaacagaaacaacagtgagatcacatttgccactcaccccagtggtggagaggatggtcatgcaccccactcgccctcctatgccctgggagagcctgtggtgaggcaagtgtgccctgagcctggagtaggagtgggagagagcaggttagggctccatatctgaagatttaaattatatttctgaggccgggcgcagtggttcatgcctgtaatccca

SEQ ID NO: 104047 - DNA, 1129 bp, Homo sapiens
ctcctccgtccgggggaagcctgggcgtcgggcggtgctcgccccggagcggatgcgaccggggacggggatggagagcggccggcaggagggggctctgccgggctggcagcgtcggcgccggccttagggagggtgaggatttggacctgcccagaagcgggaagggccctccccgtgcgggaaacggcctgggtacgagctgggcacggggcgagccggttggagtcgcccggcctccgcgctcgcctcggatccgcaggcgcccctccctcctctccagctggggaaggttgaggactgagcgggagcggaactgggcttgggagaggatctgccggggcacctggtcccagcgcccatcccgtttcactgccagggcgagtccccttccctcagtttcatcacctgtcatccggagggacaagttcccacctggatagtctcggctgagcctctggccctgagtgggttaaagcgccatttcccctgcacccacctttccctcacgacaccctctctgcggcttcctcccctccgccaacgtcgagtgattgttccgcgaaggccccttggggtcacgtaccctgcactcagcaaataaccccgagcacctggtgggtctcaggccaggtctggccttcccgttcccgccaccagctgcccaaagacttcccctttgtcacctcctcccaaagaatgagggagccaccctgcccagggtcccatagcagagtgcggatggagccaggcctccctcaagatttcccacagccctcttccagcctcaaaccttctccaggacccgaaaccctgctacactgtgtttccatagctgcaaccccccaaaagagggtccccaaatcaaaggaatacaaaggaaaacaaaatagaaaggaaaagaaaggaagaggagagatggaatcctctctgtcattagttttctgtttgtttgttttttagggtctccctctgtcacccaggctggaatgctgtggcagctcactgtagtctcaaactgctaggctcaagcgatcctcccaccccagcttccctagtggctgagactgcaggcacacaccactacacccaatgttgtcattagtttttctctcaaacatttttctaa

SEQ ID NO: 104048 - DNA, 1299 bp, Homo sapiens
agataccaagtgaaatttagaagacgacgagagggtaaaactgattactatgctcggaaacgcttggtgatacaggataaaaataaatacaacacacccaagtataggatgattgttcgtgtaactgacagagatatcatttgtcagattgcttatgcccgtatagagggggatatgatagtctgcgcggcatatgcacacgaactgccaaaatacggtgtgaaggttggcccgacaaattatgctgctgcatattgtactggcctgctgctggcccgcaggcttcttgataggtttggcatggacaagatctatgacggccaagtggaggtgactggcgataaatacaatgtggaaagtactgatggtcagccaggtgccttcacctgctgtatggatgcaggtcttgccagaactaccactggcaataaagtttttggcgccctgaagggagttgtggatggaggcttgtctgtccctcacagcaccaaatgattccctggttatgattctgaaagcaaggaatttaatgcaggagtacaccagaagcacttcatgggccagaatgttgcagattacatgcgctacttaatggaagaagatgacgatgcttacaagaaacagttctctcaatacataaagaacagcgtaactccagacatgatggaggagatgtataagaaagctcatgctgctatacgagagaatccagtctatgaaaagaagcccaagaaagaagttaaaaaggagaggtggaaccttcccaaaatgccccttgctcagaagaaggatcaggtagctcaaaagaaggcaagcttcctcagagctcaggagcgggctgctgagagctaaaccaaacaattttctatgatgatttttcagatacagacaataaacttagggccagcaaaaaaaaaaaaaaaaagccaagtaattaacttgaagtcacatcatttatgagaaacaagcttgcccttaactataattggcatcgtagtcaatgtataaaccttacggagaacattatccagaaaactgggaggtataacattcatctttttttttttttttttgagatagagtctcgcactgtcgcctgggctggagtgcagtggctcaatcttggctcactgcaacctccgtctcctgggttcaagcgattctcctgcctcaacctcccaagtagctgggattacaggcacccaccaccacacccagctaattttttgtatttttagtagagacagggtttcaccatgttggccaggctgagctcgaactcctgaccttgtgattcgc

SEQ ID NO: 104049 - DNA, 1015 bp, Homo sapiens
gccaacatggtgaaaccctgtctctactaaaaatacaaaaaattagctgggtgtggtggtgggtgcctgtaatcccagctacttgggaggttgaggcaggagaatcgcttgaacccaggagacggaggttgcagtgagccaagattgagccactgcactccagcccaggcgacagtgcgagactctatctcaaaaaaaaaaaaaaaaagatgaatgttatacctcccagttttctggataatgttctccgtaaggtttatacattgactacgatgccaattatagttaagggcaagcttgtttctcataaatgatgtgacttcaagttaattacttggctttttttttttttttttgctggccctaagtttattgtctgtatctgaaaaatcatcatagaaaattgtttggtttagctctcagcagcccgctcctgagctctgaggaagcttgccttcttttgagctacctgatccttcttctgagcaaggggcattttgggaaggttccacctctcctttttaacttctttcttgggcttcttttcatagactggattctctcgtatagcagcatgagctttcttatacatctcctccatcatgtctggagttacgctgttctttatgtattgagagaactgtttcttgtaagcatcgtcatcttcttccattaagtagcgcatgtaatctgcaacattctggcccatgaagtgcttctggtgtactcctgcattaaattccttgctttcagaatcataaccagggaatcatttggtgctgtgagggacagacaagcctccatccacaactcccttcagggcgccaaaaactttattgccagtggtagttctggcaagacctgcatccatacagcaggtgaaggcacctggctgaccatcagtactttccacattgtatttatcgccagtcacctccacttggccgtcatagatcttgtccatgccaaacctatcaagaagcctgcgggccagcagcaggccagtacaatatgc

SEQ ID NO: 104050 - DNA, 1059 bp, Homo sapiens
cctcatgagggcaggagctgaatgtgtcttcttgccctttgtcttcccctagcagagtgcctgactcctcgtaggtgcttattaagtagttttaaaattcctcactgaattgatcttagttctttcatggtgccttaaaataagtccctcaaacatgtgaatatcaccttgcaggccagcacacatcccacatcttttgaaccttcctccgatgtaacttccggttccttcagtgtcctgatctctcttctctgaaaggggatcggtcatctctcttcctccaggcagagcctgggtgcagtacagatccactcatccgccatagggagagcctggtcggtttctagctgaaatccagatacactttgaacaccacgttttccttcctaaggagtagatgctagtgtcatgagatttgttcttaatgaccttcttgccagagaaggcagaagccacatttagaaattctactttctgtctattaaggatgtaatatcataccatctgctccaacagcagtttatcctctgtcccttttttgtttcgttttgttttctgccaagaaagagtaaatgtgttcttagcatttcccccacccagatcttagctcaccgaggtccctggcctctttgctcttatgggttcttgcttccctcttatattggcctttggttactggcccctctgacctcctatgatctgcatcttctgtgcaactccttatagcacggagcttggtgctcatcttatttccagtgtgcttcctgtccttactctctggagaaaacctggatgatgtctgttaaggcctctgcattctcttctgtcacccttcctttcctaagacctccctgggatctgcctctctcctctgaacttcttggactgccttaatgaggtgtgtatatctggccagactgcttttccatcctaagctatcgtgaattctggcatggcacagtccctttttttttttttttttttttttgagacagtatcccactctgtcacccaggctggagtgtagtggcatgatcatggctcactgcagtctcggcc

SEQ ID NO: 104051 - DNA, 1381 bp, Homo sapiens
gtgagacctcatctttacaaaaaatttcaaaaatattagcctagcatggtggacatgcctgtagtcccagctgcttgggaggctgaggtggaggatcacttgagcctgggaggcagaggttacagtgagattagattgcaccactgcactccagcctgggcaacagagcaagaccctctctcaaaaaaaagagaaagtttcagttaaatcagtactgttgcttggtagccgggttggtaagaaagctctaagtgaggttgcctaatgggaacttcagagaccctcactggctccaggtcactgacaggcccctgtggggcctttctgccttgtaaaggcttcagggatctttcagacttccccttcttcaaaggcttaatcaaaagagttagacccagaagccactgttgctatgaaactgttacttatggtttgaaacctgggagcagatggcatatttatatagaccacacctcctggactctttccagagagaccttggtgtattgtttatcacgacctgcagattgtctaataggaacataaatgccttctctagtcctccttggcatggtgaccaccactagtagaatgaggatactattaggtactttggcaactgaggtaaaataaacatggactctgaaagcaaatatattagttcgatgaagagctcttattgctttcaaattattcattagcccattagaacttgaacattatgaattatgaaagagttctgtttctgttaaaaataagataaaacctgtccttgtttttttttattattgagttccattatttctaggatataaacagtataattatatattgagtacaagataatgaaactagaacaatttgctcagccttataaagccagcatggccttaattagaatagacaactgtctatagctctaaatcagagcaaatgtgatattagggtgctcttatcaagggattttaaggaatgttttcaagattgggtaaagacagagtgggaggggaaaaataaaagtaaaaaagcattgagagctatacaatcaaaacattagaaagccaataaaggtttggagatgaggaaggaaagtctgtgtgtttctgagcagggactagtggccgttagtcgtcccactcaccccatccttccaaaggtcagctggagtcctggctggtggtctgtcggtcctcttagtgagttgccagtcctcctactgagttgctcctgcttagcatgagcacagagagcctctcgtggatgactggaagacagagaagccgccagccagcccacgcatggactgctgcctcacaggctcatgctggtcagggggacccaagccgatggctgtctctcttctttgacttctgaatagttc

SEQ ID NO: 104052 - DNA, 1036 bp, Homo sapiens
ggctgccagatcacctgaggtcaggaattcgagaccagcctgtccaacatggtaaaaccccatctctactaaaagtactaaattagttgggtatagtggtgtgagcctgtagtcccagctactccggaggctgaggcaggagaatcaatggaacctggaaagcagaggttacagtgagccgagattgcaccattgcactccagcctgggtgacagagcgaaactctgtctcagaataaaaaaatacataatatagtaattaactatactaatttataattaatataattatatataataataaaagagcatgaaatttgaggcttttaaaaaaacctaggtgagatattttctaataatacaatcccaaagtttacattgtaaaggttaaacagttttcaagctaagtcatttactgtatcttacaggataatttatttggctaacataaattagtaactgaatttaacattttttttcaggtgtgttttgattgtggtgccaaaaatcccagctgggcaagcataacctatggagtgttcctttgcattgattgctcagggtcccaccggtcacttggtgttcacttgagttttattcggtaagtgaatcttctctcattggggtgagattgattacattgttacatgggtgtttttttcccttttttcttttctttttttgagacagtgtcttgccttgtcgcctgtcaccttggctgcaggagtgccatcatagctcactgggctcaagtgaactcagcctctacaaaaaataaaaaatgttgtggtgtgatgatgtataactctagtcctagttactcaggaggctgaagtgggaggatcacttaagcccaggagtcaaggctgcagtgaactatgatcttgccgctgcattccagcctgggcgacagagtaagaccctgtctcttaaaaaaaaaaaaaagaaagaaagaaatgtgattttcagtgttgccatacagtattaaaaggtgaggcctttaagaattgattgagccctcattggtatgggttaat

SEQ ID NO: 104053 - DNA, 1039 bp, Homo sapiens
ggccacgctcaccgagccctgggaaggctgcccagaaaagcacgccagctgggcatggggcctcacagagcacctgggaggagcaaggcaggcagctgcccctgcagtgtggctttgtcccagctcagcaagggtatgggacagatccttgtcacgcagcctccttgtctgaggggtggcgggtcccctgctcccagcttctgaggagttggagccctacagcgcagggcggacacccggctcggcccacagccccaggctgcagagaaacaggcagaacggggttgggagggaaggtggggggtcagaagcaggctcctggtgccagtggcctcagtcactgcccaaacaccatggcaagaccacggtccccgctgagctggatgaagcaacctccactctgaggctggatcacacggccccccccgtgagagatctggcagggcctctaactgcccatcttccctctcctgccctgccctcaggggccagcttggaaacttcagcttgtctctaggcctcagtttccccaagtagaagtgatacttttccagttggagagttagagcaagaagaaaaggtggcctgggcaacatagtgagaccttgtctctacaaaaagtttaaaaattggtcgagtgtggtggtgcatgcatctagtcccaactacttgggagactgaggcaggaggattgcttgagcccaggaatttgaggctgcagtgagccatgattgcaccactgcactccagcctggacgacagagctctcgagacagtctcaaaaaaagaaaaaggccgggcacggtcgctcacacctgtaatcccagcactttgggaggccgaggcgggtggatcacgaggtcaggagatcgagacaatcctggctaacacgatgaaaccccgtctctactaaaaatacaaaaaattagctgggcgtggtgcctggcacctgtagtcccagctactcaggaggctgaggcaggagaatggcatgaacccgggaggtggagcttgcagtgagccgagatcgcgccactgc

SEQ ID NO: 104054 - DNA, 1048 bp, Homo sapiens
gcctgcccgccacagaatgcctggccctccaccctctgtgggctcaaagctcgtgaatgcggctctgtagcccaccgtcggtgtcatacctctcatggagacggctccctctttgtcttgcaggggatgagctgaccaagatggaggacgaggatgagcagggctggtgcaagggacgcttggacaacgggcaagttggcctatacccggcaaattatgtggaggcgatccagtgatgagtcggggacaggccagcggggggacggaggcggcgggcccaggagcctcagccagccacgtgggcatccactccttttcctgcaagagatgatggttccattgctcttggcttcatggtgttcctggaaggcagatgagctggtcatttcgcctgggactcggcacctttccgagtgcagctggagggatctgagcgcaggaagacgcagaacaacagaaatagccgcccctccccgcccactgtgcctgttggcctatcatagatctctatgttcttgactttgtctctcctttccgagtcaatggtgggttacactgatcttgttccactgattactctctctgacgagtccatcacctgcaacttaaatgaacaagcttacatcccattttgagtgaagattttgaggtttttaatttaaaggctgtgtacagttatacttttttatacacctgttcatttctacttaaattatggcacagattgatgcgcaccagtcttgaggaaacgatctccctattcccttaccctgttactcagccacgccgtgtgtaggcttagcctcaggtggcagatgtttgaggaaaggaattatgccaggaaggtgggaccgggttatggtcgggtttctattgggaatgctctttgtgcttttgggcatctgaatggaagctttacatagaaccttaggtagaactcccccaaatcgccatatttaaaaattattttcactctattcttgcttaaaactgtactcttttgcaaattaacaattttatcactgattcagagttaaaaagaagacta

SEQ ID NO: 104055 - DNA, 1034 bp, Homo sapiens
aagaagaaggccactgacggcgtcaccctgacgggcatcaaccagacaggcgaccagtctctgccgagtaagcccagcaggtgagtgggcgccacctccatccaaaagaggccgttccatggtgggggccctgggcaatctgcatggtccagggcagccccggcctggacacctgggaggttcctgggctcctgagctctgtgggccgtggcccagcctggacacctgggaggttcctgggctcctgagctctgtgggccgtggcccaggggcatctccagggaaggtcgtcttcctgcctggtgccagagctgctgacagatccagagagggaggcttggccctgagcttcagacctgagtggggaggagctgatgacagggctggcattcatgtccccagggatagcaccgccctgcccggacactggtggaggtgccaccctggttccctcaggcagctgaggtcctgccgaggttcatgctcactctgtattgtgtgcaggcgccagtcgagggagggacaggagaggactgccaggcatctcctttccaaattacctcttcactaggagcattggttatttctgacttagtcattggctgaaaatgagagatataagggtggcactgtggtcattagaaccttctggaaagtgtgtgctagaggaggtcttcctataggacctgcccacaggcctccatgtgacactcagtaatagtcatttcatacgggggcttcctaagaaggcttagcccaggttcccttggccttcctgcagccccaggcactgaagcccccacccaggctccccagcaggtgtggctgtcgtcattccgctgctttgcacgctgtctgggcaggtgggctcggcagtaagtgcctgtcccagggatcaggccagcacctgtatgcttgggggtgggaatgggaaagaagaaacactgcctcagaggagaccctgggggccctgggctggccagggttgctgcacaatccagccgcccccaccagtgccgtctcacaacagtctg

SEQ ID NO: 104056 - DNA, 1044 bp, Homo sapiens
acagcgtcatcgtcttgtgatttaaaagttcacaggaagggaggggctcagccctcggccccacctcccctcctttggtcagccatgaggggtgagggctggggggtgtgattgccgagggcctgccctgcctcggtgtttggagaggagattcccaaccaggatttgcagagagagacggaatgaggtagagagaggctgcactccaggaagaggacatgggcagaggggaggcaagaggcctaagctggtttcactacccaccagcctttcctggcccctgtcagttaggtggtggcatccctgttttgtgaatgaggaaaccaagatcagagaggttaagtcacgtgccatccagcaggtgagagcaggaacttctgacctcaagcccatacatatgccctttctccactgttcctcactgctatgccgtcggtgtagcaaggggaacacgtcatctacacgagagttcgtcactcagaccaagtgtcagaatcctctgggaaacccctctcactcccattgctggagccaggaatctgggcttttgaagcagcccaggtgcctccacggtgggatcaggtgaggagcctggaaccaactactgagtgggaggcacctgggctcaagaagcacaaggtccgggagaactctcgggcctttgccagaatcccagggaatcaggtgcccaaaaaggtgcctagaggaaagatggggcttctccatgttgggcgggggcgtgcctgtgtgagagaaagggagacagagatggagaggaagaggcctttcatgtttgacagccacccagaacatcaactcaggcttttgcagaacaggcccagggctcgaggttggacataagcgcctggcaggatgactgggacagtttgtagtgggttccctcctgggaccctccctgcctctttggtctggccagtgactgcaggatatgagaggtccttgtgtgcctagagctctggagaggaggccagtccctccccaccacccttcttgacgcagtttccaaaatccagcacacagcct

SEQ ID NO: 104057 - DNA, 1043 bp, Homo sapiens
tggtgaaaccccgtctctactaaaaatacaaaaatttagccaggcgtggtggcgggcacctgtaatcccagctactcgggaggctgaggcaggagaatctcttgaacctgggagacagagtttgcagtgagccaagatcacgtctctgcactccagccgggacaataagagcgaaactccatcccaaaaataaaaataaaggaaaggcatgtaatcccccaattttcctaacacgaggggcagagcaaattcagctttgggaactgaaaaaggcacagagtccctgagagaaaaatatctgaaaccctgaaaggaaaccctctgtggtctaaatggccacattgaacagccgaggtgtgagcagagcagaccccaccatggccggcgctgagtgacccgcagcttctctcccctgcacagggccccagtacgggaccgtggagaaggcctggatggccttcatgtccgaggcagagagggtgagcgagctgcacctcgaggtgaaggcctcactgatgaacgatgacttcgagaagatcaagaactggcagaaggaagcctttcacaagcagatgatgggcggcttcaaggagaccaaggaagctgaggacggctttcggaaggcacagaagccctgggccaagaagctgaaagaggtacatctgtcctgcaggcttccctgcccggccttgctctgcctggcaccccactagcagcaccacctcctgcacctaggacttcctgccactggctgtaggcacaggaggccagacctggtagagatgaagccactcctcaggctagaagcccatggtagttgacatttacccaggttgaagatgctgaatgctctatgtgcattctttaaattttttatttttattttttgagacaaagtctcactctctctcccaggctggagtgcagtggtgcaatctcagctcactgcaacctgtgcctcctgggttcaagcaattctgcctcagccctccgagtagctgggactaccggcacatgccaccacaccctgctaatttttgtat

SEQ ID NO: 104058 - DNA, 1068 bp, Homo sapiens
ctagcaggtcgcctggcacatggtaggtgctcaggaagtggaaaagtttttacagctatgattgggaagtaataacccagcacatgatggatgacatcaaagcagaaggctttggttagatgtcacctactccaggaagccagccccagcccctcagtctgcgtgaggtgcccgtttaggcatcctcagccccaccccttcctgagccagtcagcctcccttcctgacccacagcccagtttctacttggtacccaacctaaagaacattgagaagcccccgttcactgatgtgtatgatcttattaataataaaaatagagaggctcattatctaactacacggagtgcctttcaaactcttggagaggggtgtggtaaacatgaccccaggggcgcatcagggcctggttggcatggaggccatttgtgccacagccaaggacaggctgccccaagccccctgcctcccagctggttctctctcctaggtcgggaactacaagcggactgtgaagcggatcgacgatggccaccgcctgtgcagcgacctcatgaactgcctgcatgagcgggcgcgcatcgagaaggcgtatgcgcagcagctcactgagtgggcccggcgctggaggcagctcgtggagaaaggtatggggccccggcacaggtcctgtggcctggaggcagctacaccccagccgggggctctgggcacgttgtgaccctctctatgccagttttctgtcttttaagattggggcaagagtgcatttcccagttccagagcggggtgtgatttttatggggagcattagcgcccatcaccagaaggcacaggctccatgagcttttgtccactttccttggggacacaggactatagcccttgtcatccataggacacacttgcacttgccgagttaactcagaactcgggtaagttcctatcacgtggaaggccttgccgcttggcaccttagtttctaacactgagagctgtttatttttaaacttggccatgtagcaggtcagataagactagctggcaacacctggcagtctttctgag

SEQ ID NO: 104059 - DNA, 1131 bp, Homo sapiens
tagccctaccagttaggtagagtaggtcgggatgggcaagcccagagatccaaggactctgccttttatgcacatgcacccctcgcccccatcacccaccatgcacacacacagacatacacatatgtgcccagagttgattagagtctactggctttctgccacctaaaggaaatattatagaccgccctgtactgaaggcagtgattagaaacgggaagttgtgaaatagagatgacttgtttctttaccttgggaatttaaaaaccactatgttatatgtttttcatttataggtttgtctacagattttgagcgttcgaagttgacccctgactaagtatactttgctgctccctcagcctttgaaaaaatgtctgtcacatatgatgattccgttggagtagaagtgtccagcgacagcttctgggaggtaatgcacctgctttcttccagtgaatgaagtggccaggccaatagtgtctggcaggccctttggtttttttggtggaggttgggaactgaggtgaacatacccccaaaccagccatgcatttgtagtcagacctagatagcagcagaaaaggtttggacacttgtttttaggcagttcaggtatgccttagccatcatcgaaggcagtgaacttaccttgctaggaaaggctgatacttaaagaggttaggggtgtttatgaaaggtcttggggatcaccttcctttttatgtttgccatggtgtgagtgggagagacagacactaattgctcagcttatcctacgaggcactttactgttgagttttatgtagaaacaaggagggctgtgatttgacatcatgctggacaacacaggcaagtggccagagggccaaatgccttcaaacttgctggagcatctgccgccagtctgtacccatgagtggccctcttcctgattggattatttttgtttttttgtggaggcggagggtgttgttcctgagtcccacttacttttccttcctgctagttaatggaaagtccatcttttttttttttttttttttaacagttgaggtctcgagagcgcaggctggagttcagtggcaccatcatggctcactgaagccttgatctcctgggctcaagcca

SEQ ID NO: 104060 - DNA, 1025 bp, Homo sapiens
tagtaggatgtcagccccaggagggcagggacccagtctgccttgtccactgcccctcccccagcttagaagagtgcctggcacatggtagatgttcacatggtaaatatgtcccttatcaaagggccctctcaccttgggcccaaacattggcttagaataaatcgttatttcccaaccactgaagaatctccccccagatagtgaagaggaaacgagctgcaggtcagcctgtgctcagtgcaaggcctgtggagcggccagaacccagccagccaggtgtgctcgggccgtggcagcgaggatgtccacctctgcctacctctgcagttagaggattagagcggggtatcgggggctttctcccgaggccagctttcaggagagatgagcaacatggtctttttactcagaatgttcttgctttatgaaaatagccttttggcctaaaaaatgacctgttcttttgtctggttgtggaataaattaagggtgttaagggggagctggatgtccttgtgaatacatcatttgtttacctgatatctgttatcaagcccaaaggggaggaaggaggttatgccagcttccagcctgtgccacggtcaccttagcaacctctgttaacctctgagactctgcacaccatctaaggaatggctctgactcactgtacttacatacattgctggcagaagtcactggaatctgagatctggaactgttttcaatacctcagtcattcccggattcccagattcctgagaagtgccccttagaacaaaagggttgggtggctcacacctgtaatcccagcactttgggaggctgaggcaggtggatcacctgagttcaggagttcgagaccagcctggccaacatggcgaaaccccgtctctactaaaaatacaaaaattagcctggcatggtggtgagcgcctgtaatcccagctactcgggaggctgaggcaggagaatcgcctgaacccgggagacggaggttgcagtgagctgagatcgcgcca

SEQ ID NO: 104061 - DNA, 1060 bp, Homo sapiens
tctagacatctaacagaccacccttggttctttggtcccctcaaacatgaacatgggtgtgttctgttgctcttatttattttgtcatttatttttggacttgaattgaggcttccactttgggcaggtctcttgttttgagaatctgcagtccagagaaaaacaatgctgggcttggcagtcactggtgaagtcggctttgcccgccctccaggcatgcaggattattcagagaggtacctttctacatctcattgctttgagaaatatatatttcttaaagagttgttcaggatttaaggaaagttggggaggtatatggaaccatagagatagtttgtttccaatttcttaaagtcttagacctcaacttttcagggataacaaggttttcctctgacacataaagataataatagactaggttctgaatatgtgctttggacttaattatgggaacttggctttgccaggtgttttcaaattctactgtaaatataaatgctgattcaatgatacagcaactcttgatacttgagaatttaaagtgctgcgtaactgattggacatttcgtctcctaacacagttggttcctctgattcagagaggacccctttttgaagatcaaaagcaaaataaaagtgtggaaagtgtggacttctagtggcatgtggacaggggggtgtcctgggggctgcccaggaggctccaggtgggaagtgcttctgacttagtggctctacaagctggccattgtggaagaattggctttttccttttttttttttttagaattgactttgtaagaatcatcaaaaaattgttttgctctcagctcaataaacatttgtagttaataatccgagtaactaatcttttttctctcctgtgtaatccaagatatgtcagtatatggtcttcgtgagtaaaattgataccaatagtacattatcctaaaggtcttatttgatatccttttatcaagtcaacactttactgtcccaccatttcacttgtaaagatccccaagtgtgtcgctgtcagtttcaacaaatgtta

SEQ ID NO: 104062 - DNA, 1064 bp, Homo sapiens
tccaagctattttttctttgagtttatttgcttggggcatgttccccagagtgggacttaagggtcagaggttggtaactgttatctgccttgttctgtattttcagatttttccatgaagcctattagcaatgttagagtacatttctgttttcctgtagccccaccaaaactggcattgtcatattaattttccttattttacaagttatttccatattttaaaggaagttgtgcttttttttcctgcatgggaatttgttgtattatatttagctaggttacattgcagtaacaagcaaaccccaagtctcagagacttagcctaacacaaatgtctttctcgcttgatctgtgtgtcccttgtaggatggctgggggtgcggttccacagagtccctcaggccaggctgattaaggagacagcactctctgagagctgccactcgaggcctgctcagtggacaacacagtagacaggagaggctgggggctttgtgtggacttttcactactgatgtggccaggactaccaacacagtctggcttagcaggtagaacttagtgagcattcctgtctctgcccagccatctcctcttctgtttgttcctctccagcaacttctttgtccagtggaattggatcctctgtcttcatatcagctcttaatgtattttaggtaataagatttttatcaattgtgtctttttctttctttgctttctatattgtattgtgcaaaagtttaacgtaagttttggacacattcatgttttcctctgataccttattatcacaaatttcttttctcaaagccagagaataagctgcttttctttgagttgcttaaaatggattttatttggctccttatgacacttgaaattcatcaaaatatataatgtcaggtggttttaatctaagttaattaggtccttggtgatgcctgttctgcaacattaaaacaaaacaaaagaaagaaaaaacacccaaccccaagcaacacctcttcatgacagaaacactcagcaaaccaggaacagaagggaacttgactggataa

SEQ ID NO: 104063 - DNA, 1002 bp, Homo sapiens
cccctcagttcttctcatttctcatcccagctggaccctgtgccctcgtccccctctgagggctgtcactagacactgtttatatttttgtcgggtaacaaaatgtaaaagtcttattgttttaataactgagcagccttatgtacgtattcaattgtttcttagaagtcatattctggaatttttgaaaaacagtggctcccctttattgctgtggtgctgtaattctaattagatttttaaaatcctgatacttaagtgacccatcactcagtgaattatacttactggattactgattgccattaaaaaggcagcatcctctctccgtcctccagaaaatactgtgctggtgcagcctgtgcctcacagaaaaacatgctttcttgttaggatgttacctactgtgaagtgtgtgtttcaaatacttttaagattgcataggaaaggtttctagaaacccccaaggtatatagtatgtctgtccgaccttaatcgggcccatcagttttgtctttgctcttgtagctctgaatatctctttcttcagatcccttccttcttgtcagtaaaacatcctactgaattctgcatgaattttaaatgctgtatttatgaaaacagcaaagaggtttcataacttcaaaccaaagcatttttacaggtatgagatttatgccaataagtaaaaatacgccttccttttttctttttaaacagtgttagtcctttgagacccgtttgcccacccacacaattctgttattcatttggtggcataatgcagaaggtgggaacgcaatatttagagctgtaatggctcttggacttaatattccaggatcctcactttaccaaaggaattgggatccagaggtgacgacttgtccaaggtcactcgtctcgttggtagccgagtgagtctgaaaccctggtcatgagactcattactctttccattacagtaatctgctttcttcgcattattatcttaagatgaat

SEQ ID NO: 104064 - DNA, 1029 bp, Homo sapiens
tatttccatgtaatcacagttgcgtatttgagtgtcctagttcttaggagacagtcgtgctgctgagagaccatggggtcacctgcctgtctccaggggactctgtgtccccagtcctgtctcctgcatgaggcttcctgttcatctgctgacaggcattgccttgttgtgtgtagtcacagaaggaagttgacttccacatgtagggacagtgtaagattatcctgtgcaagcaagtccctgtcccactgactgctgtgacgcccctcagatgcagagagagcatgctgtcttttttctcttgtaagcaggaggatcccaaatacaagaagatattagaagactcatgtatggtgtaagttagtttgtatataatttgattttttgtgtgttggggagggggtagtatgaattttgttctcagacctcttctccctgattttccgtggaaatactgaaatttctctttggccactttctgaaaagagagctcttctgtgatggccacagcaggcaggagcgtgcagtctgggaacctgggactgtacagcgaatgcagcagtgtatgggaatgaccttatctcggcagccaacaggaaatgatgaaatgtgctgggagaattcagctgagagacagaggtcagacatgccagcagggttggaaagaggcaggtacggaagctgagctgcagagttagccggcatctgacagaaaaatgtgagtgtgctgtggaaggcttgcatttcctttaaggtagacctctttgaaagtagaattttcacggaattgttttctttctcactgagtgactgatttaacagaactctcaccttctatgcaagcgcacctagttttagagctccgtgacggcaatgttcaattagttcattattaactgagcaatgcagaatgctttatccagggtgcttggagaagatgtcagagtaagtgtttgattttcttggagaatagatttcggcttaaacaaatgaaggattgtgttttgtaatttttgactctggttttag

SEQ ID NO: 104065 - DNA, 1639 bp, Homo sapiens
ttagccgggtgtggtggtgcgcacctgtagtcccagctacttgggacgctgaggcaggagaatcgcttgaacccgggaggcggaggttgcagtgagccgagattgcaccactgcactccagcctgggtgacagagtgagactcctgtctcaaaaaaaaaaaaaaaaaagaatgaatgtgcccgtcttctgaacatggtgccatgggtgtgtgtgtgtgtgtgtgtgtgtgtgtgtgtgtgtgtgtgtgttgctcctggactcagggtggggtgtctcaaaccacatgctgggtggccagtgaggtccctcgggcagagccacctgcgtgtaggggtgtcatcttatctaggggctggagatgaaatttttatctgtgggaagctaagcagcccatataataacagtgatgatcagtgttggggtacccaaggttagtgctgttatcacttttttacacataaatgaaatggaggctcagagagatagttaaaatatttgttcagggacacatgggtggtaagtgacagagtcagggtttgaacccaggtcagtcttggtgttttgtgtatagattcagacacaccccccagcaagtcatcaaaaatgtcttctcattgactacacatcaagggtgggtggagtggactctacaggctgtctgaggggtgttagttagggaaggcgtcagtgggaatggagtatctatgtatgtgtgcgtgtaggtatgtgtgatttacatccaataaactttactcaagaaggggatcttaggggctttattatataggcagtggctatcaaaggcttttaagcagaagagaaaggtgagaccacatctaggtttcgggaaggtttttttagaatgggtagaaaaggatagagattagatctagagagacaagtgttgatgcagtagctgctgccccttcttagggtctttgcacgtggggttcccacttcctggaatgttctttgtcttcaggtcatagcacaaaagccccctctcagtggtcactgatgttgctctctgccctgaagtagccctctgctgtgtctgaagtcattgtgttcccatgtggattttagtgtgtatcttcaccccccattagagtgtcactgtcatgcatgtgcactcagcagcgtgcagggccccaaaaggcctccgtgaactgtggaggaatgagcccctgaagtggcgggtggtgagatcgagcctgtctgctggttgccatgctgggaaggggttgtggagggagaggggaaccaaggtcatttcttttaggcgtttgatttcgtttggccggatgaatgctgcccttgattgatactcacgagtgttttctttgggggccgctgcgcttttccaaacagccagggtgcttaccagactcgctgaccacactgcagcccagcgtcgtggctgacgcagtggcacggttttgcttagcttgaattgcttttccttttctgttggtcaagttctcttttgttagtgatcatttacctcttttaaatctcctagcatagttcctggtcttccttttcttgtttttcccttgcctaatgcttactgtttctgtgttaattctggggaaagggaaatcaccttgagggtgcttggctaaaactacagagcaa

SEQ ID NO: 104066 - DNA, 1930 bp, Homo sapiens
ttaaatattttctcaagtattttccatgttttaccttcatcttcaaaaagattattaatggttatattatcctgttgacgtaatgagattaaaacattccctagtgctggacattttaggttatttccacttttttgctaatgtagatgaatttgcagtttataatttcatcctttttcatctgtgtaattagttcctggggataaattcccgagaatagaaatcttgtattaaagggtatgaacaccttaagagtgttttgaaagcctgtcttgctgcttgtaagtgtatttttctgattttttgggtgaaaaaatggggattctttctctttaaagtgcctgccttggcctttagaacttccaagtatctgtgagataagaaagttctgtgagggtttcttaaatgagtcacatttccttcctaagtttctggatatcattttacttgaattggttgccatactttgatgagcaaggaacgctgttttagaaaatccttactacttgatgattaatccttggagctaatgttccacgttcccaaggttgtgagtgcttatggccacattcctgcatcagctcagccatcgcggtaggtatctcacagaccttctctagctttcttttcctcacttaagggatgcatattggaaagactctgcagggttctttctgccaggcagcctgggggtcgtgtggtcctttagagttcatctctagcttctagatgctgctctcatgggggttcctggctctgttcatctccagagacaagcatctcaaagggaacctgggaagtttatagcactggtgcttgcttgccttgtttgcttgtttgtttttctgttctggtctgctgtggaacttgtcaccatgtcccctccccatggactgactttcctaccctccactgtcccttaggtattcactctcagactgagtggtgtcctgttttcctggtggctcatttgccagggtctgcaaaggacaaggtgcttagcagggacagagaggggctccaggtggggagcagtggtcaggccagctgaccttagtgcttacccctgggtcccctccctagaattcctgcgatgcctccaccatgtctaccctctccccacaggggctgtttcccttttagttctcttgccttactgtgggcaaaagcttacttttcttggttcctcttatcccagctaagaaaagctgatgttcacaacaaaatgaagagacttgactacccaggaaggtagacataagaggaaacagccacaaacagcacaggcatacaagtgtcttgcttcccaagcacaggcaggtttttgtgcccacacttcagggctcgtctgactgcactggctctgccaggcgctgcccagcttcctgcttcccctcccagtcctgcttcttctgtcagtaaaacaaaattttagagtgatgctttgcttgatgctttgggggctgcatttttatcacaagtgtggaaattgtactttgctctggtttctacagatgcctaaacatgtctaggttgctgttgccttggcaactggctgagctgttggttgtgtgtgtggtgaaggttctggcaggggcttcatggaagcctctggtcatccttagagcttttcagctaagctggcggttactcccaagcccagaaccatatgctcttagctcccctttgtcgtttggagcttcccattttatttccctgagaaatccctgctcagctgccctagacttgggtgggtggtatggcatggcatggcatgcactgatagggctgatttatttcgagactggatttttggtaacacaagacgtgattccatagcagcccttggcctaagttttatttgaggtcggacggggcccaagggctgcttgtgctctcccttcaagtgccttctgctttttaggcctgg

SEQ ID NO: 104067 - DNA, 1182 bp, Homo sapiens
gcagtgatagttaaggctttagaattataggaagtttctccttgttttccacacagtaccattgcccttttacttttagattaatgtttaagtaataactttgtaattaaaataagtataaataaaaagagcttggttgtctaggcatttgcattttaccaagaagctttccatagccctcattttgttttcaggacagccttgttgatttgtttcccttttcattgtttagaggagaaagagagtcagagctaaaggggtgagtggttttgcctgaggccacctgccaggaccccatatgggcctctgagcccaagcccagagcgcccagggaggcctgtgacggggcctctgcctggacctgcagggtggtctttagataggatcaactgtgtattctgaagtttcctattgaatgaaatgaaatcttcttaatgtaaagtgatacccaaaccgtagtttgtgagcattttcatgttttaaactgcatttgtctttcattatattaaattatgttgtcgccaaccgagcgtgccaagatcatgaattgtggtcttcagaggaaccacagagcaggcagtgctccctgtacagacgtccaagcccgctattagtgggttctgtagctgtctgattggctggagctggctgcctgctcgccacttagctcgcacgtggtgatgctttaattaagcaattgcgacctttgctcctgcaaatgtgtcatcagataaggagactgggcatgtgccaccaaggaggatgtgcgtggggggtgcagagtcagtggtgaggggctgtctgcacaggcccccatgttctgaagtttctgagggaccattcaagaagctttacattcctgcccatttaattcttgcaaccagatagtgttctctccacttgatccatcagtaaacctaagctcagagagattcagtggccttcagagggtcaccatcagagctggtgctctgcctaccgaagcccacactcatttcacctcctctggctggctggaataagtaagttgtgaatcactctcagatgtgaacatctttaaaagataattaatctttctcccccacctctgagaaacatagacatgagggagattatgtgtgtcctttgcttaagacggcatctatgtctgtaactaacttggtttcaataatctgaaagttt

SEQ ID NO: 104068 - DNA, 1030 bp, Homo sapiens
ctcctgagtaactgggactacaggcatccaccaccacgcctggctaatttttgtatttatagtagagacgggatttcaccgtgttggccagtatggtctcgatttcctgaccttgtgatccacctgccttggcctcccaaagtgctgggattacaggcacctgccaccttgcctggctagtttttgtatttttaatagagatggggttttaccatgttggccaggctgatctggaactcctgacctcaggtgatctgcccacctcagcttcccaaagtgctgggattacaggcgcctgccaccttgcctggttagtttttgtatttttaatagagatggggtttcacagtgttggccaggctgatctggaactcctgacctccagtgatctgcccgcctcggcctcgcagatgtccttgccttttgtttcttctctataccttgaaagtctgtgctgtgttaagggcgtcatgctcaggcttactgattctgaaggggttatcagtggatgattccggatgttgtggaatatcaaacagatcgaaaagtttctttaataatagtgatggcaccttgtgtttagagttcgcagtggcatttaccagatgctctctggccaccttcatgtgaacctcccagctgactcgggcctgctttatctgccatcagattgtaatggcagctttgtggaggccgccctgtagattatgcgattaatgaccacattcatgtgagcaatagtgctggcttagtttttttccagttaggttgtttggaatggtagctgcatacctgagggcagtgcagcaatgccttagttacgaaggcagtttgcattccacaggtagagtctttccttatggccagggcactgatccctcacataccagaaagtatcattcgtccctgccccagacagactccagatgcgtcccagtggtggttcttgggatagttttgtaggaatttctgcagaattttagtgttcagatgagtatgctctgtctgtggactggagacaggcttcaaa

SEQ ID NO: 104069 - DNA, 1108 bp, Homo sapiens
aatactgcctggctgtcttgatgaaaatcaggaaaccagctcaaagagtttgaacctcagctgcagatggtgagctcacaccttcttccttccctccttttcggtgccttcctctgcggttattcccgtgtgctgaagttctgttttaaccctcctgggattgccaggttggagcccagggcaagggaaccgaccaggcaggcagtgttgaatgccagccctcctgttcttgcccaagatgttgtcgttccacttgattcatgagcctgcctgcatgcagcctcctcatggagacattgaagctgtgccagtgcaacttggatctctcttgattcacctggaaaactttcacttgtgtggacttaaacttaattctagagtttggtagcctctttggtgaggttatgctggttgagatatgaggccactacatcaaaaacattggtgtgtttttcttttgacaatagacttaaagctttaaagaaagtggccattaggctggtgatatttattacttgggaaagtaacataacacagagaagtagatgggtgattaggtctgcactctttatccactttttgggagaagaataacaactcatttgaatggaaatggtatccttagctcgtgctgctttgggacttggaactttatcacttttaatctcaaatgtatatgaagttgtgatgtgatatttaaataatctaggctgggcggggtggctcacgcctgggatcccagcacttgggaaggccgaggcgggcagatcacctgaggtcagaacttagagaccagcctggctaacatggtgaaaccccgtctctactaaagatacaaaaattaaggccgggcgtggtggctcacgcctgtaatctccagcactttgggaggcagaggcgggcggatcaccagaggtcgggagttcgagaccagcttgaccaacatggagaaaccccatgtctactaaaaatacaaaattagctgggtgtggtggtgctcatacctgtaatcccagctacttgggaggctgaggaaggagaattgcttgaacccaggaggcggaggttgcggtgagccaagatccggccgttgcactccagcctaggc

SEQ ID NO: 104070 - DNA, 1040 bp, Homo sapiens
gtcccagctactcgggaggctgaggcaggagaattgcttgaacccaggaggcagaggttgcagtgagccaagattgtgccactgccctccagcctccagcaagactcagtatccaaaaacaaagaaagaaagaaagggcccttatgaatcatcttcaagttcctcccttccaagaacagagatgctaggcgacttgcccagaggcacacagccagcatgtagcaggattcatgcctgtgggagctggggttgggggatattgacggctttagcggatcaaaagagctggtgagtagggctatacaatctgggggtcatcctgtgagagagcccccagactgctcagttcttaggggtccagtcatatgctgtctttttgccccagaggagaaatgtctgaagtaagacccctctccagagacatcttgatggagaccctcctgtatgagcagctcctggaacccccgaccatggaggttcttggcatgactgactctgaagaggacctggaccctatggaggacttcgattctttggaatgcatggagggcaggtaggtccccatggcctgccctaccccctgcctgatagtgacttcaggggtgggctggatgagcagacattctatgagcgggggagcgcctgcagatgcctcccaggcagggcctccgagaggaagatttcccggatgtgggcatggaggcttctgccctgggagcggcttcactttgctgccccaccctcccctgataccagctcacagacccctggacagccagcatgttcacagtctcaagatggacctggggcccctggctgtcaaaatggcacagtgtttgggcctcagggagctagacaggcccttagcgacctgctgaggacatcagggcctcttgaaggaggtgactctgttgccagaaaggggacccgatccagatcccaagagagggttcttagatctcaagcaagaaagaatttgggccacacgcagtggctcgcgcctgtaatcccagcacttagggaggctgaggcaggcggat

SEQ ID NO: 104071 - DNA, 1022 bp, Homo sapiens
agcagcggcagcagcagcgccagcagcagcagcagcgccagcagcacctgttcgcaggacacctgtgggagcaaagcagaggagtcaggctcggggcaggccccggcaatggggccagacgggtgacagcggagtgccaaggggaagcccaggagggtggggactgggaaggagctcgaggggaccagagaaggaaggagttcaggagagggggaaagtggccctgaggacgtggccagagaggccagcgtggcctgggcctgccagtctgcgggacacaggcaaagacacccggtgggcacaggtgagggcagtcagctgcccttgtggtgggcggtgccgagtggacaccatgggaccaggctaccaggaaggctgctcagggaggcccctgccctggccaggagacgggagtcctgcctgccaggtgaaggctctcggaccagagggagacccaggaccatgcactggtttgtgcactcagaaccaggcatctcaaacccaaaagcccatgggatcaggcagatgtggacacaggtgacacagatgatgatacggagtggtggggactgtggcgccccaaggagcggctctgacagcccccactggccgcagcgcaagtcagggtcagggatctcaaggctcttacccaggacccggggttcggggatctccagaacctcattatgttctccttaagtgtggtgaaaccgtccatgaaacttctaagaacatccctgatgtcctcagtctggtcgtagatgaaagccagacccaggctatagacaaagaggatggggggacaaagccattactgcaggagcaggtaggggcagcctgtacttagatgacaccatcacagctgtggggagcaggggcctgtgccctcccaccccacagccacccggggccctttccgtgggcgcctccacctgcaggggccgcgtggtatggactgtttgtggtcaaattcattccaacttcctgcttcctccgccagccagccgcccgccagcccaccg

SEQ ID NO: 104072 - DNA, 1030 bp, Homo sapiens
caagggaatccagagccctgggttggcgtcagtgtgaccatggacggagttgatggactgtaactaaccaggaaagctcctcctaaataaaggggcaggactcaatgattgtcaaggtcacttttgtgtgtcctcttccagctggtgcaccaagttcgtagaacctggctcactgagatgctgaacaccccgccagctctcaggtacagagccctggaactgggatccccaggagagtgagggctcacgttctgcatctgtccccacaggtgattgagaactgtgttgctgctgctggattcagtgtgggagagtttgcagccctagtgtttgccggagccatggaatttgctgaaggtacaggaaggagtttggttttatgcaaggctgtggtcttgggctcattaggggtaagggacactgccaaaaatgatactggacccactcaggtgatgggaagggagcacatggacaggggtgacattggcacatgaggacagggctttgctgtgattccttttcaagactgaaggattcattagggatttcccttatttttgtaatctcatgaaatctgcttgctgaactgtctaacccgctatcctgtgcactcatacctgcagcacctgcaacacgagagtatgtgttcagtagatattcgttgaattaaagagtaaataaatattggatctggagccatatcagttttacttcttaagatttttgctggccaggaaccatggcttacgtctgtaatcccagtgctttgggaggccaaggcaggaggaccacttgaggccaggagttccagaccatcttgggccacatagtgagaccttcatctctgcccccaacaaaaaacaaaaattacgttgggtgcagtgattcacacctgtaatgccagcactttgggaggcagaggcagatagatgtttgagcccaggagttttagaccaccctgggcaacatggtgaaaaccccatctctaccgaaaatacaaaaattagccaggcatgttggtgtgcgcctg

SEQ ID NO: 104073 - DNA, 1044 bp, Homo sapiens
agagtgagactctgtctcaaaaaaaaaaaagaagaagctgttatgtagaggggccagtgaccctgcccacacagtaccaggcttcgtgtgggttttcctacacagtggcccccaaacccacccctgcaaccccttctgctttaatagcttccctcaccggaggagtcagtagaggggaggctccagggtgtgggctgcttacagctagagagacatggccttttgtctcccctggccccgcctatagacactgacccagtgtcatatgtgatgccccacgtcctccaagggtcggatccagggatcagggacacatgctgtggccacacttacccagcccatttgtcgggcaccaaagaagatggggggccatgcccagttcagggccagctgcccagtgtagaggcccaggggaaccacagccttctctgtgaagcctcccagctctttccagaccaggtaggagccgtacctgaaacagaggccgcagttcagagcaccattaggaacaaggccaggagcgttgcccacctccgagtggcacagtgatggttcatacgtgacctgacactgactgctgtgtgatctcagggaagttgcttgacctgtctgggccttcatttttcatagggttgctgtagagattctagttagcacattggcagtgcttcatgcgatacccagcatttaggacactcagtaaatacctgccattattatcactgtcactgctatgaaagggaagcacatggtgtgaataggtagagaggaggctcttaacctagccagggcactgcatagaggatgggacatttggcctgggccttaaatgatgaataggagttttccaggggaggaaacaggacatgcaaaggctttgaggcagatgtgagaccctgagtcagtctgtgactgcagggtgaggtccagggggaggcctgatcatgggagctgttaacacagggcaacgataacaccaccagtaacagcagccgatgccctccagcactcacaggagccaggccctaccacttcccaagcatt

SEQ ID NO: 104074 - DNA, 1082 bp, Homo sapiens
acccattccagctcacccagaaccttcaccagcaaacctcctgctgaggtcctggcaggaggccaccgtcttgttaccgtttccttttcgtttgctgagggtcacagaccccaacagggaaatcagtatctgtcttcccagtggttgccctgctcgccgggcactccacggggtcccgcccttgtgtgagatgggccaggatccttcggcaaggggcgcctggggctggggctgattgtgggcggtggagcgccagacagaaaaggattccaatgagaacttcaggttaaagtcagatgccacctaccagggtctacagtcaaaatgttggctttttcttattttttaatgtatgggagaaaaatgtaaaattccagttcttttctaattgtgtttctgaaattaggagtcagctgccagcgtttttgtgtggctgcagtgtgcctgggcccagctcacgggcagtgggtggacctaactgcccaggcaggcgagagctacttccagagccttccagtgcatgggagggcagggctaggtgtagcggtgtctcctctttgaaattaagaactatctttcttgtagcaaagctgcacctgatgatgctgcctctcctctctgtgttgtctgggcccttgtttacaagcacgcgttacccttcctgaggggagccatgctctagcccctggagggcctgttgcaggggcagggcgggcccgtcgcctttggcagctcctggagagctgtggacatgcagtccccctcagttcgtgctgcaataaaggccatcttctcttatttctgccctcctttctctttggaccctggagccacaggctcagcctggcctgtcgccccggctgtcactgaaaagccccggataccaagaagtcacccacaaaaagtgggagaagaaataagatggcctttatatcgcaggcctccaccccacagtctgatttccatgtgctggatctgtttccaagccggccgggagcctcggtcctcgagtggccccacagctctagtggccctggagatagcagcctccccacacttgcctccttgtcctggggtgggga

SEQ ID NO: 104075 - DNA, 1037 bp, Homo sapiens
taggaataggccatggaaatgctggcagtgagtgggtaaagggccccctgggcagaagcgttggccaccactggtccccatcccacccctgtcctctgggcaccaaggggtcctgttaccaaccttgcatgtcatggggctgctccgcttacctggatacgatgctcatccagtcctggaaaccgacactagccaggcctgtgcatgccagccctccccacagcagggagcctttgctggccaggaacatgctgggcacccacaacaggcacccgggctgccagtaggggcccctcccaggaggctgcaggtgtggctgttgagttaaggaaagccaggccggcaggtccaggcgggacaccttgcagaagcaggcacaggtgaggacccagagatgcagagcagattccacctcagccttcacaggagcccctccctgaggctcccagacactccccttggctgcccaaacctggtctagccaagaacaggcaggctgctccactctgccccctccaccgggcctgagggctttcctccctgctggcctctgccccagctgggcagcccaggggctcttgctgagacgtgagtcttgtggtgacctggccagggcctaaggtccctccacctcctctggggcagaggcctcacggaggcccttggtgtgcctgtctgagattggtggccccagcctcatcctcttgttttgcatgtgagaggaaagaactagcacataataaacacccaaattatgccatttaattttaatgacaaatgtgaggtggacggtgtggtccagtcctgcggatggggaaccaggggtcacaagggtacaggttgcgcccctccctcagcagattggagggagcggggtctgaacccgggctgtccagcatcatgactcgaacccaggacttgcctctgcctcattagcttcaaaacagggaagggagtccctgagccagggctagtgctggagtcccgcttggacacttgggagccgggatcacccagctcgggctctccccacaggg

SEQ ID NO: 104076 - DNA, 1142 bp, Homo sapiens
taaattctagcccttctctatcagctgtgtgacctttggccagtcactttacctctccatgccttagtttcctcacttgaaaaatggaaggcatagtccctatctggtagggctcttgtgaggattaaatgagatcatggacgtggagcatgtagcagagtgtctggcaccaaatattcaacatgtaaccagcattcatctggtcactggcttccagatgagatgtgttgatgtggagtggtttgatgcctccaagacctcgtggggaccagtccccaccatgtgcgctcccacggctgtgcctgacacgtggaactctccttccagccactgtactcttacctgtgcagaaccacctgtttgtaaataccctgttcttggctacagcaagtactcccagtgtccccagagcctgacgccagcagcctgcagactagcagtgagtctgtgtgggcctttgtctcaacaacattgttttcacaatggattatgtttacactgattaatttaaaagaactgggtaaggttccccccctcccccgccccaccacctctgagcacagattgcaacctcacgcggctctaacttgcacacacagcagccaagaaaaggctctctctgttgctcctctgcctttagctgagggcagacccttcccaacagagttctttctgttcaggctttctctttctcaagacaaaactccagctctagagaagccggaccttggttccaacaggcaccaacccatcctgaccatgtgacctcaagctagttaaccgacttcttggagtctcagctccctcatccatgaaatgctgtaagaactggagtacctcgtactctaggatcatggggcttaatcagtgttggcagaaataaatcatgctgtaagagtcagctgggcttggagtttgaagatttaggctcaaattcaggtgtcaccgctcatgagttttatagttcgggacctgttcctctagcccaccaagcttcagttcccctaactgtgaaatgggtcagtaatacttgtctcggagggtcggtgtcatgattaaatctgaaaggagattgtgcagagcttgtgtacagatgtaaattctgtgcaggtgctggatattgtcatcactttccagcaaag

SEQ ID NO: 104077 - DNA, 1045 bp, Homo sapiens
gtgaagatgatgataagggtgttggtgatgatgttgatcatgatagtgatgatgatgacattagtgatgattatggtggtagtagtggtgaaaaatagtgatgatcacgataagggtggtggtgatgatgatgttgatagtgatgatggtggtacagtggtggtggtgatggtgacgaggatggtggtgaagatgatgtcgatgatgatgactcactgcgtgcttcttatgtgccaggcactgggccgagcacagtacatagataattatctcatataatcctcacagcaggcttggaagtggcatgtatcattatcatctccattttacagatgaagggactgacctcgagagtttaccagcttgccccaaacacattcagcccacaggggctgagtgccctatgactgccacacccccctggccaccctcactactctggctgctggcctgatgggcatgtgcttactttccagggtatggtgtcatggcagatgggacgaccacctatgtgaatgcgtccgtatgcactgtgaactaccagcccgtgaacccgcccatagtcatcgacctccccacaccccggaactcctgactgctccccactgcccctgccctgcccgcccgtgtcagctccacaggcctggcccggccactgttccttccatgctgagttgcctggacgacccatctggctgcggggactggcctagcaggcaggtcagggccttggaacgactctttagccttctgtcacctggagttgggaccctgcgcatccccatcaggggttctgtgctcatttactttttctgcgtgtacatcctgcgtgtacctcgttaaaggacctactaagctcatggccctgtcatgtttgggaaatgactaaatcttcattcttctcccttggacgccctcctggtttgggaagctgctgctcttgaatgggttttggaagttacacaaaatctccctctaaccacgggtctgtgtggcggcatgcccctgggttggggtgggtgggaggattcgtgagctgcacaca

SEQ ID NO: 104078 - DNA, 1065 bp, Homo sapiens
ggagtgaggcctgaactcacgcatttccagctctgccaggcggggctgattccgctggcccacagggcatgctccgagtggtgagggatggaagacgagctcctcatggatggtgcaggcattttccaaaccctgagcatcagcacaccttactggctactgagaagtgctttctgtttttgtttttgttttaagatacgacaccgagggaaaagggcacattacttaccaggaatttttacagaaattgggtattaactattcgcctgctgtccatcggccctgtgcagaggattatttcaacttcatgggtcattttacaaagccacagcagctacaggaagagatgaaggagctgcagcagagcacagagaaggctgtggcagccaggtgagtgaggaaggatcacggggccatcatctagaagtccccttttacatctggcctcacagcacaagttattttaaaatggtaccttcccatgctggcaaagttacagggaaatgatcgtgcttgttcacagttgtcgattctagaaattggtgcgaagtcaaagagtaattgaaaagctatagcccattccatcttacccagtcacaatcttatatcattcatcatattttatgggtcacccttgaaaatgatcctttaaatttagttgtggatggcataccgcctggccacgcccttggcccaaatagaatgcaggctcaatagggatgtctgtcactttacctggtgtctagcaccgaacagacacccacacccagtaatatctgttgaatgaataaaggaaagaaccagacatatcctttaactcacacttctactttcaggacttgatcccgaagaaataattcagaataagccaacagctgagcaacgggaaggtgtgacctgcagtgtgtcttttttttttttttttttttttttttttttttttttttttgagatggaatctcactctgtctcccaggctggagtgcaatggcgctgtctgagctcactgcaacctccacctcccgggttcaagcgattctcctgattcaggctcctgagtagctg

SEQ ID NO: 104079 - DNA, 1079 bp, Homo sapiens
agctactcggtcatattttgcatgtagcgctgctccagccagtttcttttcatttctttctttctttttttttttttttttgagacagaatttcactcttgttgcccaggctggagtgcaatggtgtgatcttggctcaccgcaacctccgcctcccaggttcaagcaattctctggcctcagcctcctgagtagctgggattacaggcgtgggccaccatgatgcctggctaattttgtatttttagtagagatggggtttcaccatgtttccaggctggtctcgaactcctgacctcaggtgatctgcctgccttggcctcccaaagtgctgggattacaggcatgagccactgcacccggccttcttttcatttcttttaagggtccatataaatgtatttgggtcaacttctattttggaacttagtattttggcattttttcccttcatcaaatagttacggagcattggctttatgctagagccaatgctagacactgcggtgcagataagtcagactcaggccctgcccttgaggagctcccagcccagtgagacacttacggagtgttggcaagtgctgggagaggggccacgacagggtggctgggagttactggagggagagctatctgaaaatgaggagaggtagtccaggaaggctttctggacgaggggcatttaacttagttttgacgaaggagtgagtattctcgagatgagaggggaaggaaaggtcattatagcagaggggacagcctgtgtgaaagcttggatgcctgcatccgcctgccatgcttactcagggacctgggtagttctgtgacttctatcggaagtgaagggatatgggtcatgttgtggccagaagggccaattcagaaaagtacttcgtaaaacagttcgacatttatcctagaggctgtagggagccggtgaagggtttgcagcaggggtgatgcagttacatggggagggatgtggaggatgaaggcccttggccacctggtggtgtgccacaccagggggatgaaaggagtaaaaatctgtggactgtatccttgggggccttaaa

SEQ ID NO: 104080 - DNA, 1912 bp, Homo sapiens
agagttgggctgtggaaggacatcttcaccgtctccatgaatgagaagtttgacttggtgtataaacagaagatgggaaagtgtgacctcacgtttgacttttatttataataacagaaacaacaacctgcatgctcacaatacccagacagtctactagccaaaagtcctgtatgcattcatttattccttgctggacaaactctggaagcagcgtgtgaaacagcgggggaagggaagagcggcgtgagcggagggagtgtgatgattcccaaccgaaagcagctgtctcgcctttagaacgtgcagcctctccatgtctgattacaaacagtctccacattgcagttccaatggcctggaccgtaaggataaagcctgtaatatatgcaactagaatgtctgccttttcaaccccgtattattgtattttatagagcttttcactggaaatctacataaatgtcagtaaaccaaataaaagttcatttccaaggggaatcaggagcgagccacacccgaatggtagaaagatctcagggttaactctttatttttgtagttttattatctaaggcacagccattctgttctcacttggttctgagatagtggtgagaacagaggatgagttgggtctgttggggggaatctggacacttgtttattctgacggagttcacttcttcagaaccttcctgaaatgagcagaaattgttcactaggtcttcagaatggacgtccttctgccagagacttccagcgggcggctccaaaggcccaatgcagaggagcccgcggagcatgtgctgagggaagtctgcctggtgaggctggcaggtgggagtctaatgcagtcaggagcatttgcatgcagtgggtggagagtcggccaccaaaggaccgagttgcgctcggaatttgagctgaattccacagccttactttgtttcctgaagtgatagcctactaatgctggcaagcagatgcttaatagtaaatttctaaaatccccgggtctttatcattcagtttgttctgtgcacctgaggcgctcagccgtgggaggaccattttgcgagtgtagccctgtttcactcggatcaggttggcacggccgcctgcgtgtctgtccacctcatccctccgtgtatctgagggagtaaaggtgaggtctttattgcttcactgcctaattttctcacccacattcgctgaagcgatggagagtcgggggccagtagccagccaaccccgtggggaccggggttgtctgtcatttatgtggctggaaagcacccaaagtggtggtcaggagggtcgctgctgtggaaggggtctccgttcttggtgctgtatttgaaacgggtgtagagagaagcttgtgtttttgtttgtaatggggagaagcgtggccaggcaggtggcacgtggcatcgcatggtgggctcggcagcaccttgcctgtgtttctgtgagggaggctgctttctgtgaaatttcatttatatttttctatttttagtactgtatggatgttactgagcactacacatgatccttctgtgcttgcttgcatctttaataaagacatgttcccggcgttgcgtcgagcgtttctgcttgtgggggtagaggggtccctgcagcggtgctgtcggtgcttgggacaatatgactgtgggccccgttgacaccccattccctggggttgacagcagagggaaacaggcccgtgttgggctttgatgaagcagaattcagactttccaggggttcacttctccccattatttcactcaaattcagactttccagggggtcagttcccccactatttcctcattcacctctgatcacttctataaatggggtggaggagaaagggtaaaagcatgggagatgcgggtgc

SEQ ID NO: 104081 - DNA, 1858 bp, Homo sapiens
gtttgcattgcctccaagcaaacagtgttttgacttgaaaaagtgcatttcaggctttgtgggcgggatgtttctcagcagggagtctactcagatggcctgaaatcaaacgccccacagagcagatccagggactgggtttggtgctatgacatgtcaaagcgcaaagcatgctgatgggtttctcagtctctaactgacttgtgggagagttaaatgaagtgggcgggaagttaggagacaccgtttttcttccttcactgagtggacgctgactgagcatcttctgggtgcaggcagcacaggtgaggcctagccccacttcggggtggtgaacttaagcagacagtaccaagctaagccgctgcacagagggaggccagttcctgctcttggcggcaagtgacagtgggcatgaggcagctggagatggggacagtgttcctgacaggaatcctccccagatccacctgggttgctccccctgtccttaagggtgtgtggcatttggctttgatgatggagagcccaggctctaaaacccctgaatcccagggtgctggccttggccataggaggccccctgttggtaagtatgaacctgatggacacttggtgtgttgggcacttcctgggttgagaatgtttgcagggagggcccagaaacgtggatggctctgttcagcagcagccccacaagatggagtgggagatgcctggggcggatgagagacgcgctgggctccagctcagctctgctgccctctgggaacgcaacataggtcaggccttcagcttctgcggctttttgttcttctctgaaaaggggctgatcacggctaagggcggtttgaaggtcaagtgcaaagtgccgtctcttataaaggcagagcagtggactcctcaggaggaagtgaactgaaccacagtccctctcgacttctttcctggctgcattttcataaatatttgttatttaacatttatttgctcttttttagttttgcttttgctgtgttttgttatccttggatgtgaccttctccaaaataccccttttggttcacgtgtgtgtgtgtgtgtgtgtgtgtgtggtgaagcagcgtcgagaacatactgtgtgcccatatgctccttcccttgggtttgctttatcatggtttaccttggttttgctttatttcagttctttgatttgttttcttttagcacattgcgtctttgctcggaagatcttcttgagttggtgagaatgcagggccgagtagccagctgcattgcttagatttgattcatgtcacagcataaattgtcttgattccaaatcctaaaccaggtgggtgactcctctgacgagctctcagctgtctcagctgagaaaaataatcatggaaaaatagtttggttgctctagcagcttctaattttgccccttaggtatcattaaagggttacaagaataatttttcttgtttttctctccaacactgataattttttgttaccaaagagaaagtccgtgttacgttgggtattttagctcagcatttgcagggttgcagtttgaaaaacctgaggtcctgcctggacaaggaccgctgttaataacggagctagtgaaggacatttgctggagacagagctctgatctcagagagctgacaatggaaagaattctaaacgagcagttcttcaaaagcagggaggcagtactcgggtgatgtgctcacagctcccataactgggaagtttggaatccccgccccagacatcttcacggtcaccgttgctattggactagaccaacctaagattttatattaacaaagacaatgggagcaacaacttctcttgtcat

SEQ ID NO: 104082 - DNA, 1042 bp, Homo sapiens
ttttgagtgggggttccaatgacttgaacgaaaggagccagggcaccaatccgggtttgtgtagcagatgccggtgagacccgactactgcagctcgggggtggccggacccggggtctccccgctgagtctcggggcttcaccggcgcgtgggcacaagcacagcaccctcgggtcgggggtgctaggagggctaagagcagcaggacttgagtgacacccaacagctggtctgatctctttcaggcgccaacgccagacgccagcctcccagcggaccctctcgcagacccaccttcaccccacgcgccctccccacacagtccacgcgccagcagcttcgcggatgtcagtgaacgctcttcgcttgcgcagtcagaacgtcctccgcggccgtgtgaacatccgggtcacaggcgcataaggaccaatgagcgaaggcatcgcgagccagggggcgcggagaaggcggggaatcatggccgcccccagtgttccgcgtccgggggtttgtgggagttgccttgacctgcagctccgccaccgcggacccgccttctgccctcagcagcagacgctctgtcccgcccgggcagctctgcgaggcagcggctggagagggaaccatggggactgtgcacgcccgggtaagaggcccagcgacccgcgggctgcgaggcctctgggccagcagggcagacgggcgccgcggggagacgctctcgtggctgcgcccagggttcaccgggagagagggtgccaagggtgccgggctgggtggaggaggccgaaaagaggtcgcctcgggccagcgagtcttgcagaccttcgagcaggaacctgataggagggacgagacttggctaaaggtcactcggcgagtccgtggcccaaaggacttgccaactttctgtgatgtcttagaccgcagtgaatgtgctctttctttgcatgattttaagttttctctctttactggtcacttccagcctttccccgctcagccgctgctggagccattgtaggctcctagagcaacaag

SEQ ID NO: 104083 - DNA, 1018 bp, Homo sapiens
aaattgaaacaccacaagaagatgtgcatttcttcctcaaagggagagctgaaaaaaaaaatgaaaaggtgtgcagacacacgtgtctttcttttgccagacataaccactgttcacgattgtgatctcttccagcacaacgttctagactgtgtgttaggtttgtgtatctgcgttagtcttgttgtttatacgaaggggattatatgttgcacactcttgatgccaaggcttggttttgcacttgtgaatgggcatttttgttgcccctgtggtgcttttcccttctgtcatgtggctggtcttggtagtgctctctgctcagtgatctgacttagcaccgaatggtaaactaccagcctcgccgtgtggctgccatttgctgtttctgtatcgtagaagaatatattccttgtttttcttcccccattttataggtaatgcggaaatctcatgaagcccgtgaaaaattgctccgtcttggaatttttagacaagtggatgttttgattgacacatgtcaaggtacatattgtggtgtagtatctttataattccctttctgtccatcagagaaaagctgtttttatggccagatgcagatctgggcagcagagcactgctccctgctgtgtagaacctgaaagttgatcaaacaggtagtccttgagttagcagtctcagggaagggattggattttttgtttgtttttggagaggggtcttgctgtattgcccaggctggtctggaactcctgtgctcaagcgatctacctgcctcagcctcctgagtagctgggcttacagttgcgggcctggatttttgtatgaggccggggaggagtggtgaactttgaagatactgttgtgtgaagccctggactccacgggggcctgagagtgactctgaaggagggggccaggcttcgttcacatagcccagcccagcactgtgcagacccccatctcagtgtatgctttaaaaagaggagggaatccaatttccattttagttttt

SEQ ID NO: 104084 - DNA, 1086 bp, Homo sapiens
tttcaaaattcggtcatttcatttaccttaatctgttgttatttgtggtttctctttaatcaccgtagaattggtgataatatgttttgggttgtttgataacaatgttaacgttagtaattaggaatgatttggagaatgttcatattaatagtctcttgttcaaattcctttaaactctaaatctgtaacattcttgagcctcacgggtggcaaggttagcttgtcccttgcattaatcaggtttgaatgcaggatgtgagcactcagcagcggcatgttttaaagaatgaaagtgattacaaatgaaagactagatctgtagttagcatcttccttctgtttttatgaaagtcccttagctagcatagtctttatccaatccaaagttctcattccttcaatgtagaccactgctattttttttttttcccctcctaggtacttggcctcaagcttcctaatcttcttggtcgtgcagaaaaggtgacctttcagttttcctatggaacaaaagaaacttcgtatggcctgtccttcttcaaaccacggcccggaaacttcgaaagaaagtaggaagcccaacagatcattgagtacactggcctgatagaaaagttaaaataggtggcttatttgtgaaaagaaccatgacagaatcagctgccacttctgcagtgaccacatgctgtagatttcctcttgaagatgagccctacgggcgtagtgttaagtctgttgatttaaatgtgtgcaagttctaatcactgtttcagcttttaaagctctatcccattgtctcctagtttctctgtaaacttatataaagttactggacagttcccttggagctcactgcgggagacggacagaggaatgtcagctgagtacagtgtgagtagcatttcagtccttccctctgggcttgggggaaaacagggtggctttttcactgattcccaaaggcagcaagagggcagcgtggaaagcacaggccctctgccctccgcaccaggtacctcctggccaggtgcctcttctctagccgagtacaggctacagggacccgagagtggctgatgccca

SEQ ID NO: 104085 - DNA, 1005 bp, Homo sapiens
caccttctctctgggccggtgcaagtcgctgggttgccaggcctggcttcagacagggtcgggtggaccaggtggggtttgcgccatcagatcatcttaggtgtcttacccattacaaagaagtgggaaagagatagcacctgtcgatgatagagctgcctgcagccctcagaccagccctgtccctcacctggggtgcagtcctgctacttagagcagtactgcctttgattcccttcacagctttccccctttcttcctttgtccttcttccctctggttttctcttccccttcttctcttcttccccttctccctctctctcatcattaaaaaaaattagatatttagttcattgtttcatgatgcttcattccaaaaaatgatttgcaacaagttcctaagtatgtgtggtccggaaagatgtctgatctccatgttgcagtttcccatatggaagaccagccacactgtcaagtgggaaggcgtatggcgagaactgggctgcctctcaaggacggcgtcatttgctgttcgaaaagaaagcggacattcactgaaatcatctctttcggtaacggtttctcttagttggagtaaataattttgttgatggaaccatgctatgcattgggaaaacagtctttgccaatatcagggctgactgagaagcgtcacccagatggggtgtccacagtggcggcccccactccccgagggcttgtggtgtcctgcctcgcgtggtcctttccgaataatgtcagtggtaacaggaagaggtgtgcttcagagctgactgtggaatttcagctttcaaaaagaaggaggaaccaggctgagccgactgaggccagggcgtcgagctccttgagagaacgaacccggtggtgggtgttcaactcccacgtagtgagcaggaatcgtttattcagttgaagctcaagtctcagtgtggacgtctcagtgtcctcctatgtaagatagggacagtcaccctcacttcct

SEQ ID NO: 104086 - DNA, 1225 bp, Homo sapiens
ttagattacatagtcattaaagttagagactgtgccttacttgaaaaaaattcttacaacagctaacataatgcccagcattaagtggttggttgagcgaatgaagcatacaagaaaaataatcatctaatgcccttacgaagaaaaatctgtttgtctatttaataaacaagtcatgatggccacagagctgagtaggattgggtgccttcctcagggagttcaggtccagaagagactcccagcagatgcctgggtgctaggggtgcctggaaagcttcctagaaggcatggaagtctccaagctgagactcagagtggggcttcccaggtggtcaggggatggggaaaagtcattctaagcagagggaacagaatatgccaggcccaaagaattgagaaggcgtggctcattctggatgtgagtaagtgtggctccaagtcctctcttgacctgggtcctaatctcacttcatgcatcctccctaatctctaggcctggctttaaaaacaactgcagggcccagccagggggagccagggcttgtctgggagagctgggagagcttggaaggacgggcacgcactgttgctcacaggtctttctcttttcaggggagggccccaaagctcatattcgtaagctggctgagtgcatccgctggtcgtacggggccgggattgtcctcaggcttggcaacatcgctcggttggaacttaattactgcgtccccatgggagtacagacaggcgacaggtacgtgttgggaattattttccacaatcacatcccactctccagtaattttattttgttttggacgtggttaatttcattagtggcttttaagcttgaagattttaagagaattaaatagttgcaaaataatgaaaacacatgtattttcctcctttgcgtttttctccatctagctgggaggagcaggtgtgaagcgttcccaccccctccctcaggtgctttgtgcttattgttcccagggtagtgggagcccctgccagggtctggctggaggaattgacaggtgatttggttcctgtgtgctgaaaacagaaggcagtgttttgagcagttgactttgcaggccagggtctctaggaaagttggggtgagtgaagctttgttcctgaccacagaggacacgatcttgagaacccctctctctacagcagaggaacccaccttcttggcttttcttcacccctt

SEQ ID NO: 104087 - DNA, 1037 bp, Homo sapiens
gaaataattttcatatgaagtggttacatttacctttcagctttacttccgtctcttcaggttaaatctaaaaaacacgtttcagagattaatttcaaaatatggtttattccgggaggaagcagcatcctaagcacgtgacatttaaagaccaggctataaggaagtgcctctgcccccaggccaggtggcagctgttcagatgtttattatggacagtgagctctgaacggggtcagcctggcaccccgagtgtggaagacattttcgctcagtgtgaggccttgtttgaggttggtcatcaatattggaatttcgtgaagttggagtgaggttgccagatttaatcttcatttctaaaatttggtagctggcaggatggggtatcgtgtgtgtagaaattatccacaggtttcccccataactgaggcaggcacactgtaaataggacttcagacattcacaaagaaggaaacagttttgagatgtttgcttactgttatgtcgcaagtgatttgtggcaccactgtctctgggatctaacagcattctgtcagtttgtgtcttaggagtccggtctctggagacacagggctgaatcaggcaggctcgcttgggagagcagctcacagttagcagcaggaagacaagaaagtggatcatcttggttgttggggagggtgctgagagggccccctggagcaggtccctgagctgaatcttcctagaggacagacagccaggtgcttgcagaagacacgcagggacagtggtcctggctaacaaaggcaggagcaaagctgtgcaggtgtgcgctgtcggcgggcaccgggcagaaccgcgtcctacaggaacagaagggggagtggggaggtccaggccctgagctcccacgcctttgccttccagccccgctgacctttttccccttgggtatatgccagggtctttgagctcaggacttcatctgccttgttcaccgctgaggtccccatgactacaactgcacctggtgttggaagtgagagccaggtgga

SEQ ID NO: 104088 - DNA, 1068 bp, Homo sapiens
cacacctgcagaaggtcagctcataacagatatggcaaccaatgtgacctttgcatccttccttcctggggtcaggagcaggtctaagaggtggtcaggctaaacccctgtagggctgtgggtactgctggtttcctaagccccgggaccttctgggggccgggcggaccttaagttctgtccacctgcctctcctccatcctcactacccaccttgtccttccggctccttccctccctgctccgcctctcatcggccctctgtcctctccgtccggagaggggaacgtgaaggaggtgaggagggagtagtgcaggaggatttgggtctctccttctttcccttttccattctccgagggcttaaccagctggtgaaggttcttaaccagcaaaggaggaagcagccggggccggtgagggtgaggccggcagccaggcaggaaggcagcaggaggaggaggaagcggaggcggcaccttctgagaggcgcatgctcagtgagtcgtgaagatggcagggctggcggagcggccgccgcatctgatctctcccctttttttaggatatgtgatggcgtccagtttggagctgggataaggttcctgtagccgacacccctacaggagaagctctgggactggggcagcagcaaggcgcccatgccacacaccgtctctcgaggaaacgcggttcagcgattctttgactgcggaccctgtgggaaaccccgtcaataaatgttaaagacacactccgaggcagcgtggatgtggtttgctttcactcaacagtatggcccgcgtggcctttccccgggaccacccgtgttctcacacacccgcccagtgtctgcgagtctccgtgtttggttcccgtgtaccagacatgatgtattcagagccaggcagcaggagggagctttgccccagaggaagctcagccatgctgttacggagagggcgcgctcccctcgatgcaccagccgttgtcagaggaggcccacggcagcgggcgcttggagccacagtgctcgagccatttgagtgtgtgagtggcaagggagaa

SEQ ID NO: 104089 - DNA, 1052 bp, Homo sapiens
gcaacatgcgcttctgccactccagggtggagcagcccctggccctgactttgggccgtcagagctatgctcggttgcctaccagggagtgacagggcgcttgggaggtttccacgaccctgcctgctgcaccgtcggcttcatttcctcctttgttagaaagttgagggtggatttgggagaacggatgtggctccgacatgttcctgagttgaggactctaagggaggagggggaagctgggggaaggggcgggctcatcggtgaggttccagattcaggcaggggtgtgacaaggcacggagggacttttgggagggatggttgggatgagtgacgtggcctgttccagaggagaggggttaggaaatgtggggccctggggtttggaggaagcagtgcaggaagtgtctgagaatgagcttcacggtgggcgtgattaaggctgatgtgctacgggaggcgtgtcacgtggtggcctgggtcagaaaagggaactgtgaccaactgtgggcattcagaaaatggaaaggaacgccggaaacccccagggctccccacagaagctctggggacgtgaaaggacagcgtgtttcaaacttgggttcagctttactggggcttggaggagcccgtgtgcagagaagaccaacaacacacagggttccccactgtgaccatgtgatgagaggccctgtaggtccagtgggccaggatggaggtcggggacagcccagctgctgctggaagtcctcagaggcggatggccggccctggccagtgtggaagaggtcgggtggagtgctccacacatttgccacaagaggcctgttctgtgctgcaccaggcactggacctcaggcgccactgcccagtggccagggtcaggtttctcagagacagctgaaggcagcggggcgagagcagccagtctggaggttctgtccctcttttctgagcaacacattcaggaagtttctatcccctgattaccttaaaaaatatgtatgtgtgggccaggtgaggtggctcacgcctgtaatcccagcact

SEQ ID NO: 104090 - DNA, 1981 bp, Homo sapiens
tgggaaacgctcctcagggtggtgagtggaactccctggagaccattttccagtgagggcctatctctttcctcttgggctgagaggaagtgggtggctcagctacatttcctttgattattattctgactataatcttcaaaccctacatttctcattgtgtgttccgcccatgcgttctgttgtccggggcagcaaagtcgacctgcaccacgtgggtgtttttgttttcttttgttttgttttgttttcttgaaggcctactaagagctgtcggaaactctgcttctgtagaaaaggtaaaggcactgcttggccacaagtgatgactcttccctgcctttcggggcttggggaggaagggcaggttctcggtggttctcctagcaccttggttacaaacctcccagcagagtcagatcaccttggcaaccccacactcatcaaagggactctgccttgattccctccccaccgctgtggaattaatatcgattgcacatcctgaaattgcttaccctcgcgctccctgtccagtcgtcagaataattaaggggtgtttattggatgtaagtgggttcatccctgctgcgagtatggattttaagtgctccgttggattgattcctccctgctgtggttggcacagggcaggtacctttaccgagctgttttcttcttttcgaacatgcggttccatcacataaaagacataccctatgaaaatgtctctgccttagctgtacatgttacactttaggtttcaggtgaaaaattggtttatctcctaatatgtctgctatttgttacatcacatagaggctgcaaaacagattaataagctttggaggatattataagcatacgttggcccaatggtattaatttgcttatccatactaattgctgtcttggtaaaagaaggcggacacaatgcaatcaatcctagaagtgttctgtggctttgcaactttgagatacctcaggctgacatattcaaatgagagccttctctctggttacaagaaaaaaatggaatgagcagcagttttggcctcgtccagtctctagggctcccagcatctgggtagtaacatgatcagccctgggaaaccagcggagtcttttacctcctctgatgttctgactaagagtgtctgggccgtggggactgaacgcaccctttgaggctatgtgtgttaaagtttgggggcccatttcttcatttctaatatggggcagtgtgggcagatcccagctctgcgtttctgagctgctgagtttgccctggttctgagaatgcccgtcgcggtggtgcagtccgcctccttgcactggatctgttgcttcttctctctaagcctctgttcctgatggtcccttgtggagcaaagcagcacttgtggtgtaaggaaggaaagcctcatcagcaattgagtgagcgctcaatcagaattcgttatggatgaatgtggatgactggaggcattgacgcagacaccagagtccagagctggtacgtggtacagcagaagtggcaagtcagctcagtttaggacaagtacctaaccctgtgttgagaaggattctgtggctgagtctgggcttagggaaaaagaatgctgggaccagtcagccacactaccagtgtgtatggagggttagttgctgagtggctgtcacccccagaacaggagccttttccagctctagtgctgtgtcatttcagcagcactggctgctttattcccattgagtgccgtgcaacagctagttggctgttggtaacaaaagttgtgtgaatcgtttaagatattgcagtgagaatgttggtatcttaactcttcccctagctgtctgtggctaggaagcatctccagtgctattgtttttttcttgagacagagtcctgctctgttgcctaggctggactgcagtggcatgatctcggctcactgcagcctctgcctcctgggttcaa

SEQ ID NO: 104091 - DNA, 1039 bp, Homo sapiens
gacagagcaagactccttctcaaaaaaaacattgttccggatttgctaataaggaggcaacctcctcagaccttggtgtcacaggagaatggcccgcggcagccttagggccagttgtgattttatccacagtgttggtcagatgcgtcctctgtgcttgtttaatattcattctgcttgcgtgaacaaagccatgtcagtttcagtaacgcttgtgccagggggcacccggtgtggagcagggctcagtaaaactgctgcaaagaatgttccaggctttttgaaattacgtggagttgctggggctctcttgaggctgttaatttacttagggctgctgtgacaaaataccacaaacccagtggtttaaaccaacacaaatctattattttacagttctggaggtcaggagtcccaacatcaaggtggcagcagggccggttccttccggaggctccaggggagaatcccattccttgccttttccaacttgcagaggcacctgcgttccttagtgcctggcctcttcctctgtcttcaaagccatctcccgatctttctctgtctccttcgccacacctcctctggctctggccctcctgcttcctcttgtaaggaccctgtcaatcacattgggccccctgcataatccaggctaatctcccaccccaaggtccttacctaatcacatctgcaaactccctcttgccatgcaaagtcacagtttcctgggacttgatgtggacatctttgcagggaccaagatccagccttccatagagacagtgacagatggagtagaaagtacatcctttgagtttttacaggagacactgcagtagagagaatggtagagtcccgaaaccctgattcattcattcatgaattcaccgagtgttcacggagcacctgcctcagtccaggcgtcatgttgggagcaggggagacagagcaggccatgcatctgtcctttcagagcactgtagacgcaaatcctgtagcacagatgtgccttagactaatagtgcctcgaaaggag

SEQ ID NO: 104092 - DNA, 1027 bp, Homo sapiens
tattgattcttttccatggaatgtaccaaacattttccatttcattataaccatccagactcttcaaatgtatttataaatagtggccacagggaactacctggtgcctgaagctttcccacataccagattccggccagcggaggcatctcatgccctgtgaatgctgctctctccttatttctcctgaaaaatggaaatggtttggaccagctgctggcggagtctgggaggagcgaggccgggcagaatgatgagtttgacttcatccctttccagaagaggggaaggcgggaggatgccccatccaccttccagaaggcggttccttgcagtcaccctcccctagtgctgggttctctgcttctccatttgtcagagatgagttggcctccccctggttccccgtgtccctgccacccccacaatcgctgaccgtgacttccttttgtccctggcagaggagaacgaggagcgcacgatgattgaccccacttccaaggaagaccccaagttcaaggaactggtcaaggtaaggagctccgtcttggttggaatcttcctcttagggcgaggacttggctttggggttcagggctctcatggacaaagggagctaaacccggggctcctgaaagggatgttggtgctgcatgagaaggtgggcagacatgttggcagaggaggacggcagagaggatccagcccgaagtgccaagcgcctcccatgtgccctgctcggctggggctttaacgaccagtcttgtgaactctttgctggacagagctcggcaggaggggattttaggattaggaatgagtgctggcgtgagctagtgtagtaccttacagatggagttggaactccgtctggagcctggtggggtctagattcagatttaaccctgaaaagcaggaggggtcaccctggccactcctggccaggagccatctgatgccgatgcctgcgctgagtggacagtcagtttccaccacgtctggaggcgtgaatcccagctgggcgagg

SEQ ID NO: 104093 - DNA, 1051 bp, Homo sapiens
tttttgagacggagtctcacactgtcggccaggctacagtgcagtggtgcaatctcagctcactgcaacctctgcctcccgggttcaagcgattctcctgcctcagcctcccaagtagctgggattacaggcgcccgccactacgcccagctaattttttgtattttagtagagatggggtttgaccatattgccctggctggttgcgaactcctgagctcaggcaatctgcctgcctcagcctcccaaagtactgggattacaggcatgagccaccaccacgcctggcctgctgtgcctgagttctaacctttatagtaagttggtaatcctcagtaaaatgcttttctgagctctgtgtgttctgccaaatcactgaacctgaggtgagggccctgatttgtaatcagtgggaagaggctcaagtagcctgggagccccatctgcagctggtgtctggaatgaagtcaatttggtgggactgagccctcagcctgtggggtcaactgtagctagtgttagaatcagactgaactctaggacaccccattggtatcagataatcagagaattgctgttggaattttcatgtgcgtccgtgtgaagagaccaccaaacaggctttgtgtgagcaacatggctgtttatttcacctgggtgcaggcgggctgagtccgaaaagacagtcagcgaagggagataggggtggggccgttttataggatttgggaaggtaatggaaaattacagtcaaagggggttgttctctggtgggcaggggtggatctcacaaagtacattctcaagggtggggagaattacaaagaaccttcttaagggtgggggagattacaaagtatattgatcagttagggtggggcaggaacaaatcacaatgctggaatgtcatcagttaaggctgtttttacttcttttgtggatcttcagttaatttaggccatctggatgtatacgtgcaagtcacaggggatgcgatggcctggcctgggctcagaggcctgacaggaatgacacgttgggtgtcagaaaa

SEQ ID NO: 104094 - DNA, 1067 bp, Homo sapiens
atatcttgtgggtcaccttgactgtcttggggtgatgagagggcagtattaccaatgcttaatcatttgcccccataccaaggtgaacacgagatgctctggtcctagtggctgcagagttgtgcagcctctgtccctgtgctagctctggacctggtggtggccgcagagctgtgtagcctctgtctctgtgcttgctctggtcctggtggccacagagctgtacagcctctgtccctccgcttgctctggttctggcggctgcagtgctgtgcagcccctgtctctgtgcttgccctgtccttgtggtggctgcagagctgtgcagcctggccccagagctgtgcagcctctgtccctgtacttgctgtggtcccggtggtggctgcagagctgtgcagtctctgtttctgcactttccctggtcactgcctcattgccgtggcgctggtggactgaggccataatgcctgcgtctcctgcaggtcctcctcgactggattaatgacgtgctggtggaggagaggatcattgtgaagcagctggaggaagacctgtatgacggccaggtgctgcagaagctcttgggtgagttcacagcagggacagctctgtcccacccccatctccctgcagcggccctgggctgggccaggattctctgcatagtgacatcggccacaggtcctaggaagacactcaaagctgcagtgtgcatctcccaggtggtgcccaggccctgggctgtggcttcagggtcctctctccccttgccgtttctacagagcacccagccatggggcagcagcaggttggggacagcttccaaaactgcctgcggctcccatcctgttgggtctcaggcccactttgtgtccctgccaccctcttttgacttgaactccttcggttcaggatgggaggcagcaggagggaagcgggtctgcagcaatattctgtgagtgaatgtgtcaccaaatacatgatagctcatgttccctcaccaggggcgggctctagtgtctgcatttgctgggtgaaggcagtttagtgatcttcccgggact

SEQ ID NO: 104095 - DNA, 1397 bp, Homo sapiens
agatgttaatctcctttggcaacaccctcacagacacacccaggaaccacgccttgcacccttcaatccaatcaagctgacagtattaaccatcacgcctgtggagaggggaagtggctcagatcctgcggggcttgaattgagaagatgcagccagcgtgtcccccctaggctttctttactagaccttaagctgtgctgggaacattcacaggccttctctgttttttgtttgtttgtttgtttgtttttaaggagaattccagctcttttaaattgtctctattattaaaaaacaaatgcaggaagagaaagagaaacatcctgtatatagttgctgagggaggcgaaaccgcagtggggtcacagctcatgggaccggggtgaggcgtctccccaccctgcgtctaggtagaggcgcgttttgggggcccagtgcccccctctgtcacctcttctccatcttttcttcctggaggaggctcagaacccctttggaattgtagaggcctaaagatgaggagagggccgggcgcggtggctcatgcctttaatctcagcactttgagaggccgaggtggatggatcatgaggtcatgagatcgagaccagcctggctaacatggtgaaaccccgtcactactaaaaatacaaaaaaattagccgggcgtggtggcgggcacctgtagtcccagctactcgggaggctgatgcaggagaatcgcttgaacccaggaggtggaggttgcagtgagccgagattgcgccactgcactccagcctgagtgacagagcaagactctgtctcaaaaaaaaaaaaaaaaaaaaaaaaaaaaaaaaaaaaagatgacagtgggcccctcaagcatttttgagtctttttgttttttttgtggcgctgtcacttttgtgtttggttcgggccttgttggaggtttagggaaaagacagtctgttcagttcagttgggagcacatgggcctcaggctgtgtatagcaccctgtggcccgagggcccagaagcctggccccggagcccctgccaccccatgaatgagctttagggtctgatggctggggcagtggctccctaggtaagagccaggtgtcacatgtgaaaagtggacccagctgccactccaggggtgggaggactgtggaatcgcaagaccatgtacaagaggccgatggaattgttctcgttactttgtaggctttatgtgctgtgcttgagaaaatgcaaacaggctattagtcggtgacaggcaattagttccacccccggccttgctgcttctgctgacgcaggttccgaagtctcctggttacccagcctggcaccctcaggcacagcagggtgtctggcccggcacccgcccctgtgggggcagcagcac

SEQ ID NO: 104096 - DNA, 1065 bp, Homo sapiens
gagttttgtttgccacattttctttgcggtcttttccatgggaccgtgtagtttttaataattgtgatcacatctcggtagagttgtaaacccttcccccattctgctgcagctccaccacctgtggttttccctgctgcttcccaagctttccaaataccatctccagtggtggcacgaagtcccaaggatggctctgttaccagcgtctttccattccccattcttgggcagtcaacttgaacatgtttctattgtttttccctactgaaacaacagagcatctttttgatacagattttttttttcattcctgtggattgttttcttaggaaaatttctcaaatagggtcaaatttggggcattcctttcaatctgggctggcccacgccacccggtcccgctgtcactgccctcgtgcgtgggcctctccctgctgtctgccctctgtccagggcttcccgcagccaagcctctcacagcagtatttagcacattgcctttaaaaacttggccatggatggtctatgttgctttggattcatgggcatctgtcattttattttcccaaagtgttagacccatgagtcagggaggcagacaatgtaagctggtggcgacagccagagaaatagcagaaatggggccagtgtttatcaatctgcccacttctggcacgttgcagtctgtttgcttgtggccaaatgttgttcctatcttgcctgctgagatggaatcaggacagattagagaggtcttggcacatggagtccatgttgaatcgagagagagagagcgagcgagcgagcaagagggagtgcagagggaatgagcagaattgtgcagaactcaccaggaaactcaccaggtgcctgtgctgtcatcctggaaatgaaaggtcagaccatccagcgaagaagcgcatgcatttccaggccccgatatggctggttgcagacacattgttttggagagatcttttctttcttcaaactagtaagaatgctggcgagaacagtgagtttagccaggagacctagggctggtttctttccaagacaagg

SEQ ID NO: 104097 - DNA, 1002 bp, Homo sapiens
actgtgggccaggcgcagcggctcacgcctgtaattccagcactttgggaggctgaggcgggtggatcatttgagcccaagagttagagactagcctgaccaacatggcaaaacccgtctctaaaaaaaataataataatacaaaaattagccgggcacagtgatgcgtgcctgtagtcccaactactggggaagctgaggcaggaagatggcttgagcctgggaggtggaggttgcagtgagctgagatctcgccactgtgcactagcctgcgctctagaccctgtctcaaaaaacgtaaataaataaataaacaaagaaataataaataaaatggggcccctgtgacttctcatcaggtggctggcatctggggcagagcaggctcttggtggccgtgagccctcgagagcaggccgggcacctcatccttccatctctcagcccagatcactggtgtgaggggtgagaaccacctagtaagcgcacatggccctccgcagacttcctcacccgtgtctgcccaccctgtggcccgccccgggctcactgggtccttgtggacgtcagcgttgcagaggctcggtcctgtccatgccggctgtcctccagcagtgggccgtgtgtgggaacgactgttggaccctaacgctgacccaccccccttccttggcaggtccacaatgtgtccttcgcctttgagctgatgctggacggaggcctcaagaaacccaaggctcgtcctgaaggtaatgcccctggctcaggttcccccgggagaggtgcgcacggaggggaagaaaaacgggtcctagaagtggctggaaggctggcatgttgttccccagatgggccccacgtctctggctctggggcaagggtctgccaaccccagctcctcagtctcctcattttgggaaccaggaggacttcgctggtggagctggcagtgccggttctttaataaccacttgactttgaaggacgtggcctctgcccaca

SEQ ID NO: 104098 - DNA, 1924 bp, Homo sapiens
gcactgagccccaaatcacggaagtcacttagaggtcacagagcaagtgaaatgaacaaggtgtctgattcccaggaaggttcttgtccacataaagaaagtggcccaagacttccagggccccagagggagctgtcgggtccattaagtgttactggggtttttggtcccggtaagtgtcattagccatgtcccccaaccggttcttagacatgtcctgatgcagatccaggaggggctgtgggagtgtctctgttcttgtcaccccaggtgcctgtccccgcagggtgtcagcccgcgccaggagctctcacaaaacctgtgtgtctggggaggcactgcccagagcgtcctggacatggtggtggccagtctttaaggggaagcgctgtgtgtggatgcggcagctggtgtcatgctggagacgtggcttctgagagtacctaccgcaatgacaggaggatggcacgcctctgaagtttctctgtttccttctgcagacgtggttaacttggacctcaaatccaccctgagggttctttacaacctgttcaccaagtacaagaacgtggagtgacgggggagctgtggatggtggcaggagtgtcccagcaagaaaggcggcatccgtctgtgccctgtgcctttccagggagccaggcgccatgggcttctggtccaagctgtgttgactgtcatccccaccccacccctacctcacgcctgccccaccccctgcctcttttggttgttgttcttaatctcctctccatgtagttcccagtgggcaagagcctttgaaaatgcaggattctaaacactcgtgcttgcgtttgaagcctcgcgtcactcagtcgcgtgggatgatgagtccgttgttgtctgccttggccgaaagatgaaaaaaagcctgaaccccaacccccagctggttgagagcaccctgcattctgcctcatggtgcagttagcgatcacaggccttcagaagtacaacatcagctcagcaggaacgccggctccccgaggacccaggcttgacgattcaccggggatctcctgggctgggctctccttggaagtgaggccttttattaaaaataaaagggttttgcagtttgaaaaactttaaagtcccagaagcttagatgtgacatgggtgtcctccacccacattcctatcacttcttggtcactcgttttaatgtaggttttgcacaaacatccaagactcaggatggcccagctcccacagtccttgaaaggagctgtctgctggggacgtttcttaatttcttgctgtggttgaggggctgggtctggagatggctctaattgtgctgcttgagacagcttgggtcacagctttccccttcagaggccctttttgggaatgaatgcatctttggaaactttaaaatgaggggggtgcattggttcactggcactgtgtagtaaagtgccacaggggagtggctcagacatcagagaattacatcctcaggcctttcgccttggcttgtagatgccggcttctccccgtgtcttcacatggtctcccctctgtgtgtctgtgtcctcaccgcctcttttattttattttttatttttgtttttattttttgagacagagtctcgctctgtcaccaggctggagtgcagtggtgtgatctcagctcactgcaacctctgcctcccaggttcaagcgattctcctgcctcagcctcccaagtagctggcattacaggcaggtgccaccacacctggctaatttttgtatttttagtagagacggggtttcaccatgttggccaggatggtcttgatctcctgacctcatgatctgcctgcctcagcctcccaaagtgttgggattacaggcgtgagccactgtgcccagcctatttttttttttttttttgag

SEQ ID NO: 104099 - DNA, 1056 bp, Homo sapiens
tctcccttagagtatcctataaaaggagtcgctgctcactcagttatgggttgttcaccccctcgctcaccccagctctgcagagaactggggatcccatcggccatgctttctgggctggcctctggtcgcagtcagtccctcgctgtggcgcccccccctcccccagctccttcccagggtgatgacccgctgaccccctggggtgcacctgctgcaaagcagcccccttccttggcatctctcagcattctccgtagtgagcctggcctttctgatcttgttagctttttgtcttcctgccgcagatcagagctttggagtaagttttgatatgaaatcgaatgccaacaccgaagttttagaaaacagtttaatattccctctcagttccggctgttgctaggctggggatgggttcagaatagccattttgatggaggtgatttcccagcaggggaaagaaataattaaaacagcattacggtgtctcttgcgggatgcagtgacattcaaaagccacactgacaaaaagcctggggctggaacgttctgtgctgcctgcatggcatgtacaggaccgcggccccctggagctggtggagtggcccagccttgccctgctcacaggtggacctggagagggcactgtgccttcccagggattgggatttgaaaagaacagagcttggccaggtgcggtggctcacgcctgtaatcccagcactttgggaggctgaggcaggtggatcacttggggtcagaagttcgagaccagcctggccaacatggtgaaaccccatgtctactaaaaatacaaaaattagccatgcatggtatgtatgcctgtaatcccagctattcgggaggctgaggcaggagaattgcatgaacccaggaggtggaagttgcagtgagctgagatcatgccactgcactccagcctgagcaacagagtgagactctgtctcaaaaaaaaaaaagaaagaaaaaagaaaaagaaaagaacagagctgtgattttcagccaaaatgagcagccctggcccattctgtg

SEQ ID NO: 104100 - DNA, 1004 bp, Homo sapiens
ctgtgggcacgtggggccctcggaagaggggaggagggtgagcacgtcctcagagggcagacccagcgaggcgtcgtggcagctgcggccgcggagacgccggctccgcctcttgcacacgccccctcgcctgaggccccgccccgcccgcgatgcccccgcccccttccccgccccgccccccggggcgccgagacccgcccctgggcccgcccccgggtccgcccccggcctccgtttgcgccgggtctgtgctggccgcgcgcctggcgctccacgctgagcctctccgtgcaatgattaacccggcggggcggccggcgcgggacccgagacggaggcgcggggccggggcgggaccccgcaggaccgctcggcttcctgctctcgccggagtttccgcgtagagggcgcatcgccggcccggggcccttggtgcggcgtggcgcagggcgcggcgtggggcgcgcgtgggcgcggcgcaggcggcccgggtcaccatgaggactctccgcaggttgaagttcatgagttcgcccagcctcagtgacctgggcaagagagagccggccgccgccgcggacgagcggggcacgcagcagcgccgggcctgcgccaacgccacctggaacaggtaaggccgcgccctcccggccacccggaggccctggagccgggggaggggacccctgagccgtccgcgggctaggggccgccccgagccaggaacgctgccgaaggcggcgcggcgcttcacagtttgcaaagaacttgccccgccggagtggtgcgggcctggaggaaagttcagtgcagcgtggttccagaacccagggaagggagcgaggcccgccagcgcccggggctggcccagaagcgcccggcgggtgggcggcggggtgggccgggaagccgcgtgcccgcctcctacccggggtctttccacgtctccactgcggtgctcgtgacaacctgggaggctaacggagcaggaagtatttttc

SEQ ID NO: 104101 - DNA, 1033 bp, Homo sapiens
ctcctgttgggaaatctccctgacccaacgactgcacagtgtcttaagagctgtgttctccaccaggcacggcggctcacacctgtaatcctagcactttgggaggccaagatgggaggattacttgagccagggaagtcgaggctgccatgagccatgatgccaccactgcactccagcctcggtgacagagcaagaccctatctcaaaaaaaaagaagagcagtgttctcctccagtattgagatgaaagccatctctctgtccttgaatctctgccgtgatttagaggaaagagttaaatagacttatttcaaatcccaactctgcctcttccctactctgtggtcttgagcaagtcaggtcctcaatttccttatccataaaacgggcagataacagtgcccacctcatggggctgttgtagggatgaaatttgaacatgcaaaataaagccctcaacacagtgcttagcacatagtaagtcctctgtacctcacagctcaaccccagactcacgcagtggaccagtgtcggggtgtccctgtagggatggcatttggagggctccacaggaatcagtcagttcctgagcacccactgacagccacttggtgagctccctcccacccccgaggtggggcgtcctgctgcgggtccccagacaggtgggggcactggctggttgctggcttagacactgccctcacccaaccttgggtgaccctggagtgggctctgagtctcaagtgtcttctcagagttcagggaggcctcagggggactctgcctgagcaacccccgccccaccagatttcactcagcagcctggcagattgcagagaaatgccagcccctccccgcggcacctgcagggctccaggtctcccagcccttaggcctacatcagctcccaccaccccaggcagcaggggcacggccatttcctgcactcctcttatgtgccaggccccaggccagccccgttcactgcccttaactgactttgccactctcctagcccagcgaggtat

SEQ ID NO: 104102 - DNA, 1033 bp, Homo sapiens; identical to SEQ ID NO: 104101

SEQ ID NO: 104103 - DNA, 1033 bp, Homo sapiens; identical to SEQ ID NO: 104101

SEQ ID NO: 104104 - DNA, 1033 bp, Homo sapiens; identical to SEQ ID NO: 104101

SEQ ID NO: 104105 - DNA, 1063 bp, Homo sapiens
caccatgccagctaattttttgtatttttagtacagacagggtttcaccatgttgtccaggctggtctcgaccacctgacctcaggtgatccgtcttcctgggcctcccaaagtgctgggattacagtcgtgagacaccgcgcccggcctaaaagcccaaagtttaaaccaatccgctagcagcctcggaggtcgtcaggaaggcagggaggccctgcctttcactttccctcaatcctgtggggggtgggggggctcctgagaatccctcgggctctgccacaccctgacttggaaatttctccgctgccttgggaggagtgtgaaggccccggagaaggaaccgcagagtccacccgggaaggagggtgggattgtttggcgggatggggacagcaccttggccaccgacttcagggttttgtgacagaggctgtgtagattccagagagctctgtgccgtccctcgcttgcctgtgaaatgcagtgttggcatttgtccagctgagaactcaatgcttaagactcagccgtttcagaagtcgatgtcctttggttggcctctctgttggcagctttaggatcatgtttgtggactcctcattcgattcactgactaaccattccccaaaccaacgccagagttgggggtagggcgaagagggacatgggatgtgggcctgagcccagctgattcttgtggacagccagctgcctggtccctgccctcaggggcccagagtctggcttctgtgtagagagaatccaagggtttgtgggagcttaggaagggcttcctggaggaggtggccattgagctggaaggtggatgggaggtggatggggaagagaatggcacctactggctagggatacttcgcttgtgaggtacgggtggaaaagtccatggagtgcctgacggggtgggccaatttacttggataacatcattgggtcattgaaactttgtgtgtgtgtgtgtgtgtgtgtgtgtgtgtgtgtgacgcagttttcgctcttgtcgcccaggctggagtgcaatggcacgatctcagctcactgc

SEQ ID NO: 104106 - DNA, 1332 bp, Homo sapiens
tccagcaggcaaggggcagctccccgaagggtgtgaacacagggtcccagcctgggtctcgctcctgtgcccctctccaggccctagcaagctgctccctggcgcagggaggactgggaagaggcactggggctccgcctggagaaggcaggcccaggggcctcggctgggacacgctgggcctcccctgcttggcacccggggtcctgcaccctgccagggaggccaacctgatcctgggtctgcatgcgaggccctgccagctggctccaccacctccacccatctgcctcctgccctcagaagccgtggtctggtctccgggatcaggtgattgtggaaaaacagaggaccaaagcccggggaggctgtggggcggggcgggcagcaggtcatgtacctggtgtgagaggttgtgcgtccctggagggtgctctggaatcagttgtctatactggaggaggaaggagtgtccttgaggaacttgctggagtctgacggcccagaactgcaggtgcggaggagtcagagtgtgtgtgggcacgtgtgtgtgtgcatgtctgtgcacacgtgtgtctttgtgcatatgtgtgtctctgtgtacgtgtctctgtgcatatgtgtgtctctgtgtacgtgtgtctctgtgcatgtctgtgtgcgtgtgtctgtaggcatgtgtgtctgcatgtgggcatgcgtgtctgggtgcatgtatgtgcatgtgtgtctctgtgtgtaagatatgtggaaagtacgcacatgattccaagaccccgcctgcctgtcttcctggggacccttccgggggctctctctgggggtctttgctgccctttcttccttcctctccccagtcctgggctctggcaatgctctggaatccctcaggtgcttggcaccaagtcggtgagtagtggggcagggttcttgctccatctcacagcccagagagagcaaaactcctggccaaggccacacagcagtctggcagcagaatgcagcctgagggagcagatgacaggggctttggggaggccttggggtgggggtggggctgccgcaggtggagtgaggaggctggttgaaaatggatatcaagtctgggaaaatggccactgcttggctccaaaaccaaaaagtctgggcttacctgtgtcaaggtaaaagaaaatgcagagccgggagttacaggagccatcctcaggctggtttgctgtgtgaccttgaataagtgtctgcccttgaacaaatgtctgtaacttcaccggcctttgtttgattctctgataagtggggaagttggatgtatcacggtaatggagctgtgga

SEQ ID NO: 104107 - DNA, 1062 bp, Homo sapiens
ctgccaagggcttctgcatccagggtgggcagtggcagcttgtcacccttgcccgattcccacatcccagtcctgagggactcagcacaacaggataagcgtccaggagccacgggctcccaccccgagcatatcacatggtgccgaattgcactgaacacgcgtgtgtgcatcgcacgcggccacgaccacagacacgcatgcacacacgcagaggtgcagagcgaggaggccggcaaatcccgcagctgccacggtccctcctgtcattctcacgactccgggagaaactgtgctgtatgatacagatctattttaatacacttaccactgggtgaacaagatttttatattcttttattgatgaacaaagtgaaccgtgtgaggcacacgtcttctatattggctactctgtgccaagtatgcattaccgcgtggcttgcgatgtccatgtcttcagcttccttttctgttggtttggttttcttcgcggatggattgagttacatgttttaacagtgtaatgggaggatctgaaaggttggacccgggaggggtagctgccgatgtgtcttgagattgttaggttttttttggaccaaggaggaccgtccagtgggtagtgaggatagagaaaaagtgtttgtcttaaatacgccaatgtagttttccttctttacaatgtattaaactcgatcgatgatttcaaagccctgtggttttggtgtccttgcgttgcggagaggcccccgggagtgcccagggcagccaggtgggcgttggaggggctggaaatcagggtcttctcccatcctgaggagggagggatggagggagggaaacagggagagagctcagtgccctccactcactcacccccgattcccagtcctcagaggcggcgggtgaccctttagggctaggattgagggtggaaagtcttggaaacccagcaggtctgtcactgtgcagagcccaaggtggtgccctctgctccctcatgggttcctgcctctcagcctggcaacatcaccgctgtctctctcccccagcagcgggtac

SEQ ID NO: 104108 - DNA, 2024 bp, Homo sapiens
atgccttcacatgaagaagggggtgttggcacccttcccctgtatccatctcacccactcctgcccacatgggccaagagtttgcctctagtccctgagccttgtccagctgaccggggctctggaaggtcccagctgttggggttagtctgcctcttccttcggccccttcgccttctaggtggggaagcaggtgcttcacagaagtccctccctcccagttatttttatttgtccaccaaagtctgagagcagtgttctcttatcctctccccatccttccccacccagcactgtttctctgggggccatttaggcagcctctcaggcggcctccttcagcccctgggatcattcctgatccctttcagttgtccctcataacttgggaccccaaaatctgaaattaaaatcctcctgcatcctgttggcccccgctgcgcggtgaagcctcattattccggcttattaacaggaggactgcatggacaaggggtgcctgtgatggggctggcgggagattagcaatgctaatgctggtaattagggacgtggcattggcgctgggtgcaggcttgctggtgaatttaagggccagatttcctgttaggaatgtgggaataattaaggtggctggagggtgtggacaggcttgcccggaggcaggttcaggccctcttgccaagaggaggtgcggaaaaactggtgatctaagcccgtggcacctgccctggtggaggtgcggcatcttaagcacttctgcatttcacagattgctttcagattgctttttacagaaggggaaactgaggcccagggtggcagtggcttgcctgagtccccaccccactggcccctggctgtattttgaggatggggactttattgttgtccccaccacctaactctgggctttttgagtttttgatagatacatcactcttcctgcttaaagcccagagcccaaccatgtcttactcatcctcacctccctgggcctctgcaacctcctcctggtctccctgcctccgtgggcagcctcttattcatcttggattactgggcagctcctggactgctgggctcccatctctacccgtctccctcttcctcagacccaccctcctgcaggtggcctttgctgccttcggccctatcccttcgcccctccctagccctgctcccacccatcccctgtggccgtgacttctcctggtctcctcgttgatgctgggacaggacgggctgggtgtcccacagttacctccgccccatgtctgggaaccctacttaacttccaagacagcgccagcatctccttcaccctttcctggtccccactgtgctcacagatgcgttgagccccctctgccgcccccacctgggaagctcgtgggaggtccagtgggagaaccttggcatttgctcagtgcgcagtgcttcctgcatttcattgaaacttcgcggcaactttgcaaggtgacaggtaaggcctcaggtggggacaccagtcacacatggcagtcctggggcagagctcagacgtgttctacccacagccctctctccttctccacttacctaactgcaccctggagcttcagagtctccccagccgtgggtgaaggagcgtctcctgcctctatgggtcgtgcagcttcccgcagtccctggctcatcacagcagcctgcttttggctcagcgggagtctccctcttccccagccctgtctgagccgatcttgagttttctactggaggctcctaaggggtcttggcagaaggcaggaagggcctgcgcttgtgcagctgctgcagatggtcggtgccggctctgagctcacgcactggaggcgccgtgtgtgtgcagcccagcagcctggtggaggttttgtgaagtccttggtctttttcagtcctcaaccagctcctgcttttctgcaggtccaggtgctatcaatgcatagcagagaagcgagacacgagtccttccttagtgccttcctggtcatcagtgaggccag

SEQ ID NO: 104109 - DNA, 1964 bp, Homo sapiens
tgggatttcttcctctgagctctaaccctgtgcacagcctccccaacttcacctctcaggtcccacgttggacccttgttagtttcgtaagcttgagcctgttattaagcacccttgcaccgctgtgtgctcacatgcaagatgaggtgatctgagtgcacgccttgtagacctggaagtgtgaagcagaaccgtggctgttacagcttagcttaggtcctggtgcctctcagcctggccgttaccttctgctgctggcttcagaaacattggtctccccgggggtcccactggccttccttctcacctctttgctagttcccaccctcatcttgccaatgtcacctccatgccaatgttttcattattttttcctacctctgccactattcattcacccctcagcagctttcaccggaaatattacagcagccccctgactggtctctttactcccagcctctgtccactacaccgtgaccaaagttgtttgtctcaagtttagctagccttttatgttactcttctgtgcgtaaacacgaactttcattctccttggccaatggcagaagtttctaatgtcttcttagcctctctcgaggtatgaatctgatagacaagctgctctgcttggagctggggcaggggcctggatccccacctgcatctgccctttccccagctccaggaccccacctgcacctgccgtctccccatctccaggaccccacctgtacctgccttccccccacctccaggaccccgcctgcacctgccctctccccagctccaggacccccaactccaggaccttcacctgccctctccccagctccaggaacactggcatgtgggaggcatctggggctccagcgagcacagtgtagaagccggtaacttgaggaataaaattcaagactgttgcagtggacagatgggggcttttattatctggcctcaaatcctttcttcagtctcatctcctgactcaaaactgcagaccatttcccagacatactaaacatgtgggggtcactgagcctttgctatcctgcttgggttgcccttttttttttttttttttttttttgaaataagatccagcccatccaccaagacccaaggcctggagcatctccttaccctcaagaaaggacctctggatgcatctggattggatcatgcggatgcaggtggtaatgaggatggtgatggtggtgctcctggtgatgggtgtcatggtgatggtggtggtgctgctggtaatgttgtcatggtgatgatggttgtcgtgataatggtgatcattgtgatggtagtggcggtggtgctcatgatggtgctgctggtgatggtggtgatgatggttgtcataatgatggtgataatggtgatcattgtgatggtagtggcggtgatgctgctggtgatgggggtgctcatggtgatggtggtgctcatggtgttggtggtgctgctgctggtgatggttgtcatggtgatggtggtgatgaggatggttgtcatagtgatggtgataatggtgatcattgtgatggtagtggtggtggtgctgatggtgatggtggtgctgctgctggtgatggttgtcatggtgatggtgatgaggatggttgtcatagtgttggtgataatggtgatcatggtgatggtagtggtggtggtgctgatggtgatggtggtgctcatggtgatggtggtggtgctgctggtgatggtggtggtgatggtgatcattgtgatggtagtggcggtggtgcccatggtgatggtgatggtgatggtgttgatagctacggtgataacatcagtggtggtcatggcagctgtcatttactgaccacctcctatggtgagtaaaagtgttttccatgttgctttgccatcacaacacatccctgtgaggaaatattatctcccatattatctccacagtggaggga

SEQ ID NO: 104110 - DNA, 1103 bp, Homo sapiens
tggctgtgtaattacaacctgaggttcccagcctcggcagggatggcagacaccgaagctgtgggctggcgagtggtcctgctgagggctgggcgctggagagaccgagcccctcagctgggggcagcatggcccagcacccccctgttgtcatgtggcatgggccctgtgccgctggctccttggatttttcaagagaagccagaaatgaagtgtgatgtttggatatgggcaatacagcctttccacatatccccggccagaagggacacccctgcagatcgaggtgaactgtcccctctgcgaccatctttgagccccttgccacgtcccctccgctgtgccctcaacacctggctccttcctctgcatcgtctggggcccggcggagatgggcagtcaccctgacctcagggacagagtctgtctttcccccgaatcacgtggggggatgggggggtggaggtggggggcgggggggtcatctagtaatttcctccctccctcatctctgtctccactcaacatctcggaaggtgccgacataccgagtgctaaatgcagtgactgagtcagactcgacgcgccgaagattctagaaccttagcatcctaagatgcaaagagtctgtgttggtgattcccgagattcaagaccttggttctacagtggtccaagctcccaaggtttagcgattctgtggtcccagagtgagccccagactcctgggaggggaggagctggtcacacaaccagagtgcctcgggactcttcaagggtgcttatctctcatttagataagtaagtggaacacaaatgcatttctgtaaatagactcgtcccccagccccccacacactccagccccagccactgcctcgttggagttattttattaacgtgttctgctgagtggacttgaatggggaacgctgcctctcatattgtggatctaattataagcatgagggacggtaccaaagaagcggctttgaagggagaagagtctggcagcttggttgaaagtgtcctttaatgaacttctgtggcacttgtatcttagcaacacattttattacatcctggtgcagctggacttgctg

SEQ ID NO: 104111 - DNA, 1053 bp, Homo sapiens
gccactccaaagagtccgctttgataccttagagtcttaaaacacctgctgtcggaaccgtacaattgatttcaattaactttgaattttttcaatgaaatgactctgataataactttggtagtcccatgatgcctcattagagctgctggctatgatgattagccttgtgatttaccaagtttttcctccaacgcctttgtctcttcaggaaccgaatcatgggctgtgtctttgatttcacttgtgtgagcagcgaacacacgaggctgctactcgccccatctgcagacacactgctggtcctgagggcgccacactccttcttcagcagccgaggctcttgatatgtatggggcagtgtctcggggaggctctggtcacctctagggggttaaggagctttgagggtgtccggtggcccagccttggaggccctgccccccgatttccctcccgagtactgtttagaaggcttttaactttgtctccgagaggcgtgtgacaaagtgatttacagtgcaggctttaaaactggacagactggagttccaatcccggctccatcctttgccggctccttccgcttggggcaggctttgccgccttggaggctctggttccgtagttataaaaggggattaataatagttcatggccagccaggcagcagagtgcctggtgctcggtgagcactcaagaaacaatcttcgagaggccgcaggattagtgagtggtgcattaagctctgggcccacaggaagttctcacccagtgggactgatgacgtgtcctgacgcgtcctggtgttcctgtggggcgctggctctgagcaggtgccttctggttctctctgtggactggctcggcccagagaggttgggggccttgttgagatcacacccctggtgagtagagaagccgtggtccagttctggaccattgggtgcccagcttcgtgaccttaactccaacactggcacgtgtagggggagaaatgacagcgtaatggcaccaataagaaaagtgaggtgtggactgttactccggggc

SEQ ID NO: 104112 - DNA, 1842 bp, Homo sapiens
aacatttgaaaatcctgtttgaaggttgcggcagcttcgggaaggagctctccgactccgggctgcctttgcctttaaatttgaactccgggaaggaggcttgcttgcgaactgacctccatctttttgtgtgtgtgagtgtgtgtttaaaaagaaagaaagcaaggaaaactttttttctccggccttttagaaatgtttcccttttaaatgactaaacaacattgggtaagcagccaggatttggcctggccattggaacttgtgtttttaactgcgagggtgttgtttttccatttccctttgtggcattttatataacaagggctcataaaagagggaggggagggggctgcggccgtggttcagcatgctaataaagccgccttgtctttcccaggctctgcgttgaaatctttcagaggtcacctatgaaatgagttagggagacttaacatttactcccctctccctctccttgggagagtttggtggtgattggcagcttagctggggaaaggtcgatgaacaagcctttggaggtgactctgggctgaactagggttttgaagaggcctctacttggtcaccccagagcctgcccagaaggagccgaaatgggggagtggaggtgaaaaggcaagtgtgtcacagtttgtttatttaactcaacagaaaattaaaggtagaattcttttagagagtcgcttagggaaacgcttataccatctccacctccagagatgttttctgtgctggaacatcggatataaaggttaagtttcaattaaaagtgcacatgtggatgatgaactagatagtaaaatgaacagatgaccccgttatccaggtctgttagcagtacgccagcagcggaatcctgtctttcagggcccaaccatgaatttctcattcatgcccttagcgcgatgtttttctcagttactttaagaaacatggacaagtgtgtaaaggtgtttaaaggactcatagtggtagatagcttattggtcagggtagatagagatatgttttctgtgtaactgtctagtttttgtcctaccattcggagactagggaattaacaggaagtgagtttacataggaccttgctatttgaaaatgaagttcatattttccactaaaaaaaaaaatgaggcataggatagttggtcagagctgatgagttgtggccaggcccaggccagctaagctgccttcccaggtgtggctgcactttgctgctgggctgtgattcagatagtggagggccctcttctttaacaagatatgatgtgtgaagactccattagctgctccagtggtttacaccatgagattgcagcacatgcaggggcagtaacatttttatctaaattgtcaagcaacaagcccttctgtgtaagttaaagacccagcgtaaatactgggtgggtggaggtcccctcttcggagttccgagcacagcatttagatgccatgtgtgagctggcatctccagacctgaacttcatgcaggtgcagctttacagtcaggttgggaagagccttctgtttgaaccgcagtccatgctgctgtggtctcatgagaaggaccccggaggtgagcttgggaccttgtgcactaccccaagagtccgtggagctgatgaactctgggttctgagaggctgtccccgagtgcagcagtaaaagtacgttgtcttgaaaggtgttgtgtgcgcgcccagcgctgagacgtgtcttcaccatgacttaccagctgtgtccagcaatgggggattccaccttagaagcagccactgaatgaagctggggggttatccacagccccaccccaca

SEQ ID NO: 104113 - DNA, 1006 bp, Homo sapiens
cagctgggccccagtcacctacacatggggtctcctgttctgtagacaggccctggcctcggctgtgccatttactctttcagccccactaactctcccctgctggggcccatgtcaccacccagctcattgcccaccagtggaatgctgtcacccctatggaacagtgtcacccatcaatggaacactgtcaccctcccatggaacactgacaccctcccatagaaactgtcacccaccaatggaacactatcacccccatggaacactgtcaccttcccatggaatgctgtcacccccatggaacactgtcaccctcccatagaaactgtcatccaccaatggaatgctgtcatccccatggaacagtgtctcccaccaatggaacactatcactcaccaatagaatgctgtcactctctcatggaacactgtcacccaccagtggaacaccgtcacctgccaatggaacactgtcacctgctaacagaacactgtcaccctctcatggaacagtcacccaccaatggaatgctgtcatctgcatgcaacagtgtctcccaccaatggaacactgtcacctgccaatggaacgctgtcacctgctaacagaacactgtcaccctctcatggaacagtcacccaccaatggaatgctgtcatctgcatgcaacagtgtctcccaccaatggaacactgtcacctgccaatggaacgctgtcaccctctcatggaacagtcacccaccaatggaatgctgtcatctgcatgcaacagtgtctcccaccaatggaacactgtcacctgccaatggaacgctgtcaccctctcatggaacagtcacccagcaatggaacgctctcaccctctcatggaacagtcacccagcaatggaacgctgtcacccaccaatggaacactgccacccaccaatggaacactgtcacccaccaatggaacactgtcacccaccaatggaatgctgctaccctttcatggaacagtc

SEQ ID NO: 104114 - DNA, 1009 bp, Homo sapiens
cactgggagcctaacagcaccaatgtaaagttctcattaaagcagtttccagatgctttttttccctgataaaaaaaccagagatgtttttatctcacttcatgctagagtgaatttttaaaattctttataagaatttattcttctagaaaaataaactcttctgttttctataacttaggttcgaaaacatggccaaaagaaatgccgagaaggaactgacagataggaattgggatcaagaagatgaagctgaagaggtaaaaagcagcttccctaagaatgatttcctgtttcttttgccttttacattcattttggggttcctcatgaagacttgtgacagaactaaaagacctttctaagaacatcatgaatgggagatgacaagaaattatatgacctgtacttagtgtagatatttattaattacatttctgtgacctctagttagtgtagaaatgtattaattacatttagatgtgcttttccactagtgcctgctccttaaatattctccttagtagaagcacttttcctcctgagtttcgtatacttgaagcattctgaacccatgtttgcagtaagccattttagtcatgactgaaggctgagttaagtgatgtagtcatgaacttagcacactgcccagatgtgaaagtggtacaccatcaccatcttggtctgtggtactccgtttccctaatgcttcttggaggcctgctttatttccttttcttaatggtagacctgagacccctaacaattgcatttataggaatagaattgagattggcctagttccttttccagcagaataaaaatggtctcccctgaggaaatctgatcatttttcccttataaacagtaggactgggcagcatagagagatcccggtctctataaaaaaaatttttttttttttttttttttgagacagagtctcaccctgttgcccaggctggagtgcggtggcacaacctcggctcactgcaacttttatctcccg

SEQ ID NO: 104115 - DNA, 1016 bp, Homo sapiens
catctctactaaaatacaaaaattagccgggtgtggtggcgggtgcccgtaatcccacctactcgggaggttgaggcaggagaatcgcttgaacctgggaggcagaggttgcagtgagccaagatcgtgccacggcactccagcctgggtgacagagcaagactgtcttggtgtggggggagatacagtaaaagcagaaagtatgaaggcagagtggcaaaaaaatctagatgatttaatcaaattaggctaaataaatggttcaattattaactttctataggttctcttgctgcaaatggccctaccaccttggttgataaagtttcaaatcccaaaactaatggggacagtcagcagccctcctcctctggccttgcttccagtaaagcttgtgtcggaaatgcctatcacaagcagttggccgccttgaactgctccgtgcgggattggatagtgaagcacgtgaatacaaaccccctctgtgatctgacacctatctttaaagactatgagaaatatttagcaaacattgaacagcaacacgggaacagtggcaggaattctgaaagtgaatctaacaaagtggcagctgaaacacagtctccttccctttttggctcaacaaaattacagcaagagtcaacgtttttgtttcatggcaacaaaactgaagatacacctgacaagaagatggaggtggcatctgaaaagaaaacggacccatcatcactaggagcgacaagtgcctcatttaatttcggcaagaaagttgatagctctgttttgggctcattaagctctgtccccctgactggattttctttctcccctggaaactccagtttatttggcaaagatactacccagagtaaaccagtctcttcaccatttcccactaaaccattggagggccaagcagaaggtgacagtggtgaatgcaaaggtaagtaccagctttgtcgttgagtcgaggtttgcataagattcttgtttcttgggaaacccagagactt

SEQ ID NO: 104116 - DNA, 1020 bp, Homo sapiens
tacttacactggggctttggaatgatttttctgacaacttgtcccctgttaaaaaaaaaaaaagtatttttctatctttggctattactgatacttgtagatgtagtcacaggaatattcaggggtgaaggtgttaaaaactcatccgagatggaattttccagtgggtaatttgcatatagagtgttgattttttttttctgtcataagcatggagatttttccattttaaggttttctatatattggaagttattttagaattaagaggtatgttcccattaaaagggattcttatttttcacaaaatagttaaaatcctgcaggtactcccttctggcatccccccccccccccattaagtgtgcattttagtctgtcagtttacatggagtgctccggtggaggtttagggtgttacgtaacaaaacttcagtcacttctttaagctctggattggaatcttactgaattattgtcatttttataaaaggtggagatgaagaagagaatgatgagccacccaaagtagtagttaccgaagtaaaagaagaagatgctttttactccaaaaagtaagaatccccacaacctgctggcgcatgtgttttgcaggcatggtggcatgcttcaggctggagaatgtcctcacggcacttgactgagcttccagtctcggggtcaagctttgcctgctctcaagtggaacaggaaagaattcttggccagtttatttaaaaatccagttctagaaatgtcctggtgggcaggtctcactcttttctgtcactttagctcttttaaagtgctttagagacaggatcttccatgatcttcccaaccccatcccatcccatcccattccatcccgtcttctctccctgtgtctttctccctccccttcctcctccccaacaaagaaatcgcagagtcagtcagtgatttcaggtttggcctcagaaggcatctctcatcccttcctggagacttggttggcctttctggattttctcatagtca

SEQ ID NO: 104117 - DNA, 1393 bp, Homo sapiens
gagggctgacggttctgagcgaggctgctggctctgagagaaacgctgtgtgggtgcagagacccgggctggagggaggacggaaggccactcctcacagtgagggcaagtgctccccgaggcctcccagttctcagggaaccagtcctgattttgtgctgtcctgttggctccctgtcttagatgtattaagttatttcagcatttaatgtttagcatattacagactcctttggtggagctatagcttctataattttgatgggttttgtttgtttgaatgcaggcaacatattgctgaacgttctgattccacccaatatgccatgtacgcgaacagggaagaataacgttcttatcgtctgtgttccaaatccaccaattgacgagaagaatgccaccatgccagtcaccatgttgattcgggtaaaaaccagcgaggatgcagacgagttgcacaaaattttactggagaaaaaggatgcctgaacacgcaaagtcggctgcagaattattgccaagttgctgctgcttccaccgccccttaaagttagtcagtttttcttctcttctttgacattctaagaacttatagataacttaaaacttttgtgaggaagattaatgtggccaataaaacctttaaatgttaagtgtcaagaaactgcactctcccttcttaagaactgcctaaagtgtaaaatacatttgaatgcaatttttggaagattttttaatgttcgtttattaaactaaccctaagtgatttcttcaaggactgcaatcagggtatcaatttgctttcccaaaggctcttccaacccgtgggttttggggtccaccgccaccacgagagaggcttttgaacaggtgcctggctgtgttcagaaggaagctggcctgtgtgcttctctccggtgggctcagccgacgtgtgagacttgttctgttaccaaatgaaccgggctgccacgctgtgacaggcgtttgtcctctgctttatttttactttgaagctcaaatgcgagtactaagtgttcacctcagcgttcgaatcattggcctgtaaccctgtgggctgcttcacgagaattcaggacctgcattttcattctaaaaagaaatgaacagcttgtgaaggagttttttggcttcatagtttctattcatgaggtagtgttacttctttatccccctaaagacaaaatgaagataaagggggattgccaggaatgggtttaaaagcacaaatgtggtagcttatcatctacaccatggagagtgaacccttacgaaatgaaagtcaaatgagaccatccgagaaaaagatgcgcataggcatttgtaccatgatcaaccccacgcacatgaaaactgtgaccaagtgacgtgc

SEQ ID NO: 104118 - DNA, 1783 bp, Homo sapiens
cactgaggtgtgattgggccaatgttggcatgaggttcttgctctacttccagtgttttgattccactgggagaatttggcctagtgtgtggctttggatgaatccgtgtagagagaggtgagcttgtcctgttacagatgctgtcagacatagcgatagtaggcacctagggaggaagtggccgttagttttacactgactttttaagaatggagaatgcacgtgggtttctgttgcggatgattcatagtaagcaagcggttgatgctgttaataccggccccacccgattgacattaagtttattcagcttttaaaaagatgaagaactaaggggaacaaatttaagtttgttgcaacttagccacacatgcttccctggtaccagctggaatcagcagctcacaggcatcttcaggacacttcagtgtatatgacacagtactttgttagcgtctgcgtgtgtatggaaagttgacaaaaaatggcatgaaaagatcatgattggattttcttttaaacctgcccttctgtaaaaaatagtttatatatttttaaattagtaggtatgtgtggcttccttttttcctaacattcccagcaaatttttgctgctaagactatcactgttaaagtgaaaattacagggaaaaatgtgatgaatataccgtaactcaaaatgtgatattttcttaaaatcactcttttatgctttaggaactggttggtctccactttgattattagtgtaaagagcctgagtatacgtggatttcattgtaaaatttaactccttgtcttttacttggggcacggggcccctggagggcttccctactttccccactatgttaacaggtaattctgatttatgcgtttagtttgacttatttttaacaaaatattagaagttatgctttaaaatgtttaatgtggactgaaattttcatcttttgtttgagaatctatgaagtgtatcatatacgtggcctaaagcaaggtgtgtattttgttattctgaaattgttttgcatctggacaaatactaaatatcccagtggcctttttttttttttttttaaaacctgtgtatccatctcatccttttgcgcattcctagtaagcaaaaaaatttgttatgccatcttcattattcgaattacagactgaaaaaatatggccagtttttaaagaagtttagattatgttttccatggaaggacaagtctgactgttcataggctgattttctttaagaggattattctgttttacaatttcaattctagatcacattttatatatgctgcatgccaaaaaaaaaaaaaagagaaaactgccttttctggtgtggaggggaagaaaaactaatattctaccttactagtagagttcaaaacaagttttcactgagagccttttcagtaaaagttaaacaagtttgttttttgagcatttgtcagttattctatttcagaagagtcaaaattcaagcacgatacattttgaaggctttgcaaactcctaaacccctgatgagtcctctcattctggaagtgggaatttgagtagatactgatttgtcccgtagtatggcagatgacagggaggtcttttccaagcaggcactcagaacacaggtcaccgtatgttctcagccagtaacaatcatactgaggacgaaggactctccgtttgatgcagacacaattgtaatggagatgtaaaacttcttagcaatcagatggataaattgtttgctttttactttaaataggaaat

SEQ ID NO: 104119 - DNA, 1067 bp, Homo sapiens
cacctggtttcaccagcccccagatacagagtgtgatgagaacaccgaggccccttcaccccaccccagggctcaacctccccctgggcagctgctgctctgtctcctcaaacttcccgggcgggttctgcctgttctcacagctcctgcatgtggagtcggtgggttctgcctgttcttacagctcgtgcgtgtggagtcggtggttctgcctgttctcacagctcctgcgtgtggagttgggttctgcctgttctcacagctcgtgtgtgtggagttggcgggttctacctgttcttacagctcgtgcatgtggagtcggtggttctgcctgttctcacagctcatgtgtgtggagtcggtggttctgcctgttctcacagctcatacattggaatcgggcagtatatgttgtttcaggcttctttctccgcatgtcatgtttgtgagtcatgcctgttgacacaggtggttgtaatctggtctcactgctgtgtaatgcctgcagagtgtaccatggcggcctggccaccctcctgtcagtgggtaccgggcagctcccagtgtcctcttgggcctggctttggtgcgcacacggacacctttctgatggggaacctgctctttcgcctgcctgtgctgtggtgctgccccgaacagccgtgtgatcgtgcccccgagcctttcattcactgagtccacagcgctttgctgagcaaaagcaaatgaacaggtcaatgaagcgagaccaggaggaacagcagagtcttgtgaaccccaggactctcagctcaggggctcggggtgactgcagaaccatacaggcggtggaagtggggccccccgacccggggacgtctgtttctcgctcctaggcaaggttggcctcttgcacctctttccatagatcccagctctgcctttggggggtgcaggcctgtgcacctgcaagagggcccagcagtgcccagcccctcggagcccgagtcagtgagagcacccaggaccgggaccagaggcccccagtcagcacagctgcttcaaaattgaaagccaggctgggcgcg

SEQ ID NO: 104120 - DNA, 1088 bp, Homo sapiens
gccggtgctgacctgggccatccctgagaccatgcctaccaggggtgtaggggtctaggattccaggtttctcctgatccagggaggagggagctgcccccgcacacagtgggagctcgttagctgctgctcagctcccgggagccctctccctgcagcaaaccccgatggatccgccccagccggagctgcttctgctttagggtacagggatgaggtcatctctatcagaggctgcgacaagaagaaggctctgcgtccaggatccttccctgaagttcagtggggcccgttctctcccggggacagttggagccagaaccactgcagtcccctttacggaggggacttcatttcctccagtattgtattggcagcgtttcattccagtgacagcccggtgacgtgaggggtgttgtccctgttggcagagggagacagtgggacttaggctaaggcacttgtgcagggtcccatagcagcaggggatgttggacctaattgtcctggattcgaggctggcgcttcccttctcatgctcaaacatatccctttctccagagaaggatgttcgatgccctttttttcctgggtgggcctgtcctggcatagtgtacgaggcagagcccagccccctggttttcacaatgcagtgggtctcagaagtcagagtagaggagggctaggaatgagggttggtgtgggagtgggcatttccaaggacgttgcctgcggagagcatgagatcgagcaggggactgagacccctgggaaggcagagccgcagaagggcccagaaggtgctttgcatccttgtcctgtgtggtgtgtcgttgccttgcacctagtacatgtgggcctgcacactgagcacctgccgtgggccgggtgctgggcacaagggtgggtggcattggcggatgggtccagctgtgtgcctggctcctggctcagggcccgggcagggagtggaggagtgagggagcagctgaagcacatggcctgagttcctctgccagggtttggcatctctgcagatatcgtgagctgggggcgtgggtgggcctcaaggttcaagggttctgtga

SEQ ID NO: 104121 - DNA, 1025 bp, Homo sapiens
cagatgagagatttgatgttcagcgaggggtgagcttactaggaacttgatgcccagagtggagcgcacctctcacctctcaggtgtgagtcctgagaggagccagaacaccagccccggagcacttctgcgtccactgaatcatcaacactctcaagctgtgggggcagggttgtgtttgatcatctccacttcacctctgtgacagcctgttagatttatgaatgaatttaaatctcccagatttttgttgttgtttagcaaaagcttgggttactcagaaacctgctgtgtcctctgacgttgttttgaaggtgtcaagggagcctcaggtggaggcgctgggctttggttgagtggttgtcattctctgagtcagtgtctgtctctgagatgggactaagctcctggccctcctcactcaggggtcatcgctcagctctcgtgatgaaaggcaccttgtagatttcacatctggcttttgaggcttgtctgtggcagcctctgcagtagaaggggagttgagcacttgctctgtactgagagggggcgggagtgttgggccctgatccctgccttgtgggagggcacagtccatgggggagacagccaggagcacaggtcactgttagctgaagtacaaaccctgctggaagcagtggggctgcggctgcccggagcaagattttggtgttgcatccacaggacactgctcatgactccaggtcacagatgaaccaggtgattcaggacccaggtgtgcgatgcagacatttggactgaagggggacaaaccctgccacttcttcccggggcttgggccttctcctgggccctgggcctcagcccaagcacacaggctccctttcaacaggggcagcccacccgacagttggtcaggtaacgtggacgcgacctgggcccaagacctggtgtgagtcctgagaggtgccgtgagcaggtgggacccacatccggctgcttgtctctgtgccctgcctcagctgagcattcttggagcaatt

SEQ ID NO: 104122 - DNA, 1678 bp, Homo sapiens
aactgagtcccagagaacaagtgcatccccctaaggtcacacagctgcagggacatggcagtcccaggcattcagggcccctcagcaggccacaccctggaggctggagtggagagaggaagtaaatttgaatcccttttgtaggaggcaggcttagcatgggaggcttcccagtgagcaggccccagcctagcctgcccaggcgagcctttcctcatgcaggggtggggtggggggtgcttatgaagtgaaatggacaagaacttcaatggttgacaaggtttcaatggtttctttctgaaaaggtgtcaagatttacttttgagcagaagttggagcgtgcttattcattcattctgcaaacattcattgagcacctactgtgtgccaccgtggcaggcccacctgtcagctggcaccgaatatctgagctgggatgcatctgaaggaccatctgctgcaggtcacttggccctgtttgctcagcagcttcaagcagtccctccccactcccctgtccacacacacctattgtcctctgaccacctttacctgtgagcaccttctctcctcttctaggcagcccctcccgcaaggaggctgcagggccattcccagaagaacagtgaacagtgaaaatggcacctagcatttactgagcacttactatgtgccgggtgctttactcatgctgcaaatttaatcctgacacaatgctgactttgccagggagcagtattatctccatatcagcgatgaagagcctgagggtgagagagagagagagagagagagagagcctgcccagggacaaccaatgaggaagcagcatagcagcatagccgggactgaccctctgccagcctgacctcagagcctgccctccactccctgaatatccccagccaggtctttatgtgcctacgatactcacgctgtttccttgtctcttctccaggcctcccgcacgtgccaggtctcccctcttcccctgctgctgaactcagtccctgcagggctctgaagcagagaaaacctgctgttttctctgcccggaaagccgcccctactcatgtgccccacaagcatctctaagttttcctttaagtctcagctccagtgttgcctctccgggaactctttccagctcccaggcacacagtcctgttctgcctgtgttctctttgtgccaggcacatgtttgttgggacaatcaggatgattgtggccttgtcatggtctgtgtgctgtctccccagttagcaggtgaggccttcaaaggcattacccagtctgattcatcttggtgcccagcatggggcacatacggagcaggtgcccagtaaacatttagtgaacaagtgagaaaattattatctggactggcagatgaagggcgtggagggccacggagatgggaatcttagcttcttagaaggcctcatttttggccgggcgtggtggctcatgcctgtaatcccaaccctttgggaggctgaggcgggcggatcatgaggtcaggagtttgagaccagcctggctaacatgaggaaacccccgtctctactaaaaatacaaaaaaaaaaattagccaggcgtggtggcgggcgcctatagtcgcagctactcaggaggctgagacaagagaatggtgtgaacccgggaggcggaggttgca

SEQ ID NO: 104123 - DNA, 1092 bp, Homo sapiens
ccggaccggggccgggccgggccggggcggggcgagcggagccgggggcgcgcgggcggcggcggcgcggaggtgcgctcgccggtgctgtgtttggcgggtggtggcggcggcggcggcgacggcgacgcgcacagaggcggactgtggcttccttggtgctcgcggcgggctgcgggccgggccgcccgccctccccgccgccgccgcccccgagcctgcgggcggcgccgaggccgaggagcgctcgctgcagcacatgctgcgtgccatagcggaggagcgcggccgtcttagcctgcgccgcgaggtctgcggcctcggtgagtgggacccgggggcgaggccgggccgggagaggtgagcgtctccggggccgcctctgcgcgtccgtgtttctgtgcgccccgcgcatctctgtctctgcgcgggtgtcgtggtctctgggtctgcctgggtaccctgtcttcctccatggccccccccccaccgtccctgcatctgggtctgtctctgctttccgtccgacgagcgccccgcacccctgtgcccgggtctcattcggcgtctccccctgtcagtccgtccgggtgtctgtctcatcttcctccttcttcttcgtgtctctgcgggtcttcttccttctccaggaagcccgccccgggccctcagcaccgcggtagggagtgtgggcgtgggatctgggtacacccttagcccagcgcggcagggtcgggccctcgttgggctctgggtggacctcgctgcgagcgtgccctggccactgtctcctgctacccgaagcctttgtctttccgcacccaccggcccctctcatcccttagctgtatccagggacctgttgggcaatggccccccgaacccgcccgcttggctgaggggcagggcctgctgcctctcggtgtgattctgggctttaagtcatggatctgctggggggcgtgggatgggggtgcctcgtattgtttggaagggcctgggactgcaggtgtgggtggggtctcccagccagtgaggtaatccattactgatggatcatgcccagactgaagcccaggagaagccccctct

SEQ ID NO: 104124 - DNA, 1056 bp, Homo sapiens
tcactgtatgtttgttgaaattgccccatcctcagtccactaagaaataaaagagcatccatgttcatggattgagattcccacagatcgttgcaaatgtaatgtcatcatttgcttgatcccctgatagtactgataattacacaaggtcatttccagacagtggctactgtttccattgtggaggggttttcaaagtcttccgtacataagaacaattgtaaagcagtttctgaaatagaaatctattgcaaataacttcttttagctggactttaacccttgggcatttcattcttttatttaaacagatgatgctggagggtcttgaaatctttacagtaaaacctgcaacttgaaaactagccttctgtaaccacagtgcccaaacgaagaggaatgtatggagaactccacgtggatctctgattgcgaaaccgtcacatacaccaagagagccacatgggcatgtggccctcaaggctgggtgagagggctcccctgtgtgttgaactatgcaggagggtgacgcggacacatttcaggtggactttgcaaggactgatggatagctacctcagggaccagaatccgtgggaagggatggacctggtgttcccgttcccatctgacaggctctcttttgtcaaggtggtatttttcgtaataaaaggggaagagtaaagactgtccaagcaacagtagctgccaaagagaaaatacgaaatagacactttttttttttgagtcagagtctcactctgtcacccaggacagagtgcagtggtacgatctcaagctcactgcagccaccaccgcctgggctcaagtgattctcctgcctcagcctcccgagtagctgggattacaggcgtccaccaccatgcccagctaatttttttatttttagtagagttggagtttcaccatgttggccaggatggtctcgaactcttgacctcaggtgatccacccgccttggcctcccaaagtgctaggattacaggcatgagccactgcgcccagcaaaataaacacattttataatttgtatgt

SEQ ID NO: 104125 - DNA, 1033 bp, Homo sapiens
aatgagagctttaaaacattgaggttaaattttactttgttgaatttccccattctagcttttccaagtctttttcattcttaattctatgccccattccacttgttactatactggcaaaggtgctattgtattactcatacataaagaatctttcctttatttatgtagaatgtaatatttttgtgggtctaaagtaaaaggaattcttccagttttatactaaacattcataaagccaaagcacttaataaggccaattatgatctttcttagtttttttgaataagaaatttgaaagtagatggcataatttatggaattaaaggaaaaaaaagtactggcttctcagaatacagtaatgcttggtgggattagtttttggcctaattcaggaaaatcttggagggaaaaacatatttaagattatatatttcttaaaattgcttattaaatcaattgttttaaaataatttaaaaggtagaagacgatatcttccaacacttctgtgaagaaattggcgtggaaaatattcgtgaatttgagaacaaacatgttaaacggcaacaagaaattgatcaaaaaaggtatttttataaaaagatgttggtaaggagcttacatatttataaaaatagttattatttcataatttagaggaattatgcctgagtttcatttcatcaagaaacagctaggccgggcacggtggcttacgcttgtaatcccagcactttgggaagccaaggcaggcggatcacgaggtcaggagatcgagaccatcctggctaacatggtgaaaccccgtctctactaaaaatacaataaaaattagccaggcgtggtggcaggtgcctgtagtcccagctactcgggaggctgaggcaggagaatggtgtgaacccaggaggcggagcttgcagtgagcggagattgcgccactgcactccagcctggacgatggagcgagactccatctcaaaaaaaaaaaaaaaaaagaaacagctagtaaaaatttatattcttacaaag

SEQ ID NO: 104126 - DNA, 1148 bp, Homo sapiens
ccaatgatgggatgtagttcatcatgttcttatcaatcttttatggtatgtaataacatacttttttttgttttgttttgtttttgagacggagtctcactctgttgcctaggctggagtgcagtagcgcgatctcagctcactacaactactgtctcccaagttcaagcgagtctcctgcctcagcctcctgagtagctgggattacaggcatgtgccaccatgcctggctaatttttctgtatttttagtagaggcagggtttcaccatgttggccaggctggtctcgaactcctgacctcaagtgatctgcccacctcagcctcccaaaattctgggattacaggcgtgagcatcacgcctggctgggtacatactgttgatcttttgctgccatgcgtatatatgttttgtgagaaagaatataatgaacatttggtttttatttcagtgtatgtaacatgttaaatattttaaaaccctttagatcaagccaatcaatgaaagactaagggagcttaaaggctgtaaaatggtgattgatgtcataaagactcagtttcctcagctgaagaaagtgattcagtttgtgtgtggaaatggtcttgtttgtgagactatggaagaagcaaggcatattgcactcagtggacctgaaagacagaaagtaagaaaagaggcttggatcacacctttggataagttgaagtagtatttataagactagcatacacaaacacacacaaatatttacatatgcgttttatgtgttcttttttctaaagagaaccaacatagaacctaaggtggttatggcttcagtggtttttataatgttctgttgaatttagaaaaaaaactcttatagcatttctcaacatcataaattataattttggaaattagatttcttttaataatatcttaaagcagttagttgttgttgttgttgttgttgttttaaaccttatatggaccctggatatggtacctgtggttttgaataccaggaaagattttgggtatttattttacaatgtgggctaattcttccatactttagtggagatactaactgtccttttgcatattcaaggtttaacatatttgaatttctagaaaacacaattgaaatgagattactaaa

SEQ ID NO: 104127 - DNA, 1001 bp, Homo sapiens
cattttaaagcaccttaagtaatcagtttccttcttgtcaattaagtgatcatgtctcctcaaagccacatgtatctttaagtgtttatgagaggaaaaaatgattaccttatgaataataagataaacacttgagcccaggaggccaaagctgcagtgagccgtgattgtgccactgtactccagcctgggcaaaataaaaataaataaataaataagtttcaaatataaataaataaataaataataaacagtttttttaaaggaagctttcatgctcacattattttaccgggggaaggtggtcgattatgatttaatttatataaagcaagcttttgggaagattaattatcttctagtacaggatttcatacaaagaaatttgctctcatgcttcttaaggtgaattagcaatttttcaatactgtttatgcagctggatcgttataaagaacttaaggaacaagtaagaaagaaagtagctacaatgactcaacaactggaaaaactgcagtgggaacagaagacagatgaagaaagactggcatttgaaaagaggaggcatggagaagttcaggtgtcttgggttgtacagtaatgatttagaatcattcttaatgaaattttatttcctttttgtacctgtctccagaatgaatctccttaaccttacactatactgtctcatttcatttatttcatgatttggcagatgaagatacaaatataatagccataatctgtgatagttctgtgagtagaagaggcattttgtgcaaggagaaaaacaaaggtggtaacatagcaggaattacttttaaaacatttgtataattgtgtaattgatatgttataaaattatacactgatttatgaaaatacacattggacatttttgcctttgtacatgctagtttctttttggaataacctattcatctttacatgttaaaatctagagttaccaacaccgcaaagccttccctggccctcctttt

SEQ ID NO: 104128 - DNA, 1021 bp, Homo sapiens
gaggaagctgatgccagaaatactgattgagttgtgaaactcacaggtccagacaaaagggacccaggctaatgcatgccacttctttgttctcatcatcataccactgagcgcaagaacacaaaatcatttgctggtgtattgggttatttaaaaagtatattcagaaaccctcgccaaattatgctacttttggcaagaacattatgtcctaataaataaacattcattagttaatttgttggtatagtagttgagtttatgaaaggccaacttaaatacactcccttttaactgctgttgaattatactcttttataggcagaacgttaccagagtctccttgaagaactgaaaatgaacaagatacaactgcagctttttcaactataccataatgagaaaaagattcatctcctgaacaccaagttagagcatgtgaatagggatttgagtgtcaaaagagagtctttgtctcatcatgaaaacatagttaaagccaggaaaaaggaacatggaatgctaactagacaactacaacaaacagaaaaagaattaaagtgagtttttaaaagtagatattaacagttgggttatatgtagcttgatagagggaataatataagtgacactttgaaaattgattttaaaaataagctttttactttggaatacttttagatatacagaaaaattataaagatagtataggccaggtgtggtggctcatgcctgtaatcccagcactttgggaggctgaggcaggtggatcacgaggtaaggagatcgagaccatcctggctaacacggtgaaaccccgtctctactaaaaatacaaaaaattagctgggcatggtggcaggcacctgtagtcccacctactcgggaggctgaggcaggagaatggcatgaacctgggaggtggagcttgcagtgagccgagatcacgccactacactccagcctgggcaacagcgtgagactccatctcaaaaaaaaaaaaggtggtgtagaatggtcc

SEQ ID NO: 104129 - DNA, 1044 bp, Homo sapiens
caatatttgttgactcattaaatgcatttattcccatgtatattattatataactggccatttcaataagaaaaataattttattaaactttcggtggattttgaggtatatctggtatttatatattttttaacagggtttatttttttattttagggggatgctcagaatttcgctttaatgataatcttgtgagtcgttctgtttacattgcagagttggaaaagataggcataatagtcaaagcacaaaattgtttggtttttcaggtaagtagctatagtagtttatttgattcagagttttgaaaatacatcactatattttatatgttgatgtgcattactgtttttaaaagggaactgtagagtcaatttcagtgaagaaacccaaagaaaggacccagttttttgaggaaatcagcacttcaggagagcttataggagaatatgaagaaaagaaaagaaagttacaaaaagccgaagaggatgcacagtttaactttaataagaaaaaaaatatagcggcagagcgcagacaagcaaaattagagaaggaagaggtaagatgtcatgaagatgtaaccattagttgttggatataaaactttctatgttagaatcactaggtatgggcttgggcttaccaagaagattaatttaatagtataagacaattaaagcccaatattcattaagataaactttttgatgtatttcccactatttgggtttttctttccgaataggcaggacagcctgaactagaaaaatgtctgattttcccaactaaaaacaagcttgaggggtttatgtcttatgtggcaaaggctctcagatgtttggatattaaaccccttatgctcttaaaaattattgaggaccccaaagagtttttgttcatatgggttatatctattaatatttattgtatgtgaaattaacactggaaatttaaaaaatattttaatgatccctgtaaaaatagcaataaactcattacatgttaatataaatagcatttttatgaaagataactgtatt

SEQ ID NO: 104130 - DNA, 1007 bp, Homo sapiens
cttgtaagtaggactttcaaaagataacagtatcaagcctgctatataaattttctgtagcaccatctcataccaatcaaacaattttaatctagccctcgatcctggatttagttagcttctcttgtttttatttatttatttatttatttatttatttatttatttatttatttagagttggagtctctcctcgttgcccaggctggagtgcagtggtgcaatctcggctcactgcaaccaccgcctcctaggttcaagcaattctcttgcctcagcttcctgagtagctgggactacaggtgcgtgccaccaagctcggctattttttatattttttggtagagagggggcttcaccgtgttggccaggctagtctcgaattcttgacctcaggtgatctgctcaccttggcctgccaaagtgctaggattataggcatgagccaccgcgtccagccttagcctctcttttttagagtataagaggatttggtgctgcaccaatgctttaggtagtttccatatttataaaatgaggataattgaaactcagtgaagttaaatgatttgccatggtgtgatacctaacaatggaagagagctgggatttagataggtgtatttcagtccttaaatttagacctcttaatagtctacaatagatgcatagaagaaatgagttatctacatcaaatatttcagtcatgcattttgaacattgattaaaaaggacatgtcttttggctatatttcacttcgattggtggcctgatttcttcagctctgggtagggctttttatcattaagaatgaataatgttttatctcttttcttccccaggaaaatctaatgtaatggatgcacttagttttgtaatgggagagaaaatagctaatttaagagtgaaaaatattcaagaactcattcatggagcacatattggaaaacctatttcttcttctgcaagtgtaaaaattatatatgtggaggaaagtggcgaagag

SEQ ID NO: 104131 - DNA, 1059 bp, Homo sapiens
acaaacactaaattattttgcttaaaagatgtactttttattgtggtaaaatacgcatcacatgggatttgccattttaaccatttcctttttttttttttttgagatgtagtctcactctgtcacccaggctggaatgcagtggcataatccctgctcactacaacctttacctcccaggttctagtgattctcctgcctctcagcctcctgagtagctgggattgcaagctcaccccaccaaacccggctaattgtagctgggattacaggcgtgagccactgcgcccggcccattttaaccatttctaagtgtatggtccaatggtattaaatacagtcacattattgtacaatcatcaccacctccatctccagaacttttcatattcccaaactgttaaatactaactccccgtcctctcccccgaagcctgtggcacccacccatccttttccttcctgtctctgacaaattccctacaaatttaactcctctagggacctcataggtactcttatcctgggtcaccatacgtgccttactggcctttcttttcataaccagagtaaagcttgtttattttattttgagacggagtcttgctctgtcgcccaggctggagtgcagtggcgtgatcttggctcactgcaacctctgcctcccaggttcaagcgattcttctgcctcagcctcctgagtagctgggattacaggcatgcaccacacgcctggctaatttttgtatttttagtagagacggggtttcaccatgttggtcaggctggtctcgaactcctgacctcatgatccgcccacctcgacctgctgggattacaggcgtgagccaccgtacctggccaagcttgtttatttaaaaggggacagagacaactttttttcgtttctaatcggaatgtgtcttggaaaggatatgtctgaggggtgggagtggagttggttttgtgcttcagggaacctgttcctgccctgtcccaaggtaagcttgtaaagaggtcggtgcccttgttttggaacccaagttaatgacgcacctt

SEQ ID NO: 104132 - DNA, 1058 bp, Homo sapiens
cagctctgggtgcaaaattcccagggctacgggagcctgcccttccctgtgttttcctttctcagagtccgaaggaggctctggggccacagctcacctgcgggggattccgcacaccagcacccggctgtgtctcccccatttcttatgagcagcgataagtcaatccccttcgacggtttaatcctccagcgactgtttacagagaactttctgtgtgcttggaactttataaagtgcatccctcttctcagcaaccctgggaagacagtgcaagccccgttttcccactggggaagctgtgattcagagaggcggcgctgcctgcccagggttagagagcaagaaagtgctggagctgggattggaaccaaaggctgtttggctccaaagcttacactgtttctactcaactctgtagctgccacatgctggcatggatgtcgggggtatacaaggacaggagacagagcctgccctcaagacatttgtggctatgagggtaaggcaggcaggcagggctctggaggatggagagacatgcgccaggcacggggtgatatgggagcagaggggcacccgagctatgcagggtgggcaggcaggcggccaggagagggtgacagggcatgggaggtgggctaggataggagacgggctgtggaagacacgagggtgaaactgcaggtgggggctgagtgggcctggccagagaaggggtgaagggagtgtggggacagacatgggaaccggggttggctgcagaaagggtgaagggggtagggggacagatgggaactgggcttggctgcacaggggagagcagcctcgctgtcaggccacatggctggatcacatcctgttcatccaggagtgcaccacggcctgtctcgtctgtaacagataaggtccttggcttagtgagtacttttgcttttcttaatgaattagagcaagaatgaatgaatgagtgaatggggacattcaaggttatccccatgataacacggttgtcactcctgatgacttttcctctggtgctgggaggcaactccaga

SEQ ID NO: 104133 - DNA, 1037 bp, Homo sapiens
ggagggactccgtgtggaggagttgggggtcccgagtcccctgcccaccttggcctgtgtgggctttcacagggcagggctctggcccaggagagagctgggtggggtgatggtgggggtgcctgggaaccaggactttgggcgtttcatgactgcccccgcaccctcccacccaacacccaatgcagggctgggccttgcagatgccgtcggtccggcacacagctgtgcccatgtccccagacttgagaggtgtggaaaaagcacagaacattctagcaggagtgggaacagatctctctggcagatgagcgacttgtgtttccaggaaggattactcacaccccaaaagatggatgaggtgactgatgctccctacactttctggcagcggagggcgtagaataagcagcctggaagacccatcagtgccacataactgaggcaaagctacacctcctggctcctgctggggactgtttagaaagttctgtgctcctcttaggataaccacttaataaagactgaagcagggcttttcgtgtgtcagggcaaatgttgcttctgggactcaggtgtgaggccacagggacttggaagtaactattgggacctgggcccaggtggcagacagccaccctgtcctttgaccttgcttgatgactcgtcttgaagttcctgtgctttcaaatgcacggtgcaattcctgctgccagaacccctctaactcaaaaacggagaggcagcatgcatgtgtgtcatttttccgggcatggtagagaaatctcagaccatgcaaaaggaacagaactttggagctggtgcatggtgctataagaagctccctcttcctggatgtgtgcgagcagagccgggtggtctctgggcggggcagggatgttgaggggtgcaattgcatgttggggtggggaggggaggtggatgccaggccctttaagcttcctttcaaaactgggacctagatgatttggagtagggggatggccttgctttgctatttgttgctgacatttaga

SEQ ID NO: 104134 - DNA, 1056 bp, Homo sapiens
atcctagtactttgggaagccaaggcaggaggattccttgagcccaggaggttgtggctgcagtgagctatgactgcacctttgcactctagcctgggcaacagagctggaccccgtctcaaaaacaaaaaaacaaacaaacaaaaagcaaaaccaaggaatctcggtgctgatctcactggaagttggaatccaggttttgctttggtttaccctgcaaagtaccctttggctgggagccagccatgagccacttccaccctgaggagtcgtggactcccagctcctccttccctttccccttccagatctagggctggctggggaggggaagggtgggcttaccaaggaggggccctggtgaggccctgctggggagggtggcccaggcccagggccagagctggtgtggaaagcctgcacgttaccgagcccccaggccttgtgaaggtgacagaggcctccctcaggctctcaggggagaggagggggctcagcgttccctgcctttgtgcccctggagccccagccacggttctgtcaccattggtgatattcatttgcctcacagggagatgtctgcacatttaactaagggcctcgcaggtttgtttttcatatgataaaactgcttttctttcatggaacattctggcatgtctagacctgcagatctgcctcacaagctctttcagtggttccccctgtggttagggtgttaattaggggccagtttaattcttaaatgatgcagtcagtgtacagtgacagttggtccaggggcgctgtccaggggcctggtggagggaggaagggagtgacctagagccccagcaagcctcagggctatgggaggagctttctggggaggggagagctggtctgcaaggaggaggtgggattagctgggaaaataaccctgaaacggtcctcagggagacctgaagccttgtaaagggcacggacccactgtagcagggtactgggaggcagtgggctggggaaggaggtggggttacagggccagagagaggggccctagaagcaggcaggctg

SEQ ID NO: 104135 - DNA, 1043 bp, Homo sapiens
catctgagggccacagagcaaattctgtcctccccacccccacacaccagctgggtggtttggacccctagagcccagtggccaagccagctgagtatacacatttgaccatttgacagccatgaacttcaagggaagggcagcccatcacatcccatcatgactgtaacccttgttaatatctggattattgtgaagacttcagaatggatatgtttatagagactgtgtttgttgccactaagataattgctttatgatctaaactaaacatacacttagcctgaatgaatactaatatatatatacctgccaggaaaatgccagggtgatttattataacagacagtttgcctcataagagccttgggaaaaaaagtcagctttttaagtctttagcaactggagcacgatttggctcagtgaagtcttttttgtgtatgatttctctattagaatgttttgggttatagtctgagtaatgcgcattagaaaaaagctttcttgtgattttaaagtgttgtaagatgcttctggcaggactcttgctaacaatttcctttttttatgatgtaccagatattgacgagtgtgagagtggtattcataactgcctccccgattttatctgtcagaatactctgggatccttccgctgccgacccaagctacagtgcaagagtggctttatacaagatgctctaggcaactgtattggtaagaggtgtgccgccaggattagcgggttattccaggaggggccagcgacctagccttggggcaggcctctagaatctgcggggccgcatggtatacagaacaggggttggcaaactttttgtgtaaagggctggacagcaaatagagcaaatactttagccgttgtgggccatatggtctctgtcataatagtcaactctgctgttatagtctaaagcggccaagggccatctgtaaacaaatgggtgtggctgtgttccaataaaactttatttacaaaaataggcagtaggctggatttggcccaaggaccacagtttgct

SEQ ID NO: 104136 - DNA, 1029 bp, Homo sapiens
agagatgtgtccactcaaggaaggagactgccgtgcagtgagctcagggagccatggcacctcccgggtgggcctggctcagcataggccctgtgaagcccagtcatcggaggggcctagagccttgctgggagtcagagttgctggcaccacgtggacagtcacctgtctccttaataccgtgcccagtgtgtggagtagatgaatgcaggagaagccaggcaggcaggtcccgatttggcgcagcgaacgatggaggtgctggagatttagggacaggaagaagggccagagaggtggtgtttgaggcggtatgcagtgataaaatttgggagccagctgggaggcggctgtgtggtccagagtgagggggttgagcccctccatttgtggttttgcaaagaggtgggaaggggagtttctttggagatccagtttttgggttctgggacaccctccaggtttaaccacatggtctctgtcttttcccgctgtagatatcaatgagtgtttgagtatcagtgccccgtgccctatcgggcatacatgcatcaacacagagggctcctacacgtgccagaagaacgtgcccaactgtggccgtggctaccatctcaacgaggagggaacgcgctgtgttggttggtattaagaaaacaaatctgaaatccactttcctgtctgcttccagcatgcaccctgccttctctggaagcagaaagttgatccccaaagcaaagccatttctatcagcccatccatcccactgtcagttcccaagcatggggcttcattgtcttgcctggactggtgcaccagcccgtctactgcctcagccttgtctggcttgtcctgagcccaaagctctcgcaccccaccctgtttacagttccatcagctccccgttggtgacaaaggatggatgcctctgcttacagtccagtcccccagagctggcccaactccacaaaccttgtaattcaggcaatgtgggtctgccactccccacacaagcactgtcctttcctc

SEQ ID NO: 104137 - DNA, 1051 bp, Homo sapiens
ctcaaatcggaggacggacggtgtgaggggtcctgggcttagttcacaagaacgtgtatggacaaggaacaagattcacgagttgagtctctcaggcttgtgttcaaacctgacttctgccatttccatggccttgaagaagtaactcagtctttcctgggccatggtgtcctcatctgtaaaacgggcatagtaggaccaaccccatagggggttgtgaggatgaaacgagattaagcatgtgaagagcttatcacagggccaagcacaggatgaagagctggcggtgtggaggctgctggctttattattatttagtagaagtagtgggattcctggcttgtgcttcctctagtcattcataaattgctgaaaagtcggcattcatatccacattagtggacaatattgtggatatagaaccagagcctggccaaccttgctatgtgaccttactaaccatttgttagggtcctgccccgggtgtgtagcaagaactcggtcctgcactggggagtgtctctagcgggggatgagagaccacactggacaggtggaggccaggcctggtgtgtgggggccacagagatgaaacacggggtggaaggctattggacgttctgtgacagccacatagtatagatttaaggcttttccagccacaatctctgttgcaaccgctgaactctgctgtggtagcagagaagtggccagaggaccatggtaaaagaatgagtgtggcagggcacagtggctcacacctgtaatcccagcactttgggaggctgaggcaggtggattacttgaggtcaggagttcgagaccagtatggccaacatcgtgaaaccctgtgtctactaaaaatacaaaaattagccgggcatggtggtgcacacctgtaatcccccagctactcaggaggctgaggcaggagaactgcttgaattcatgtccacatttagtggacaatagcctcccggaggtggagattgcagtgagctgagattgagctacttgtactccagcctgggcgacagacaaagactttgtc

SEQ ID NO: 104138 - DNA, 1033 bp, Homo sapiens
tgcaatgtcgtggggctgaggctgggctcgggggctgtgcttccccaacccaagggccacagcacagatggaatgcattcaggaaaaggaggcccaccccatccaaggggtgtcctggggtctgcagcaccctggtctcctacacccaggccccagcacacttgtcctctggattgtctgagcctgtggcggctgcatccggcaggaacacttcagccctcctcccctcccctcagcagccccgtaaaggctggaacagaggcctttaggaagatgcccgccagggaggaagcagtccaggccaggggatggcgtggcctggtgtgggatggcccagggatactcatggctatgggtcagctccagcatcggctaagtaatggtggccaatggcattggttctgcattcagcccccttttctacgaatgctctagggggcagtgtgtgtcccccagagccatctgataaccatccattcaatcactgacagcgggtgctgagtagatgtttgtgagcgcgtgatcctcagtgtacacactgcgcccagaagctgagtcatggaggtggggctgtccagccagttcctcgggagccccacacaggactgtggatcctggggctctggaagccccctgggtcccacagatgtagcttctggtcatgaggaaggtgactttgatgaaaggcaggcaggagctgcggtgtttcctgggaggccccctccgcttgccctgggctctggatggaaggctggttgtgtctgcatttctgacggagcaaatgacttttctcctggccaggctccctcaccacagcctggggtcccgcccagactcagcataaacacattcctgagccgggcctttgaggctggggagtgttgtttttgccaccgatgctcaggcatttggcacctcttaatggatgtctcccagggttggtgacagcccctgagccccactgtttggctgctccagagtctatgggagttgggctgctcccccatctccaggggcctctcagtgtggtgcc

SEQ ID NO: 104139 - DNA, 1054 bp, Homo sapiens
tcccaggacccatcatgtagtgtttacttttaccatcgtcacgctccctccagggattgcgaatgataagttaacactctataaatgtaaataccctataaatgtaagaactggcacaggacgctgctctgaagatcagccagtggagggcagggatggcctgatcgccacccctaaccctagttgatgggaggcctgggctcctccgtctccagatgggtatggctcctgcagcctctgccttcactgtgctgctgtggggtctcttgcagacattgatgagtgtgtgactggcatccacaactgctccatcaacgagacctgcttcaacatccagggcggcttccgctgcctggccttcgagtgccctgagaactaccgccgctccgcagccacgtaagtcccttggaccatgccatcgtcgtctgtctgtgttggccttcctggtgacccagttcccgggtgggtgggttatcaggctgtgacctcggtgtcctcccatgagggactcagggcactcaaagatcacctgatccctggccctcaagcccctaaatgctagtgacactggtctcggaaagtcaagggggtaactgcaaatgagtctggggtctatagtcatgttttcaggccaaggctgtgcacagaaccaggagaaaccacagccctcttttttcctagggtggaagccttgggcaagctctctgggcctcagtttcctcatctgtaacatgcagatgtcagaacgtgctctgactgagatgcataggtagcaatgtctccatgtcagcccaaagccagggagccgatgtgacctgttggacgttgttgttaggtgcccacctgaaagccagaattcgtccagcctggtgaccgtgtgggaacggcatcaaagattccagatcctaaacgtggggctgcgtgcccctatgtctttgtaagctcactcactcctaggccatcacggcgcccacttgagaccacggttcccacttcctatcccccttgcccctaattgtattcagaaagtctcatttagtgccacagtcagttg

SEQ ID NO: 104140 - DNA, 2236 bp, Homo sapiens
tgggtacccgagcagccccgttgtccctggcagccctccatattcttcctggctttgcgattctcattggctggcccagccatttccctgtttcccagcacggatttctgtctgcttgaaaacccaacatcttgtttccttcctgagcttgggttaggaaaaagctgccccaaaactgggtttgcaagtctgtagcatcccgaagagctcatggttatgcaacagcctgccccaggcagtgacactgcttctctgagccattaagaaagttcgatggccttggctgcaggctgtgcagccgtctgtcattgtaagttcactctctccccagcctttgtcagcgcctgggcttgaggattccaggaggctggctgtggttgtgacctcgatttctaacttgcgcacagtcgtgaaaccacctttcgaagagggggaggctgccctgcacaggggccctggcgcctcctaagcctgagggtgggcgggttggccatgtgtgctgaggtcatggctgaaatcaggggaacccagctccacccctcatgttggctgtggaagcctctgccacccctcagtgctggagaaagtcgtttcttcctggacctactgcgtgcaggcacctgggtagacagcccacagagggctttgtccccgcacaggctccgccttcggcgtgtgtgctaggagggaggaggggaccccacctggctgggcgtgagggtgggcagggggctgtctggagtgggccatgcctgcatggaggtggaagggggagcgaattaggcagaagcggcgggagtatggacacatgtgcggtgaaatggggagttcagcctgaaacctgggccctgtgtgctgtgcagtaagggattgagctgctgggcgcctggcttgttccagcccttggactcccgggactgatagtgaggaggggccaccccctctcagcactgctaacccctcagactggagttttgtattttacagccccttttcctgctcatcaaaaatcgaagctgcttaacacgttttttcatctaagcttcagaaagcaatttttaaaatctaaaagagccatatttaggagggacccatggccggcgcttctgtggttaacaactcagcaagagcgcctccttcgggagccttgacagacaggactgcagagtccgctgctgtgcctttctctctctctccactcagacggcttccatctggggaacatcccggcggccgagggctggtaactggagcatgacccaggaagctgggccgcaaaccacagggctcggccttgtggacaggaccaggctgttacagtcctgcccacacaattcccttctgcccgcaggaggaagtgtgcaaagctgtcccacagccttcatggggccggacacatcctctttatcccctcagtggggccggcgcctgatgacctgtggtctagaaagctggagcaaagccgggtggccttggttgccgcttcccggggatgggacacgagtgaacagctgtgggcctgagggtgtaacacggtggacggtggcagagatagagccgtcgatggcccccctgccttggccagttcctggggcttgtctcccggacgacgagcgtgtgaaagtcaggaaaatgccggcagggatatccacaagcacctggggtggccagaactgccgtgcctcccaggagaaggagggggcctagagggccttttttctctggtgtgtggtggcttaggatcatttccatagagcttgaggtgttagggtcaaatgtgttgaactggcaagttggagcacattgtcctctaacgcatgacatggcccaggatgggtggcctgctgaggggacatgtctggaaaccagggcctgcgtggcagggggggacggggcgggctcgcctatgccctgctctgtaatacattcagtgatgacaacccgtccctgacctagacacactggctaaaagggatttttgggccgttcccagtctgacaggcagtttgccagacagttatgtttctggtgttttaaaaagtttgagtagagcgaagtacgatcattgaagccaggacttaccaggaaaatcaaggacatgtttatttttgtgcattagtcatttgcaaagcacatagcgggtgccccaggccctgctctttgtccagaaggagccagcccagaaactcctagtgtagagaaggttttggggtgctctgaggaatgactgtgtggg

SEQ ID NO: 104141 - DNA, 1052 bp, Homo sapiens
ctctagcgccacctgctgaccagccccatccaggctggtcctgaagttgctggtgtgtgtgcgtgtgcgcgtgcttgtgtgtgtgcatacattgtgtgtgtaaaagctttgaagtaagacaggccgactttgaaagccaagcttgccccttacgacacaccacggagctatcagcaagttctgcatcctcaatgggcgtctgtcttccagccagtagagcgggaggacgatgggagacagtggagggagcgagtggaaggaaagtctgctgcttgcagcctgctccctgcacccggaagcgcagttcacctgcacccggaagcacagctcatgggtcccatgctcctcccccagttcacggacgctttggtcatagctcctcagaggcccccctgggggagagctctcagatcgcctggagcactcccgtttggcctggacctgggcatctctggggcaggccaccgccagcagcacccgtgcccaccttctttcctgcctctgttttgggcccctcccaggcaggactcccccgttcagtgcccctgactcccaggccagtcctttctaagagcttggaatgatcactagccaagtaaatgcaaggcctcctgtcagtcctgacaaacctggaaagaggaggtaaaaggagaccccagtctcgataaatgcctcaagcaagtccaagtaacccagcacgagacatggaaacttaaaaagccaaaagggagatgtgatagaaggccaggacgagaggatgctcctgacctcagaatccagacacagcccagatggcagggcttcctggagcacctgggccaggtcctctggggctccgcacctgggccctgcttcctcaggcagccaccttcagagtatgatgggccaggagttcagtacacaggagacgacccctgtcccatcttgtgacaagaaattagaacttgttactatcctgtagcggaagataataccgatctccatcctgtcacaggaggttagaatctgtaacaggaagttggaatctgtgctcatcctatacaggaagttag

SEQ ID NO: 104142 - DNA, 1060 bp, Homo sapiens
gtccgagtcccaaaactgaagaacttggagtccgatgttcaagggcaggaagcatccagcacaggagaaagatgtaggctgggaggctaggccagtctctcctatcacatttttctgcctgcttatagtctagccgtgctggcagctgattagattgtgcccacccagattaagggtgggtctgcctttcccagcccactgactcaaatgtgactctcttttggcaacaccctcacagacacacccaggatcaatactttgtatccttcaatccaatcaagttgacactattaaccatcacaggacctgtccccgtctccactgcaggaagttaggacccatccctgtctccacccaggaagttaggacctgtctctgtttctatcacaggaagttgggatctggccctgtggacccagatgggttactgagcttggaacacgagggcttagtgacaaggaactgggaactgacctcaatggctgagtagcgatatggctccctcactcactctgtgaccttgggaagtgggaaggccacattctctctgagcctcagtgtcctcatgtgaaaaatatcaccgaagccactgtcatggggtggtggcagtgatcacactagagagtgcatggtgaggaagagctgagcacttggtaaacggcagcagctctgattgctagtggcagagatagtcatttcatgggtcacctccgagacacaaccaagagccctgcgtagccctggccactgtctgggcaagggcctgggaagggcagggtgtgcctggggagtgcccctggggtggggctctgccagtgagcaggggacgcacctcactccgggcacagcctttggcccccggccacccagcgcccgagatggtgttggaagaggctagtgcctgaatcagcagcctggaggtccacggcgcctcccgcaggtgagtgaggtgtgcccttcgtgttggctgaatcggccagaggggcggcgggaggccccgcctgccagccccgcatccccgcgctctgccgtttctccgcttgctggaccggccctaacc

SEQ ID NO: 104143 - DNA, 1037 bp, Homo sapiens
tatgcagcccagacacctgtcccccttgcttcccggcttttatggcgtttctcagccaagcagagaagaccaggtttcgggagctcagtcccttcaactgcaccaccagcttctgatgcgattctctctaattgctttctgctgtttttgccgtgtgtttatgactcagctaagggcagtacagtcgggaagtgtcctgcgcgccattttgcagacaggagggaggaagtgtcctgcgcgccattttgcagacaggaggaaggaagtgtcctgcacgccattttgcagacaggagggaggaagtgtcctgcgcgccattttgcagacaggagggaggaagtgtcctgcgcgccattttgcagacaggagggaggaagtgtcctgcgcgccattttgcagacaggagggaggaagtgtcctgcgcgccattttgcagacaggaggaaggagatgtagtgggatgggaagatctgggctctgaggtcagtccccgctggacggaaacctgcggccctgttagctccgtgatctggaaggtgctactagtagcgcctcatttttctccccaggagaaggagggcgaccgtgtctcatccctaactgcgatgggggctgaatgcggctgtgggcacatagggtctctctgtctccacccatgtctcctgctgtgtggcctctttccagcccatccacactctagttggtggctttgtgagtgctgacaatacttccatgtgcttttttgttttttcttttttgagacagagtctcgctcagtcacccaggctggagtgtggtggcgtgatctcggctcactgcaacctctgcctcccatgttcaggtgattctccctgcctcagcctcccgagtagctgggattataggcgcctgccaccatgcccagctaatttttgtatttttagtagagacagggtttcgacatgttggccaggctggtctcgaactcctgacctcagatgatccacccaccttggcctcccaaagtgctgggatgacaggcgtgagtcaccacgccc

SEQ ID NO: 104144 - DNA, 1041 bp, Homo sapiens
tttgcaaaaccgatgagacaattaagtaacatagataaggtttctcgtacagaagagacatttagtcagacatcagttccctttttataacttggagaaaatccaagcccctgagccagtttagaaggcccttcttgactctatctcttgtgagggaagaagttacagagaaccattgatggtttttgtcaagggagtggcgcgataagatctgcctgttagatcttcctggccgcctccgcctccattgtggggaataaatgagaggacgaagctagagacaggggggacctttaaggagtggtagcggaagcccatgtgaaagagaaaagtgcctaaattaggacattgtggggatgagtagaataaatactgagagatacaaggttgaatggacaggactcggaccagttggattgtgggggggagaatgaggaaatgaggatgcttcccagatttcatctgagttctgggacagtgtccttgttccaggcagagattggagaccaggaaaggtgaactgatgtgcaggtcctggcatggaaagacacagttgtgtggtggtgcagagaactcatgatcagggtttataaggacaggcttctggtcctggttctgtcactgcttctctttgtctttggacaaattataagggtcttgtggggctgggcccagactcctgctcctctgagaggatccctccagttctgatgctcagggagccagtgtttgtccttgggggtctcctcttcagagaggacatagggctgttgtctagtatgaacaggaacacagatggatccagggggaggatgggccaaggtgttagaaggtggacgagacaaaaagccaggcaaaatgagtcctcagtgtagcaaatagaaaacagcagacaaaaagcaaaaacagtgaggaaagtaattaagagattcttctcttttggtggaatacattatttctctaggattccattttatatttgaagaatcatagacataatgtagttggtggtccttctgagctcttccatgctacaaaaca

SEQ ID NO: 104145 - DNA, 1015 bp, Homo sapiens
acacacaaaaacccaaaaaacaaaaacccacacgagtcgtcagcttggctgaggacgccatatggcgttttgactcaaccatgattcagctcaactttgttgagagagaacatcaattaagttacactataaaaagcatattttagagtgtgctggcaatttcctttatttttacctatgccatgagctggaatgctacatggaattgtttggtaaggtgttctgactcagcttcaaaatacagaagtggtcagtgtgagccacctcatacattcaattatcttaaatgcatgaagtagacaggaaagagtttgagccagccgaaataaataaaaccaatcgaaataaataaggttaggattgtgaccaccagtaccctcagagcagagtttctcagctctttcattcttccagtcttttgtagtggtcactggacccaagggcttggtcactggactgtgggcaatgacactcaaaagcaaaggaactgtgggactaccagtagggtgagctgggccctgtgatggccacaagcttagagaagttattagagttaacgagatgatccataagtgggggatgctctttcattatagctattgaggagtttgtgtactgcttagaacagtgtctggcacctaatagacacagtttaagtgttagcgttttcgttgttggtgtcattgtcatcatcatcatcaatgagaatattataaaactatcaaaagacatttaaaaagacttaagtggtaagatacaccattgtattataggaaacctcaataacaaagacatcaatacctcccaaattgacctgtggattcaatgccattcataataaaattgcagcagggtttttgctagaaattcacacagattttctaagttatatgagaaactcctaggttttctcttactctctgaactgtcatccctttaaggcttttttgtttttttgagatagggtctcactgtgtcacctaggctggagtgcagtggtgccatcacagcgcca

SEQ ID NO: 104146 - DNA, 1030 bp, Homo sapiens
tctctcctgcactcagtacaatgcttggctcaaaggtgtggtagttctccttgattgtcattgctgctttcagacctttttcctccatagaccactccaacttttaatctcatgacatcagagtatcccttgtttaatcacttttgtggttaaaagagacctttgggtcagtctgcctcattccttgaagagtttagccctggctcacttttcactctatttcttctcctgtcttaaatcttcgttatttcattgtttatatagattttcctttcattatcctgacctcgaatttctttgactttctctcccttagtgagcttgacctccatcccatctcagacacacattgccataccttacttagactttatccataactgtagctgccttcccccacaatctcgagtcccaatccctgttttatcttctctttagggcccttgcttcatcaagtctttaacctcaccaggacctacagtcttttgaccctatttcctatttactaccccttttgtttttcattccccttcttaatgttcacattcccatcttgatctggcttagatccatggatgagtaataagagcattttttaatgtacatcctcaactccactgcctcctctctaaactttgttatgtttgcctggtaaaactccagctctggtcaaatccaacttgttacctttgcgacagtacccaaatagctgaacaaggctagagaaaaacatacagccgtgcagactgctctcactttaacttgctgatcactaactaacgtggcccttaatgctacctgtcagtcccgctgtttgccctggtcccttgactctcctgctccccgagtcaggtatttcatgctccaccctcttcaaacctccatcccatctccctcatcctcactctcagctctctgaaaataggagcaactagaagataatttccaggaactctcatcaccctctctgcccacctacttgtatctgtgcccgtagcctgcctttgcttctggtctgtggattagcgat

SEQ ID NO: 104147 - DNA, 1105 bp, Homo sapiens
gggactacgaggcacagaccatcaagcccagctaattaaaacaagtttttttgttttttttttttttgtagagatagggtcttgctatgttaggcaggtcttgaactctcctggcttctgcctctcaaagcactggaattataggcatatgaaccactgcgcctggccgccttagttcctttcatttagcacagtgcgtttgttctgatgaaagatgaattttcaatgtgatgaggacagtgggaaagaggaagtgtgtggtttttggggagtggggagaggactggtatgtttggagccctttaaagcaggggttgccagaccatggccagatctggcctactacctgttttttttatgacccatgagttaagaatggttttttacgtttctaaatggttggggagatgataaagtttcatgacacatgaaaattatatgaatttaaattttagtttccacaaacagtttcattagagcccagccatgttcacttgtttaggtgtttcctgtggctgcgtttgtgcactgggggagttgagagtgtgacagaggctgtttggccatcagagctggaaatattcactctctgaccctttacagaaaaagtttgtgaccctgcaaaatggattggtctgggttgtcaggacggcttcggaatcctggatgtgacagaagaggagagaagagtgtgaaaagaagttttgagttctgcgcagatttcaaaattttaccctaggctgtttgtggcaggagatacagatgtttttattttctgtttttgttcaatcctgcccagtcaaatcagcaagattatggttttagataacaaccagtgattgttgttttaatctgtgaacttgtgtggattttaatagtttttctcactggcagttgttaaactactctaaaccacatatgccagtttttaagtaaatctaaggtattagaataaatcttttaacaagtatgaaggtcttagttgtagcattacaatgactagcatgtagcttttttttttttttcagtaggaggtcccacctgatgattgaactgtaaaatgtgtgtgcatacagtatattagacctatctaacctgttacata

SEQ ID NO: 104148 - DNA, 1016 bp, Homo sapiens
tggccttgtgtctctgccagttactggctgagtgatttgtgcaagttacttaccatctctacttcacttaccttatctgtaaatggagaggacagtgttggcctcataaggctgttgcagagactgagataatacatgagaagtgacaagaacagtgtctggtgcatagtaagtgctcaatatgtgtagatcttttatttggtgttgtaaattaaggagctaaagcagataaacgtagcgtacctccccacaatagtagataaaagcagttttctgaataggacatttggaaatcataatcttttttttctgattcgtgataattttatcctttttcagagaaacagcacccaggactatcttccaaagagttctggatatcctaaagaaatcttctcatgctgttgagcttgcctgcagagatccatcccaagtggaaaacctggcttccagtctgcagttaataacagaatgcttcaggtgtcttcgcaatgcttgcatagagtgttctgtgaaccagaattcaatcaggtagttacacacgtaccttggattctgtttctttgtatatgtgcatgctggttctgtcatttggtttatctgttagaagttgttttgggctgggtaaggtggctcatgcctgtaatcccagcattttgggaggctgaggcaggaggattgcttgagtccaggagttcaagaccggcctgggcaacatggtgagaccctgtctctacaaaaaaaatacaaaaaattagctggacatggtggcgcacacctgtagtcccaactgctcaggagactgaggtgggaggattgcttgggccagggagaggcagaggttgcagtaatctgagatgatgccattgctgcaggctgggccacattgtgagaccctgtctcagggaaaaaaaaaaaaaaaaagttgttctggcatgatagtatcacccactgttattgcaggattgccctttacatctgctgggagaggccctctacaggccttgccattggag

SEQ ID NO: 104149 - DNA, 1029 bp, Homo sapiens
tcaagaaattttttcatttttacaaaagatgaaactgtaacttggagaggttaaataacttgtctgagagtcacttgttaagtgagagaggctgggaacattctctccatatccagacatctgactctaaagcttaagcttaacaagcagtctgcccttactgttctgagcttaagctcaaaagcagtctgggccaggcgcggtggctcacgcctgtaatcccaacactttgggaggccgaggcgggtgaatcatgaggtcaggagttcgagaccagcctggccagcatggtgaaaccctgtctctactaaaaataaaaaattagctgggtgtggtggcacacacctgtagtcccagctactctggaggctgaggcaggagaatcacttgaacggggaaagcggaggttgcagtgagccaagattgggctactgcacttcagcctgggcaacagagtgagactccgtctcaaaaaaaaaaatgcagtctacccttgctgtcctgagccttacacactggtcttgttgtggatgactgctccatcttgaccctggacaggtgacttggtcttcctgagtatcagttttgtcctctgtaaaactaggtaagcaatgtcttccaaacaggctggttatggggtgtaaatgagattacttatgtaaatgcctaatgcacattgtgtgctcagtaaacattaaatgtttctgcctctgcctcaggaatgaatgtacaacacaagtttatgttaatactttctttcaaagcagtcaatttttattttcttttttgagtaatatatgcaaactataaaaattctaacattacaaaaataaatactatgacaagtaagttatcggtggtcttttggtagggccagcaaagcaagggctgtgctgtttgtgatatctttttattgcatgcaacttatggttgggcggaaatgaaaatgaacatttaagggtgttaatttttctgcctcttcccttctaggattgtattattattcactgttgatttttaaaggaaaat

SEQ ID NO: 104150 - DNA, 1046 bp, Homo sapiens
ggaagcagttagctctgcatgtaaatataacctctactgctagggttgctatatttttcctgtaaagagccagataataaataatttaggctttgtaatctctgtcagatttctcagctctcccattgtagtgcaaaaacagccatagacaatatatgaatgaatgaacatgtctaattttgtcttttttaaaaaacccaggaacttggatacgattggtgttgctgttgatttgattcttctgtttcgtgaactgcgagtggaacaggaatctctgttgacaggtagcatgcaatataattcatggattatttatatctttataaagggttcaaaaccagtactttgagtattaacatcattcattgaaacacatgttctgtatttcatgagatagggaaactttaatagtgaattattaaagaattataaagttgtatcaacttcccttcctgaatggctgaattttgttcctttcacatttgtatgttgaagtctgtctgttccagttgctataacaaaatgccttaggctgggtagtttataaacaacagaaatgtattgcttacagttctggaggctggaaagtccaagattaaggtaccagcagattgggtgttttgcgggggctgctctcgtcttcatagatggtgcctcttgctttgttctcctgtggtggaaggtggaaggcagaaggcataaacaagctctctgggccccttttataagggcactaatcccattcacgagggctgcaccatcatgacctagtcacttcccaaaggccccatcttatactagcaagttggggattagatttcagcataggaatttcggaggggcacagatattcagatcatagcatggtcctaacccccaatacccagaatgtgactgaatttggagataggatctttaaagaggtaattaaggtaaaatgagggtatatgactggtatccttataggaagaggaaattaggacatggccatgctcagagtagagaccatgtgaagacacagggagaagatgaccatctacaggcca

SEQ ID NO: 104151 - DNA, 1048 bp, Homo sapiens
ggaagcatcagtactcaaaattggggaattataaattagcagtaaagtccgtgtttcacagtgtcacttggaagggcagctattttgaggtctctgtgtggtatagtaattgagaaagaaagttgagaatgtactgtgttttataattggtgatcctgatggggcgggcagtgtggcgctccagagctgctgtgctgtggtgggcggaaggaggtttctcttttaatgatatatgctaaataaagaagcaaaggggaagtgctgtacaaatgctgtgattaaataactattagaatggagccagcccctccaccatgtgctggatttcatcgccacttgcccacgcagaagcttttctcctgaaattatccccttgctctcaggcagcctctgtttttttcctctttactccatcattttcatcagcaagtaatatgccctcccatttttcatttaaaaatatcttcttttgactccatgtccccgtcagtccagtatctcgtttttctgctctatcccaaatgtgctacaaaagatgtatttagtttttacaatatatggtaaaagattatttcatccttcacaggattactttccactgaagcaggtagatgacctaagaaaaaatttaacggagcagatatctgaaactacttttatgaaccagtttgtcattgaggagtaaattggttatttggttgttagcttggctattcactcatattcactaggcagagagggcagattcttacagacctgttacatgttagctgtattaaatgttgttcttaatttaggtagttgcatttgtatgagtttaattgttttttattgatgtgagattcacatattgttaactattttaaagtgaacaatcgagtggcatttagtacatccacagtattatgcaactaccatctctacctaattaaaaaaaaaatttttttttttgagacggagtttgctctcgttgcccaggctggagtgcagtggcacaatctcggctcactacagtctccgcctcccaggttcaagcaattctcctgcc

SEQ ID NO: 104152 - DNA, 1020 bp, Homo sapiens
agtcatcctggtgggtgtgaagtgggggtacttcattgtggttttgatttgcatttcctaaatgatcacgtacttattggccgtttgtaaatcttctttggagaaatgtctatttgagtcctttgtccagttttcaattgggctgtttgtgtctatttcttgtagagttgtaaaggttttctatacattgtagatacttgggataatattgaatctatagatcaattggggaagaattgccatcttaacactattgagttttcaagttcatgaatatggaacatctctctatttattcaggacttatttaatttttcagttgtgttcctatttagtagatagcttgtgtttcgccacagatgttattggaaggatattattgaggcaggaaggaaaatggaaaggaagtaatatttctcatcaccttgaaaacggcagctagtgaaatgaccgaattttagttggaattcagcaatgaaatttggattcaacagtgaaacttagaaaaaattttatggtgtgttagttcaaacctaatacaaataatcttttaaaaagtattctggttcctaacaaagcgcctgtacttttttgactctttctctgtgagaactttattctaggtagattttttagcagggtatgtgtgccagttttttgttaccacacttgaggtaagaactgtaattacattgtcaaaataatatttagagtattattttcagggaataattgcagtggtatgacgaatatattatgcccatcaaattttatgtaaacacaagcatgagttattttaattgagttattggtgttgtttttggcctttattctttcttactctgtaaaaataatgttgggatttttgagggtcttcataacatttgcagtatttacataaagatcagttgataagctgtttggtaaagtaaactgtcatttgtacctgtctggagttttcttttcttgtgtctgggacatctttaagccttttccttttcagaattgtgttctgatcct

SEQ ID NO: 104153 - DNA, 1617 bp, Homo sapiens
ttatatattcgttattcctgaaggatttcattctttggttggggaagtaaaggaacaggcacataggttgtgatgtaagaactaaggtaattagggcaaatccagggtgtaatagaaaaacaagggagaggcttaagtgtaggtcagtcagagaagtcttaacagtttacatgttgcttttagatgatctcatttgatcgtcattaaaaaccctgtgaaatagaggttttgttattgtattttattttttataccagaaaacatattaagagaggttctttgccttcactttttatgcatttatgggacagatataaccaaatttgaattccagttttgtcaggtgctggctttgtgctattggccaagtgaagctaacaaattctttatctgaaatagatgaataatacctccttcagaagagtattatgaagtttaaatgaaaaaaaatcctgccatattgcataacccatgatataattgacaatcaatatgtcagtgaccttccccaggtcacctggctgatagctagaggagctaggagttatagcgaggctcctgactccaaattctatttcttgccccactataccatctctcctgtaggcatcttgtccctaaggactattaaagcagtgccagcagtcattgaggtatcattttgtacctgtcgattttttctttctaacaagaatgaacattttaatgttttataaatgtaatcattctaatctttttctctaatggtaagttatttgccttttgccttctgagttctatgtcaacttcaactttaatattttggatactttttattgtgactaagtttatatttactatttttacagtaaataatctacttattttaaagtgctataattctaaatcctcaaaagtattagcatgtagtgaatttgacaatggtattactgttatttttgtgttttatcatgttactaaattgggctaacaatctcatttccttgtttggaaggtcttgcttaaatcatccggacaaaaaaattgttgcctactcttcaatgattttgtttacatcccttaatcatgaaagaatgaaagaactggaggagaacctcaatattgcaattgatgtcatagatgcttaccaaaaacatcctgaatcagaatggccgtaagtatcttgttagaaatttgattgctttggggcatcctgacagatcactttccttgcagaggttttaagtaaaaatttggacattgtgataattgaacgataagttaaaacttaacatgtgttgacagaattagagaagattttgagcagaatctagagaacttgtgaatgaggtgaataaagtgaggcttgaattgagcctttaaggacaaagagaattctttaaggtggtgaggagcgggaaagacattcttggtgtatgaaaaaacagtgtgaaatgcccaggcacctttggagtgcacagataagactgttgtggctgcagtagctagttcattagatcagaggttggtgcgagccttgtaagcatctgtgcagatgagatagagactgccattcaaattgccccccgatacataatgtactgccacccttcatacataatgtgttatttctctgtg

SEQ ID NO: 104154 - DNA, 1049 bp, Homo sapiens
tgaaaccgtccccccacccctgtctatggaaaaattgtctttcatgaaaccagtccctggtgccaaaaaggttggggaccactggtctaggctgtctaatttgttggcacaaattgttaatagacccttagaatttttttatttttgtaagattggtaggaatgtcccctcttcattcctgattttagtaatttgagtcttctcttttttcttgttcactatagctaaaggtttgttagagtttttgctcttttcggagaaccaacttttggttttgttgattttctttacagttattctctatttcatttctttttgctgtaatctttattatattctttcttctgcgtgctttgggtttggtttgctcttctttttctagtttctcaagatggaaggttaggttactgatatgagatcttctgtcttttttacataggcatttacatctacaaatttcctggtaggaactactttagcatcccataatttaggattctgtaaattttggtgtttgtgcttttactttcatttatttcaaattatagtccaatttcctttgtgacctattggttatttgggagtttgttgtttaatttccacatatttgtttctaattttattccatgtggccagagaacccactttatatgatttcattctttttgacattacctaggcttcttttatggcctgacatgtggtctgtcatagagaatgttccatgtacacttgaatagaatgtgtatgctgctggttttggtggcatgttctgtagatatctattaggtctggttggctagatggttgatagtgttgtttaaatcttctgttttcttgctgatcttctgttctagttcttttcattattgaaagtgaattattgtgcattttttccttcagttctgtcagtttttgcttcccttattttcatgctctgttaagtacacacacacatgtttatatttattattgttataccttcttgatgcattgaccctttctcattataaaatttatcacaaattttgttgtttatgttttaacaa

SEQ ID NO: 104155 - DNA, 1099 bp, Homo sapiens
ttccttttgaagccctaatagtattttgttgcttgtagttccccagacacactgctgttctttccttcttgctgtttttctaagtcctttttttcccctcctaatttaaatgctatcttcttttccttcttctagggattggcgaaatacctcctctagcctgtttgatcttcttgccccctgtctgtcacccctcttgcccccagcctattggttagatacatttgtttctattatataatccttaatgtgtatctgtcagcacttaacatgttcttctgtaaattatctgactaaatatgggtctttattgtttggagaatatatttggcaatatggcttgtgacttggaatattgcgtttttgctattcttatgggaaaatgctttaaattctaagtacctgaattatgaatgagctttaagatctcaatttagtttgtgtatccatctgggattgcatagatttctattgacctgcccagattgataggaatactgtttgagaatttcaaatattatccattatttttaggaatattttacatcagagtgttgatcagctattttaaatgctgtagaggaaatagaatatgtatttggatttcgcttttatgtgaagtgacagtgtattgtagtagttaatatgcttcatttggttatcagactgaatatagttttattgtatttttgtattgttaagtgattaaactatgtgtcaatatatttaatgcttgcagtcaatttttattactataacctggttataatcagtatattccttagttcttaagtcttttcctcagatgccctctggtaaatataattcataattaattaataatagtgttgaatctttttagttgtcacaggggtactttgaagaactatgcctataatctttgccttggggtttccataagttgatctcttaagtttagatgagtgcattgcttgacaatgaggatgttttcttggtaacttgagaattcttaaagagtgaataatcaagccagtaatggaagtgtgacaagtctttctctggttcattatagcagttagcttctgactaaaccaatttaatatgttttttgtttata

SEQ ID NO: 104156 - DNA, 1045 bp, Homo sapiens
acaataaactacaatgaggtaccacttgatacccattaggatggctactatcaacaaactgaaaagaggaagtttgggcaaggatatggagaaattggaacccttgtgcactgtttatttcctactggtgggaatgtaaatggtgcatctactgtcttaatctgttttctgctgccataacagagtcctggagagtgggtaatttataaagaaaagaaatttatttctaacagtctgaggctgggaagtccaagaacatggcactggcatttggtgagggctctcttgctgtgttatcccatggtgggaggtgagagggcaagtgagtgcatgtgagcattacagagacacagtccctgcccttactgtgagggtaataaccatgtgttgttatgtacaagaatgacagtgctgtgtaaattcttaagcttttttcttgtgctagttcttttcattgttgtcaaaattagttgacttcttcacccagaggctggtagtctattcatgcagattactcggtggggaaattttggatatagactcatcatcaattcacgtggcatgattcagcaaaaatgagagcctacatttacatacttgtctggtctcctttccaggtgaattggagtgaatattaacaaattggactagctgctcgtggtaaacagcttgtgtagttttcaggtttatgatctctgtgtacggcatagtagttaaggacagatgctagtgctgccgcttactactttggataggttaatgagaataatagtagctaccccatgaaattgttatgataactgattgaaatgtgtataaaactctcagtgcctggcatgtaatggtcacccccgtaaacgtgttgcagggaagaagataattgactttggcatcagaaagagttcaaataccacctcagtacctctgtaacccagggcaaataccttaatctataacctgagctattgctatttctgcttccatgctcttactactattactgcaactacaagtctaacaactactgctactatgctgatgacct

SEQ ID NO: 104157 - DNA, 1560 bp, Homo sapiens
ttccatgcctaatttgagtgtatttacccttatttgctaataagcagtttagatgttcgtaccctgtcttctatagaaattagaattatacgtataatcccaaatcaaaatgtaattttgagcaaatgtgctaattgatttatgctagacagattgacctatgtgtgattcatttttcctaggagaaggaaagagatggttgaaaagaaatatttatttggtaacttatatattgatgtaaaaatggcacagtcttggtcttcagatttgtgtttgtgtaaactaaaataaatagtaaagtttcacagtaaagactaccaaatgagtggttaaagcacctggctcagggcacagattgaatcctagcttagactctcagtggttttgtgacactggacaagttaattaacctcaccaagccttatttacccacctttaatgtgaaactaatggcagtacctgcctcatggagtttttgtgaggattaagtgatacaatgtgtgtaacatgcttagctccgtagaaaatggtgaatgaatgttagcccgtttcactttgctgttgctagtgtcgtcgatgtgttcatacaaaaaactgagcatgtctaaaatgtccaattattttaatgttgaaagtaatggacataaaaggtgcattaagcaattctagtttctgtggccaagacacatcaaagaaatgaagaatttaaaaaataggtgattgatgaagattaactttattcatgtttttcctagctagacattagaagcaaggtaaggaatttaaaataataatattcccttaaagttgctttcctaggtatttttagcattgtataatttaagtattatagattcatgcagaaatcctttatgttttacagagttacactgttagaccttatgatagccaagataacgagtgatgagccactcaccaaggatgacatccctgtgtttttgcggcatgctgagttgattgcaagcacctttgtggatcagtgcaagactgtgctcaagctggcctctgaggagcctcctgatgatgaggtaagggaggcagatttcccaatctcgggtaaaagagaatggacagattttctaactcagccaagtcctgtatgagaattcttttttaaaagctttaaaaaatattatgtaagtaatgtatccatatatgagaatagttggaaaatttagataagggaaaacagtgtccttattcctaccatccagagtcaatgacttaggcaaattctggttaattttctagacagatgacatcagatacatgcacacagacgtagacatgtgcacatatgtatctattaaaagtggagcctttctgtgccttctgtttgcaggttcccattttttcttcggaatgtaagctctaggagggcagaaattttgactgttgtgtccatagtactatgtatatggtaggcactgaacaagtatttgctgaatgaataaataaataatacattgtaaatgtctttttaaataaatgccaacataggctgggcacggtgcctcacacctgtaaccccacttcttt

SEQ ID NO: 104158 - DNA, 1036 bp, Homo sapiens
acataaagttacaaagtttcagccaggcgtggtggctcatacctgtaatcccagcactttaggaggtcgaggtgggcagattgcctgaggtcaggagtttgagaccagcctgactaacatggtgagacccccgtctctactaaaaatacaaaaattagccgggtgtggtggcggatgcctgtaatcccagctactcgggaggctgtcccagctactcgggaggcggaggcagagaatcacgtgaacccgggaggcggaggttgctgtgaactgagattgtgccattgcacttcagcctgggcgacagagcaagactcccatcttaaaaaaaaaaaaaagttacaaagttttcccctttttgcccagcctccatttgttttctatagatctgcatatccttttttttttgttttcttttcaaaggtctttttttgtatatacacacctatatgttttttgttttcattttttgcactattcttcaacttgctgtttttacttatgatgtaacttgtacatctttgcactttagcatgtgtatattcattgtatgtttttaatagttgaataatatttaactatatagactcatcataattttttcatttgttccctatagactttccagctgctttcaggttgctttttttttcttttaacctttacaaataatgttatagtgaacatccttgtacaaatttcggttaagtaaatcaaatccaggttataaattcctggagttgaattgctgggttgaagaattatgtgtatttaaaaactttagagagatttctaagttgcacatcagtgcaacacaagattgcacgagttgccttttgcagatctgatttaattactatttctcgttaatgtttttcagtgaccattatgtttgtttttgcatattaggttactctttaaaatgcatttattaaaaagcattttctggaaattagtctttctgtcatacatacagtaaactattgtttacgtaatttttgtttgaatttatttctgatgttctgttagccttgta

SEQ ID NO: 104159 - DNA, 1177 bp, Homo sapiens
tggtttctgtcatatgcatcattatggatagatattgtgttttagacttcattgactgaagttattagaaaagttctttcataaagaagttgagattggaaacctttttgtaagaaggatgctagcaaacttttagctaactttttttgtagataaatagaaactctgagttggggtagtcattatggcttatctccccaaaactagagtcaaaaaatttaaagcaaaggcagaagagccttctaatcattttttgaagcaaaggcagaagagccttgtaatcattatttaaataaagctttctgtgctctacctttagcctattacaataaattagatttgtctatggaaaactattagtacaacatactaaaagttacttttctgtggaaaatgaagtttactcttttggttatagatcttttgcgggtgattcatgtagctggaaaagaaaccacaaacatcttcagtaattgtggttgcgtgagagcagaaggtgacatctccaatgtggccaatgggtttaagtctcatctcattcgtctgattggaaatctgtgttacaagaataaagataaccaagacaaggtaagaggatttcttagtatgtattatacatgtatggcttcatttagaatatagtccttggaagacattcactcttttggagtgaaagcttgaggtgcttagaaagtagcttggatagagagatatatattttatatgaatacacacacacacacacacacacacacacacacacacacacatatatatacacacacacacgtgtgtgtgtgtgtgtatatatatatatgtatatgttaatatataggctctttggagcctagacaaatttctaacacacagtagatatttaataaacactagttattattgcctattatcttaaaaaacaaagcttagatctatatcctatgtttatggacgatagcatcataagccttttcttctagatgttttaaaatggatataaaaggaatataatatttaagtatgaagtctttgaggacctagtaggctgcttttagaaacctcttatgtgcagaagagcttaaaggtagttatattgagaatgtgagagaatggtaagaaagatctcagggcagttggaccacatgcttcagattgatctcgcctttctgtatttttctgg

SEQ ID NO: 104160 - DNA, 1159 bp, Homo sapiens
tgagggcaaccatggcattggaaagtgaggggggaattgtggaaagtagaaaacagaccccaaactctgggtgtcagctacctaaatctctgctaatggctgaatcacacgtgtggggcaggctccaggcagctaagctaaggatgaagtcattgtattgagatttgagctcccaccctagagtttatagtattaagtccaacttacactgtagataattaataattgccctctaaaaaaaaaaatcaacactctttagaggaatataatataatccagaattgccacagcataatgtatcctgtaatgtccaggatacagtttacaattgcttgacgttcaggaaaatgtgacctgttctcaattgaaaagatgatcagcggagactgactgtgagaggacacagatactgggcttagcagacaaggattttaaagtaccaaatgtaaccgtgctcaaggatgtaaaggagatacgcttcataagagtgaaaaggtgggatatctcagcagagaaatagaaactataaaaaagaaccaaatggaaatcctagaactgaaaaatacagtatctaaaataaaaaaaaaaaaataccgaatgtgcttaacctcaagaaagatcacagaggaaagagccagtacactttaagatacatcagtagaaatcatctagtctgaaaaacaaaagcggggagaaagattgaaaataaaacggccgctttaggatgctaaatgttagggtaatttgttatgtagccgttgatagctggaataattcctgtgagacatggcgcagaaccaaacgctagacaacttgcacttttagtatatgggcgcaccattttggcaatcctcatcttcaggagagtgagactactgattccccccttgggaaattactggactgatttttgcaaaagaaagttgatagcgaataaagcactttacctttttaatgaccaggactgcctttcttgagcacaaaagaggtggtttttcttgtgtttaactattcttttgttgctaatttggactggcctcttataggaacaaaatgcagtaacccttaaaaggcttgcgaaataactcactgaagtcaggatcagattgcaccataagtaaatatggagtgtgcccaagtgctgctgtgcagaggtcac

SEQ ID NO: 104161 - DNA, 1618 bp, Homo sapiens
tttactatgtccttgcattgtgcttagtgaattacatatattatcaactttaatctttgcatcagccttgcaaagcaggttctggtaaccacattttaaggagaggccatccagttaggtgcagagcccagggtagaatttggatttgtttgcctattgagttcccaggcctgtgctcacttcctgccccatggtgagaacttgccaaaaggttggagaaaagggtttaaaatagacttcctgcaggacttcaggctggaggctggtcagtctgcgtctcctaggccagccaggccccttagactccctcctggttgaagttgggagctcttgggggtcctcttatccttgtttctgattcacccattcatcaaatacgaatgtttgctggcttggggatcctttgacgggtaattcaggcaaggtattaatatcttctgtggagcttccattctggcatcatctggggaccatgcttgcctctttgaatcagaatctcaaaactactcatgacacagattttcctaaaatctttgtgtactgcctgattcctctgaattttgagcaagactctttcaagcccaactgtgtctgtgttgtctgtgtaacttcatccattgcagtgagtatggtgcccacctgctggatggccctcttacacttgtgtggcactttccattttccagagctcttttcatctgctttagtttgttggagccttatgatacctctgtggaaagggctgaaaagatatttccaccatcattttctaaatgaagaaaccaaggccccgagaccaagtgtgatttaactcagctagcacttgctgagtgagaattgccgtgtgctgcatgctctggagaagacagtcgctttagtggtggaatgacacatgtccactaggagctgtagcaaaagtccgtgtggtgaggcctgtcagaaaggaacaggggggtgatgtgtcctctgggctggctgtgccaggagcatttctctctaaggacaggcactggactgccaggagcatggtatcaactggaaggatggtcatctttctttgagatacttgtctttgggcaagatttaagagaatcaaggtacgttgcctcagattgaaaatctgcacagaaatgtattttatcccaaattctcatgagtctttaatgcttaagtctgtacacgtgatagatgtagtgtttcctgaattgtaaaggaattgctagacttccctttacctcgtcatggtagggaggtgtcaaatccttactgacttctattcttaccttgtttttttgttctcgacttgtgtagtatttccttgctacaactgtagtgattagtttacttctaaacttttgtggacctaaatggagattctgttttggtttctattgtaagaagcacaaagatactaatgctataaacatgaagaaagcattcttcagcttcttctttgttagaataaggaatgtatggtttacctttttcttccctattcttcttcttttcactattgtcataacctctttaagtgaatctttattagaagaaaaaccaaacgtttatttcataaagctaagtgcatttttcaaatcggacagacagatgatctagttta

SEQ ID NO: 104162 - DNA, 1195 bp, Homo sapiens
atttacaaagactagtaaaaatagataacttttcaaatgaaaattaatgttcctttaaattctgagttctgtatttttgaaagtctttttttatgtttgaatatattctaatttactgtaatttgccatcgttttatttgatccaaatcatatatattttagattataagaacatctgtattgtataatatttgcaagtaattaaaaaatattttttaaatcctaggtttaggcttcgtagatctgaatgcggttttttcattaatcttaaataaaatttaagactgaatttacagttgttaaacattcataacatgatcaatttttagtgggttttttggtggggtgtactattttccaccctttttgtatctagttgcaaggagccaagaacaggcaaattattaactcctttattatttcctcctgtctgaaatgttttcaagcagcgtatttgtctgttaaatcatgaaaaactgaaaaaaaaagtctatggctatttcctaatgattttatttaggttgttgctcttaatgaggattagtacctgttttgtacatcagtactggctgacttgtcagttactcggataattgatcgagtgattgctctgcagagaaataaataaatgcttaactaatatgtgttagtgtttttctttttgcaactgtaaaataggccggggtggcatggcccttggtgctcaggcagggccagcttctatattctcagcctatactagcactgtgtggacttcccaaccttcatactttccctgagtgaccttaacttggccttcagaactcaaggtcacaggtaccctgttgacctgtgcagaaacactttctcttctacgctcctcactatactcttctgccctctgctcaccccctgacttacactctacctataatcagtttctgtgggtaaataggttatgggttgttgattctgatgcatatttcagtatacgtgtgctgttgtttttggttttacttaataagtgtttagtgtgatacacatacgtaaactgatcaccagcagaactgtgacatatgaaacactttatttgggtatcactcaattttactgtagcagcctccatcccttcttagttataccaccgttaccaccacttttgtccttgctcctcccttgatgttttgtctttcatgaaacccatctcccaaggtct

SEQ ID NO: 104163 - DNA, 1001 bp, Homo sapiens
ccatgcccagcctctttgttcttcttttatactttgtacacctcttaacccttctttggccaagatctgggggctttagcaatgacaatttcaattatactttcagttgaaagatttttaaaagtaaaacgttagcattggatctggagaattttgctaactgagataattaatagctgggctggtggtgatagggtttgtgtgtttttgagagagagagagagagagagaggaagagacagacagagatggaaatataaagatcattcttccactgttatatgtgttttttcccctttaaaggaataggcatttgaatttcctctctgttgtcaggtgttctgacttgggtacatcagctcttactgagtgcttgaatgttcaggatttctatgacatatctcaatctaatgaaaatctgactgtgaaatgtctatatatctccccaggcttcgttttcttggttaaatgagaaaagtgctcttatttcaaatgttggaaagtagctctacctttttctggaaaaaaaaaaaaaataaaaaaaaaataataataataataataataataagatgggaaatgtctgtcccacatctaaagcagttttgatctttagcatatttagtttttttttttttttttttcctggcagcagctgaaaattaagaggatcaaagttatgttcctataaaagacttttttcctgtcagtgcttgaaggcattgtctgactccccccacccccacgttttaaaagctgattgcttatcttattcaggtagaatttaatttcatgcccatcatattctaatagaacaaaaatgatacttagtttcagactgtggattttagtttgaattcaaacctactgctatattgcagttaaagttgggaatattttttactccaaatagaaatgaacgtgctattttggcatagtggtaagagcttgtagttcaattcaacaagtatgtgtttgccatatgctgtgtaccagccagt

SEQ ID NO: 104164 - DNA, 1032 bp, Homo sapiens
agctatagccactgactttgtgcttggaacaaaatacataattctttttggttcaaaagattagattcaaattattggtcatcagaaactgaagtttcctaaggcatatcacacgtaattcaaggttgctttgatgtgttattctgctaatccacaaccatggaagttcctggttagtgcaatgtttcatgctctgacagctatctttaagatgttgtttttgggttgccaggtgttcatttaaacacactggccatgtgtttgcacacgcacatgtgcatacacatagccactgcggagcgccaggagctgtaactgaacgtggacttgatagagcagtatgcgatgtttttgtcttcagggcaagctcttgatgcatagcttcatgtgacatctcgtttataacagcctgaggcatcagtaatctttatagcaagaattctagtgctgtgttatgcataccaagcttaccgtttattctgcccagtaaatacatggcttttatggagtcataaatcatgacagtaggagtcatacctctccaaaaaagaagagatttaaatctttagagttaacaagatttaatgtaatttagacattattcttacttagaagtaccattcttatttaaaggcagtatatctcatatctttaaagataactttagaaacttactgccagagaaacaaatattgattaagagcacactgtgtgccaagcattatgcgaggtgctggagagaaggaaggggaagaaaaggtcctcaccctcaagtaacttgaagcttagagggacaatgataaatagtaaaagattctagagtccgggcatggtggttcacacctgtaatcccaacactttgggaggctgaggtgggcggatcacctgaggtcaggagttcaagaccagcctggctaacatggtgaaaccctgtctctactaaaaatacaaaaagtagccgggcgtggtggcgcatgcctgtaatcccagctactcgggaggctgaggcgggagaatcacctgaactcggga

SEQ ID NO: 104165 - DNA, 1114 bp, Homo sapiens
ccctaagaaaggaaggaggaacagggggaatcttgaattacattctttccccacgtggagatagatttgtgctaattccacaacgtggaacatcctccttcgtttgcttagacttccctgggagcagtagcccatgtactggtggcctagctcaactgtggcttggttctgggcctgtaaagccatctttcccacctacagatgacattccctatcttcatcatgtgcttttagtcaggtttcctgcgggccagatgcatctgagagtgtgccctcattaatatgggactctgtgtatgtccagcacatgtggggtttattcacgtaccagtgattattattcaacatcgttccctttagtgcagcaagcactttctgagtgcttaccatgtgccactttctgtgaacctctgcagttcaacagtggagtcagaggcagtccttgttctcaagtagctcatgatctactgtgggagacagatggctagatgatagggtgtagtcatatcccattatttctgataccccaaatcttgatcagaagccttgatcagaagctaggaaggcttctgatcaagatttgtggtgtcaagaataacaacgattacagcaatagtagttgcttattgagtgtgtcctgtgtcctaggcacagttctgagtattcgtctcttacctcatttaatgatgatacctctcccatgttgcagatgaggagactgagggccagaatggttcagtagtgtacccaaggccacacagctgttaagtggcatgagaaagaaagaaactttcattttaagcctcttagatttttgtggattgtttgttactgcagcacgaaccagcccatcctcactgataagagccccagtgtgcggagtggattcctgagccagttaaaaggttgctacagcagtggaggcctggttggagggtggtgataagcctggaaataaaaggacatatgtgagagacagtaatttgataaagagtaatgaaagaggaagctttctttcaggtagcttattctgtttcattattgttgttttccttttgggaaagaagttgaattttcattgttggcttatgttttcaagggtgacctcagtatt

SEQ ID NO: 104166 - DNA, 1105 bp, Homo sapiens
agttgtggtcttaactgaagcaggtgaatggaccatattcgcctttaagagccttctgactcccaggttttctgatttttaaaaacttcctatttagtcatatgtttttacttcactttatggtttaagtgagccaaccaacaaaagttactcataaaagatagtattttacttgtaacaattgcagaaaaagtgaaaagcttgacattacaggtagaaaggaagtcagtctctgtcccctgtgcgtttccgagactgtgtttctatttatttgccctttgtctgtttcccctgaccagcgtgcgtttctttctggaggcgcagggacctcggcttatttttctctgtctttgcattgcttgacagagggcctgacccagggtaggcactcccgcttcatgactacatctcattttttatttatctttgttatgatagatagcagataaagcagttgatttcagtcagaagcagaccacagcagcaggattctttccacggtgcatgttctggctgagtgttggtgggctccaccctagccgaacctgtgtctgcacacctgttgtgtcttcctgggaggctcccaggcatgctcctgtctggccagggtgcttcctcctcgctctccagctggctgaagggaagctgggcaagagtgtatgtgtttaggccacagggagagcacagactcccagagcatgaaccaaggggcttccaggcctcagggactgcctcctggtcccccagaggccacctcactcttactcctgtctccaggctggtgacctcacatggccccagccatctctccacatcctcccctccctgctgtggagcccccactgacagatgccttccccctgtgttttggctccaaattccaagtgagagtaattgcgtggcttcccttgggtctgtctccatccctgttgtagtccctcacagcccagactgtggactgcagaggcatcacctaggggcttgtctgagatgcagagtctcaggctctaccccagcatccggaatcagaccatcctcaggggattggaatgcacagaagcatttaagaagcgctttgtaaagccatggcctctcctgcgcaaag

SEQ ID NO: 104167 - DNA, 2012 bp, Homo sapiens
gtttctacttgaaggccaagcagcctggtttggaagcctgcatggctcagctgcccactagttgtgtgatctggggcaagagtaattgagccctagctttctcaatagagaaaatgaaaatcatgcattatgtcttgctgcattgctataaacacaaacgataatatatgtaaagtatatcacgtgatgcttggtatatgaatatcacccaaaatactaactgctgctgccagtttttttaagcattggtattctaattaaattatgtttttgccagtgattctgagacaagagtttttaaaagtttcttcatggaaggatctgtaccgttttcagctttttattcctatgcatcatttttgcacataatttctcaataaatgtatcaagttgaactttttgaggcaaataatatttatgtcatttgaatagtggacaacgatgaacttgaatgactttatgtatgcatgagcattaattttaaataaaccagaaagctacttttatatttcgaaaaataattcatttgggttttcctgttcaaactttgccatgttactcctaagtgataccttacttactgagatggatcagccttagggagaggtttgtcatactttgttacacactgaatagcctataattatcaagattatatccagttagcataaagtgctgtttagtttctgttatgtcgttgttaccatagctggagtcgggtgggtgtttaaacctttgtgaactcaaaattctttaatgatgatggaatatttcatgttttagtattctcttgatctagagtatatgttcaaatgttttaccaggtatgtgttttttacaggttcatataatatataaaatgcatttctgttccaagaaaaatacaagtggtaaacagttgggagagagcttgcatattttcctttattgtcctgtctgatgattaatgcattcagctatgttcagcctcacgtttaaccaggttagtgtttagtttggttaggctgttttccttatgagaacagaaatggccaatcctgtgccctgcctgtcttccagatggagtctttgcattgtttccagatcacagtgcttaatgtaaggtcagattttcttgtgaaaacagattttggattaactatgtctgtgcacttgcacgcacccctccgcacctgcctgttcacttaagctctagctgcctgctggagtcatggttctgatttcaagatgcaaatgagaattgagattctgctttatagcctaaaaatgcaaaagcaaattcctactgcatgaatggtctgcaagtctccctttcatagagaccatgaggtgtagtggaaagagcttgattcttatgaggatttaatgtaggggtgagcagactatgctgtgggcctctatttgtaaataaagttttattgggacatagttgtgttcatttctttaatattgcctatggccattctcacactacaacaacacagttgagtagttgcagtggagaccgtatggtttgcagagtcttaactatttattttctagccctttacagaaaaagtttgctggcccctgacttaatgcaataaaaaactcagtagtttgaatcccagctgtgttatgcaatagctgtatgacattgatcatgttctgtaacctctttgtaccttaatttttcccctattaatgtcatttatccatttactcagtgagtatatattatgaacttactatgtgccaggccctgctccaagctcaggaaatacagcagtgaacgaatactggcctttatggagcttgcgtctcagtgaaacttatcttcatgaggataattgtacatgcctcctagggaggatgagatgaattaatatatgatacctgtaaagcataagtagagtacatgctcagtgtgttcgttattatgctaactatagggttgttaatgtgtaaaacaaagtagaacctctgttcagagttggaacccttataagtccgcgtttactattcttgaggtt

SEQ ID NO: 104168 - DNA, 1034 bp, Homo sapiens
atatagctagcttcttaaaaatcagctaatttcattcattatttaaacaaagattttatctgctagttgaataattcatgagaaaattgcactaaattcagatgtgaatgtttgctaaagaaaagatagttgctaatttttctggaatttggtagttgaactcagagaatatttgtattaatcacattgtgttttgtacttccgggtactttaagagcctctgccattactattcttgaaaagcatctttattttgtcacaaaagcttggagaatgctactcactactttaccctattgagttttgccatagaactgtagtatcattctctctggattcctttctttttggaggtgtcatggggagcagggttagtttatgggatgcagtctctgacattctcggcctcactgtgttcccgtgtggccactgaggccccgtgcagtggtgcagtccttgtgtgcgaagctgggcgccagtgcagcccgcactttatcacccttcctgccagggcattgctccctggtcggaaggattgttggttcttccttacttaggtctcgtacccactccaagtgcaatgctgcgggcacatctcagctggtcagcaaaacttgtactattaaatgcctttatctcataaaatcttaatttataaaatgtaggcagctggaggaatgctcagccttcctttatggcaaaggaaagccccaaagaacattttttacctatcaaaaaagcaactttaaaaatctgcagcatcagtaattaaaagggaagcacggacagttctaggggtggtatgaattgggagaaccctcctgggaggcattttaacagtatgtctcaaagacactcaaagatggttttgttttgtttttgtccagtaattcttttcggaatttctccaaaggaaataatcagtgatgaggttaaaaaaaattgtctatatggatgctcattgcattgttggtgaaaatttagtcatgatgcaaatgtcctgaaatgttcagtaaattatggtaggttatagt

SEQ ID NO: 104169 - DNA, 1036 bp, Homo sapiens
atccttgatttctagagatagaacattttaaacaaagaccttttaaaattatagtattttattgaatttatttttctatatcagtgccaggagacagtatccttgtgttttttttctggtcttagcatctatgtaaactttcctttacctatgacatttactatgggtttctgacacatagcctttttgaagttaaaaaagttctctagttttctgataatcaaaaaaaatcataaataggggctaagcatggtcgggtactttttctgtgatggttgatattattatgagtacattaatgaggttcattgtagattttctgatccacttgaatctattcttgcatttttgagaaaagtctgcctgaacatgatgtattattgtagcatctttgatttagttatgctaatattatttctagaatattttaggggaaggggatctattttcataagttaaaaaggcctttaatttctttacagtggtctgtctttcctggttttggaacaaagtcatactagccttgtaaaatgagttggaaatctttccttatttttctgttgttttggaacaacttgtatacaaaatacatgttctgtttcttgaaaattgggtggaactcgcttgagagctatttgcgtctttgtgtttgttagtgagtcttggtcattttagtatctttaaaaatttttgttcttttaatattttttcttattttcttcccaggcacagtttattttggaattcagataagaactgacacttataagcattccaaatgttaataaacattttttcttcaaggcaattaccttttcttaagctcaatcttagcactatcctttgcaaaaacaaaaattttaaaaaagtctaaatagattaaaatagaagtcaattctacccttctcatagaaattattctgaaagaattagaagattcaatgatataaattagattaagaggaggtagacttaaatttagtacctaaaatataattatatttcactaaataagaccgttattcttctaaagagg

SEQ ID NO: 104170 - DNA, 1034 bp, Homo sapiens
tttcccaaaggagcttggttattaaagttgggcctgtacccttagcggagtgcctactctggcattattggctaatgtgggaaagaacagttcccaaatctatttgttgtcctctgtttacacttcatttccagaggctaaatgttaatttgtttaagccaggcttattgtctcctggagatgcactaccacgggaaagtgttgactgagcttggctcctcagtgtgaactgtaacttgtgactcattaattacgggcctacaatcaactcccaacatgttagtaaagaaacaaacaactttcttgtttaatgaagtgctgacagaagaaaacttaattgtttctctcctgccccaacattagcttgacacttgtagttatagcagtaaacttggactttgtaaaaacaaaattgtatcgtcagtcacccttcctgaaggtgctgtattggtgtctgcttttcccagtgaccttaacctgtgttcattcttaagtatgtaattgtgtatttgtcataatgccgctgtcatccttgtccagaataggtcatttatgttgtaaacgtttaatgaacttctataaatggttcccttgtatcctttcctaatgcagctgtatgaataagaaatatttatccaggaacgcataccctcagttgacacacaactccagtggaaccatgatttttaagaactctttagttcacctttattgcctgcttaaatttcagtttttaatgtgtgatttcatttccttcaaagaacatcttacccatttagcatatctcaagagttctactttttttttgtagaaagtgaggtgttttccatgcattgaataataaatcccgaatacttttatttctcactaatcaaaaaaaacctggtttttgaaaataaatttgaaactttgcctaatgcagagaagaagtgtaaattcagccctgttgaagtaattattcagtttcgtcatgcatttaggagctactgcccaaccccttgttcctaaatgaactaattgcatttaacagtgtg

SEQ ID NO: 104171 - DNA, 2224 bp, Homo sapiens
tcaaattttaaaacctttcccctgttgcttccggattgaatcatagttaggaaagcttttcctattcccagcttagaagaggaattcacccatgtttttttctagtactgattttctttattatttaagtttagatctcatatctatctggagtttatcctggtgaacaatgttaggaagtgatctacttagattcttttttatatggctacctacttgccccaatatttttttttgaagtccagtgaaaataaaataaaatatcactttttgtttacatgtctgttttatgtagttctgggttgatatagatatttcagataatagtgcaaacaatattataacattgagtaagaaaacacaaaaggaacaagtcatctgtaatctctgactatagccatgctgttttcagtgtataaacttatcttctttctctctaggtaaatgagctggatggtatcccgttgatcctggacaactgcaacatcagtgacagtaacccctgtatccttgcatgtgaattaccatgcacaagtttacagccggggcccttagcaaaacaagtcccttgcctcatgttcattcagtatgtagctggctgccttgcttgcttgtttacttgttcctgagaaccaaatcattttctcagagttatggtgctagaatatcatttctgtaacctttgtagtatggtaagctagttttttcatggtgaataagacattccaaatgagcatgtggccaaaaagcactttaaaacctggggcacaggcagcccatgcaaggcactgtgctgcgcatcaccggtgtcacctttccagtgtgtgtgtggtctctagagtagacacgaactatggcatattgttttgctatagagattctgagtacccagtcttttggaagtactgttttaacaagggtttggcaacgtagaaacatgaggagcactctggctccctagcaagaggaaggagcatctcagtggtgctgaattctcatcttcggagggtttgtcctgcagccctctgcggcagaagctgagagcactggctcttgccctggcttgggttggccacccttgctggagggtgttctgcagggaccctgcttttttcctaccagttcaactagttgtactatacaaaactgtacagtggtgactaaccagggaccggatacagcttgtttagatttgagataaaacctactgtttaatttcacgaacttccctggtgaaagccaaacttagctgtgtcccttgtcctggtcactgcttggctggtggtggggcaggggtgaataaggctactgcaaggactgggagcgtagcctgcgggaggcagtgaggagcctagcctagcattgaggagactgaggaggggggcattttaaaaataaaactatggcttctgccaagaagagaaaagcagctgatgaaaatcatgtgtttcaaagtaagtagactgagcgatgcttattatttgtgctgaagatactgtcatttgtctgattagcaatagaaaacaatcttattttaaagagcacagtagcttgtaagttcagtcaggaaaagacaaatacacagcctcagaagactcctctgcagggtaaagcaaatttggtttagtgcgtggcattatcatgagtccctgaaggctgtgctcattaaagagtgttgacatttttttagccccccaaaaaggaaagaaaaaagaagaaagcttctagtcatgggaaagcagtacgagaatgttcaggtacaattgcagatgttgcatttcccaatgaaaacgatgatttattatgaaaaaagaaattcactcacagtttacttttacattccctgaattgaccttccagtgaagcagggtgttcattgcgtctttggcttttagcaaagaccagaaaataaaaagactgttgtacacgagcacattgtaggcctacagatgctcgcagcaccttccaccttggtgtcctccttgccagatggccatccgttcattcagttcttccttcaggaaacattcattcagtccctcttgtgtgtttacacccattgccttattgaaccctgacaacaccatgaagcagatactatgattatcatccgtatgttgtagatgatgaaataaaactgagtctctagcttgcccagaggtcagaaccagattttatacatgtgagtgcctgaccttagccacttccccacactgccttctta

SEQ ID NO: 104172 - DNA, 1039 bp, Homo sapiens
gcttcctaagggcagggatcaagttttctgtgtttcacctcaatataaatataccattgtcttgcatgtagtagataaccaaaaaatatttcttagatagatacctgaatgggaaaaggaatgaacaaataaatgagcaaagagcagcttggtgaaatatgtgtatgtgtgcgtgtgcatgtgtgtgtatttatttatctggggggagagggtggttctaagctcaagagaaatgtctcccatgagttctttgactcgggtaaattaagtattcttggtttgtcagtcatattatttaaaatttggtttaacccatttttctagtaattagcaccatccaagttttattgaatttaattttagtattttgtgttaaaaagcaatagatattttgggcatgctgagactaggaattagtgctggtgtcgaatatccactaataacaccaccactcttctctgagcactctggataatgtccttcttgggacaggagtgaggcctgggatgcctttggataggagtctacccgtgccccatgggacatctgcagtcaggactgtatagaacattccacttttgtcggccaccctacgggttaggaaatccaaactggcctgtcagagcagattagaagcaaaaactgccccacagtaggggatggggctggaagggttccttttccgtttcttggaggtagcttttagagaccaccagggatttccaaatccagggaaaaggcaccagctacaaggggaagcttaactctgaaggaccgccctgactgctgcctcctcagggacacgagcccaactagtgcccagctgttcactcgcccaactcacttttgggtcacccacagtaatgacacagtagccaatgccatcggaaaattccagctccgctaccacagaggcaatttcttatttgtcagtttattgtgggattttttgttgttgttgtttccaaatagaaacagctgaactttatttgaagtgttttttctttcattcttttttgatctgtgttttgatcggttg

SEQ ID NO: 104173 - DNA, 1641 bp, Homo sapiens
aaatgcagatacatgtttattagaagaggagtcctcatcccctcagccgcagacctggtactgggcagcacagctggaggtgagcaagcatcaatcaccacctgagctccgtctccggtgagatcagcaggaggtgagtgagcatcagtcaccacctgagctccgtctcccgtcagatcagtggcggcattagattctcataggagcgtgaaccctattgtgagctgcacatgtgagggatctaggttgcatgctccttatgagaatctagctaatgcctgatgatttgaggtggaacagtttcatctgaaaccacacacccccatccgtcctggaaaaattgtcttccatgaaacaagtccctggtgccaaaaaggttggggactgctgcattaggagacacgtgcaagaatgctcacagcagccttattcttcagagccccaaagtagaaataacccagatgtgcagtagtggaataggtagttaaattgtggtgtgttcatgtcatggaataccatacggcagtaaagaggagtgaactgctatgtgtaacacatggatgaatctcactagcatgatactgagtgaaagaagccagattcaaaaagaccatgtactgtacagttcatctacctgaagttcaggaacaggcaggattcatctatggtaatagaagtcagaataatagttacgtggggtagaagggtagggattggcaggggaggaggatgctggacatgttttcagtcttcctgtggtggggagtcacatggaagtacacgtgaaagaacttacctaagatgagcagtgcaggtaggacattctgctgcactcgtattaaaattgtttaaatcatttattgagtgcttttggtatgccaaatcctgtgctacattttcagaacagttctctttgggtttttctgttttgttttcacttttttcctttccctccctccctccctccttccctgccttccttccttcctttttcatggtgtcactggaagagtcctctttgttggaaaaaattgtttccattttacaagtgagaaaactaaagctcttgagagttaaagtagctggtccaagctctcctggcttgtgatgggaccagggtgtaaacccagctttctctcactccaaggctttggtcctaattcagacgtttaaactccacacaggtccttcatccatgtaaaggatgaatgtcagtgtttctttccattgtaattccttgagggacaggtgactatacatctgtgttggatacaaaatctttcattaatcctactgagcatctagcacgtagtaaccactcaataaaattcactgtctggccaggcgcggtggctcctgcctgtaatcctagcactttgggaggctgaggtgtgtgcatcacttgaggtcaggagtttgagaccagcctagtcaacatggtgaaactgtctctcctaaaaatacaaaaaaaaaattcgctaggcgtggtggcacgcacccttagtcccagctactcgggaggctgaggcaggagaatcgcttgaacctgcaaggcgcaggttgtagtgagctgagattgtgtcattggcacgccagcctgggtgttgcagcaagactctatctaaaaaataaaaataaata

SEQ ID NO: 104174 - DNA, 1087 bp, Homo sapiens
gaacgaacacaaagttcggtagtcacaggacacccttgccgtgctgcataatgatgtctcactctgtccccaggtggctttaccaagccacatcactgacgtattcattgtagttgactcagaaccactagggcacttctgtgatcacagcagtcccatgcaggaagctttaccttcaggaaagctgctggattgagactggagggaagtgtgactgcctgtgcatgaagtgctgagatgagttcttggcctgtggtctgtgcttgtatacattattattatcatttaatgtatgtattttcttatgaagttaattatttgccaatttttctttttgcattagattaattaaaaacagcagtgacttttggatacgttgagaaagttaatacctttttaaattgcgaaacttaaataccattgccacacagattatatattttgtgagacacttgagagactgggtagccaaagtttggcataaaggaacatgttccagtaaccctgataattgtcaggatttttgtctaaaaagaccttagtcacatttagcagtgaccaagggcctggtcaaaacgtgagtgtgtcacagccattcagcactgttggactgtaactcctgggctgttttattttgagatgatcatttctatcaggatcaggaagtgttctattctctgtaccagttattctaggaccaatacattaaaaagcaaaaacgtattgggcctgttggattctgtgaagggttcttcgaaggaaaatctctaatgggacttataagcaggcactcatttccttatccaggaaatgaaaaggccgtgtgctacggtgggaccaccaacctaaggaagatgcaagctctgatcaccgtctagttggagaaacaggccattgtgataatacaggacagaacgctaaggggtggtagaagaaaggatggcctactcagaggctctgacccaacctgcacatctctcatttgtgtttcttctaatgataagtgacttggactctgagcaacttggagggaattcagaggtctgcttttctgcctggagttgactgcttcttatggagtgagatg

SEQ ID NO: 104175 - DNA, 2889 bp, Homo sapiens
cccccacaactgtctcctgcagcatgaaggctgacattgtatcgtggctgtgtatccacatgcatttattaaatcacacctccctttcagcccagatctgacagaactctgggagctaccgcctcataagtagatcaaatccaggcaccaatgggcaaatattttaaacactcatactgtagccaggagctacaaggaccagtaagataggagtctgagcacatggtgagcacacattctctggagtcagagctcgtgcaccgtggcctgaatgtctgcggtgtgcatgggtgtgccaggcactctgctaaccatgctgcatacagtggctccttccgagtctcagatgtgacattggagtgctgccccaaatccaactggaactacttcatggccccaaaaccctttcgtgtggtttaagttagaagtggtattggttgtttctgaccctgaaacctgtgtgtgatggggctgccagactgtgactgcttcgtaccacgctttgctttgaagtggtcagtaaaatgattccagagcatgtcatgtacaaaattagtttcattgccacaggatccttcaccgccaaaaccccgtgaatgtgaggtacctgtgagcgcggccctccatcggccacagaagcttttggagtgggcagggcacaggtcatcttcccatgacttcactgccagatggacgggctcatgggtcctgctttgcctggcgtgggctcatgggtcctgctttgcctggcgcgggcgcttgagctttcacatctgggactggtgagggatggagagtacacgcccagcaaggcctggacagcgcactggtgccacagcccttcgctcgggcccacggggtgcagtggaggaagtgtgagccttgtacagagagaggtttcaggcttcagagaggaggcctgtgaagtcaggaacatctcccctctccctttgcaatttatggaaagtacattgtgccaagcaaggacagtgaatgggccttcgtttcagcatctttaataaagtactgatttgggttatgcacagatataaaatctctagtggacagaggtgtgaaatgtagttctgtcaaactcagcagtgttttatggggcctatgtaccacttcccttacggcctagaagccgattagcagcctcagctttcagtgcaggggtgttgctgagatggctttttccctccggaaagactgaaactgctctttcttatagtgtgtattaaatgcaaatcttactctatattcttcagattgtaacctataatttccaaatctgacaattatttctctgccttcttttagtattttttttaacactttcagtattagcaattagccattaattggtaaattggagggtatacatactcatgattttagcttttatttttaaatgctattaaggcataacaggctacgaaacatagaacagtacatacagcattgcatggaaacctttgaagcacagatgttctgtcgtattaaaatataaaaactcagagggaaattagataccagatagaccaacaatttagggaaggaagagggagccaaaatgggtggtttgtggtgggtattgaacacatagtttccagcgtcatgcagggagaccctgtgtagaatctgcaccataaattagacttgtactttaattttctgaatgagaagagtatgcagtgggaccactgacataaatgagagttgagaacaaaagatcatcatagcagatgaaggtggaagtaaagtgaactttagaaagcaatgaaaatatctcttgacattcgagtttattctgaaaaacttgtgaccccttgcaaaagtaaggggatcttcagatgtcctgtcccaggacctccatcttgcctggccccctccctgtctcctgcctcctgccttgctctccagcaccctgcgagcgggagctcttctttttggaggtggtcccaacaggtagcacaagtcccatgaaactccaggaagcccagggctccctgggcagcactttgggaagtgtcttttttcctctcagtaagaaagttcttagagaacagggccaaggtcaatgaggactcccccctggggatgcactggggtgagatggggtgaggaggttgccttttcagggccacactcttggcatgttttcttctttggctgacagaaattggcatattttaaagtattttggtttgtgcaatataacgcattttgagagcaatttttaaactgaactactactttgcactctaaaaaactctacattttaccatggtccgagaagatatttgtttagatgtgacaagggatttgtgaagcatcttcatctaggaaaacctttttctaacagggcagataattacacaggtttgtagaagcctgggtggaggaggcttgcccgtgctgaccatgctatgtgcaggccccctctgggagaggttctaattgtgcgcccctccctgctccacagcgtactttggaaagccctgcagcacacaaatcccttgccttcatgggtttgttatctaaaaagagttttaaaatatatgtcctggatgcgaaaacaatgcagatattacatataatatatgtatctgttatacagatattataaataaagtccatatatatcagaacattatgaaaagtcttttaacacatttaaatcattttaatttacataatgcatattttttcagtgccagtactttttaaggttggtttgtttatttacttatttttgagacagagtcttgctctgtcgcccaggctgcagtgcagtggcgcaatctcggctcactgcagcctctgcctcccgggtttaagcgatttctcctgcctcagcctcccgagtagctgggactgcaggcggct

SEQ ID NO: 104176 - DNA, 1281 bp, Homo sapiens
ttttgatagctggaagaatagtttagcttgatgcaatctgtctcatcagacaattccagttttaacatttcagcttacctgactgtactttaaaagtgagcttggcacatcaatctgctggttattaatacccttactgtggattgtttttctgtatcatgctgtttcccagcctttggtcttctcccctgctaatatcttatcaccttgctggtacaaggccacccagtttagtgttaggccctgtgttgaaccagctgaggcccagtgcagtgctgcctcggccattgagcagtacaaggtgctttactgacgctgtggtcttggtggcctgggtcaagaccccagagccccctgctgaagagctggccagcactatcaagtcccgctctagtgctgattgcagggttctttcaaggcagttttgcaacaaacaggctcatgccttctatttgtagtagctatggaaacgttagaagctctctttctaaagctaagcatacaataaagcacttcagatgttggtgggattagagactttagaagatgtttaattttctcccctactctttctttctctctgtccctttagagagggaacaagagggcaatgtgaatattaactgagacttgctttaatctctctcgtgacacttcagactgtctaggtctgcacaggctgcactctaacaaggagtggcatgcatattcatgacccagggctgtggaccagacacgcttcctagggctatattttacagtgtttttattttctactcaaatttcttgaaagaaacaactatgaaaaattgattttgtgattatgattaagtctagaacccaagacagcagtgctaaaatgttctcactggaaataggaacagattagaggaggtttgtgtagtatttgatttacagatagacaacacaaaccccaaaatgttggtgctcacttagagggggcagtggagcaaacttcacatctgcctaagaagaatgcataagggttctaccttcgtgaagtcctccttaaaccggaaggaaagatgaatttcacttaaaatatgtaagagtattaaatgtatatttaaatgaaaagtgtggaggtttactattattggcttggttgttatttctgattctcaaggccgtgaaagggagttgactccagagtggtcttgtggccttatttcttgtcagccttccacacttccttgacttacatctttttgcactttggatactaattttggaagaagacaaaaatgccttttctgcttt

SEQ ID NO: 104177 - DNA, 2734 bp, Homo sapiens
tctttagctctagggtttgataccttgtggggacactgactccctggttctggcattggcagtgcccgagtgggaagcatctgataatcatcaggggacaggacttgtttgtcttgctgcctttatctgctcgtgggcagggaggtctctttctttggataggtatttgttctaccctaggttctttgttgttctccctggatcagggtgccaggcccagtagggacacagcctctcttggcagtctcttacatatgtccctggatccaaccactgaagactggtccctgcagtagtttttgtacagtcctttatagaactacatataatagcttaatgtttgcatgaggtttacatggctcttggtgattaaatcaaatgccctactcagtgatgtggcgatgctatcccagtcttcgtaggttgtctctggtctcctgccaagcggaacgtgccaggtgaacacttgggcacagtgagccccgatgctttcaggagcctgagtattcaaactaaacacagcaaatccttcaaagcccttccagcttcatctttagaatactgaatgcgggaaattccacagtgactcctaggaaacaattcttatttctaactgggctcccattaaaacaagatgattttcctgattctaacctgacgtctttgtgactgattctttagtgctcttcttattctttccctagtgagtcagtaacataattattcaacaaaggaatgtgtgtgtgtgcacgcacacacgtttgcctgtgtgtgtgttcttgggttcataaacttcagtttgagctactctaagtctttgcttccttgttcattcattcaacaaatactgagtaaatctctctgggtgcccgtggctggacatcacacacacatgctggatgtacatgtgcatatgcctgcgttgcctctttttaatgtgtttgcacttgagatgcatattcagagaatgcatcctcaagaaaacttgtggattgatactggatgttccgtgtttctgtgctcctctactccttttctgataattcttatgtgaagttatcaaacaggaaagtacgttgtcacattccttcactctggctccagttctgacccagtgggtgatatatgccatccgaaaccttaccgaagacaacagccaaaaccaagatttgattgcaaagatggaggaacaggggctggcagatgcatccctacttaaaaaagtgggttttgaagttgaaaagaaaggcgaaaagctgatcctgaaatctactagagacacccctaagccagtaagtaccctcgagggaactgtccttccctttggtttgtagaaagctgtttccacttccccattgcttcaagcacgaggctctttgtaagaatatggatgggagaattgtgccctctatagtggtttaccgaggaaagccctaaagatagctgcaaacggtttttttgttccggctttatgctgccattttcttaaaagagggacaatttcaaactcattctgggtgagaaatacaaaaggcatatcaaaagttatacatggtctaaaagtaagttactcataggaattagattttctttaaaagatagttaatgttcactatagtttaaaaaacagaactccttgaataatattgcatgaattgttttaggtttctctaagttatttgtcaccactgaccaaagttctgggttttttccccttttgtctgatgaatcttgtgaacagatttgctacatctgcaattttgtttctttcttcttctttagtgaatgaactacatccaaatacctgaatttttggaatctgtttcatggatttttcatcttctaccgtatgtgaaattgcaagtgtttgaagatttataagtacaaatttgggaacatacaaatcttttaggtagtagagtttaacgtgtataagctaaaagtgaaagtaactgagtgttctcttgtttctttgcattaatgtaactgtgtggtttgcctttgtccccctggatagaacgtgcatttaaagaatatattgtacttactgtgacagcagataataaaccagtctcttggagggcacaacccttatttgacaaaacttggatgttggcttgactgtgtttgtcccttcagatggcaagtcagcatcattctttatattcctcttctcattgggttttctgaactctggcaggcggttgaagtagtttctcactgtgattaattctagcaatctcttttcacccctctgcctttccaaaacattgacaagactcatttccagttaattaattcgagaaccctccctcttcattttgggtactgggctgtcttgtcactgagccctatccctttggaatgtggcagggagtgaggttggtgagagaacatgtgggcacttaactcttcatgttccagttcatcccagaagtagacatcccaggacccattctgtgtcaaggtgaatgcctgtgtcctccccagcttcatgcctctgtcatgggggaaggaatagcttatgttctgctctggtgcagtgccgtagattaaaggtacatttctatcttctttgatttaaaaagcaccagtctcataaaggtgccactcagttttagccatgtcttcactgaaattgcaaaagtacttttagggagcaggagtttatttgacatctagttatctgtctgtctgttcatctatctatctgtctgctgtatgagaggtagga

SEQ ID NO: 104178 - DNA, 3092 bp, Homo sapiens
gtgaaggctcatatcagagacttgagcatccatagattttggcatccaagcgggggttcctgaaaccaatactccacagatttcaagggccaacttactaaactgttaggatttgttaatatttgttcattgtcctcctgccccagccgtgtaagacatgcctgcttcctcttctgccatgatcctaagtttcctgaggcctcccgagccatccttcctgtatagcctgcagagccatgagccaattaaacctcttttctttataaattatctagtctcaaggagttctgtgtagcaatatgagaacgcactaatacaacgtcctgattttgtggttctgttcttgtttttgtttttaggagctaacattgagatgcatttttttgttgttgttcagtaacttcacaatctaagcatagggctttggaaactgctaaaacatgtcatttgcaaaataggatatagaaaaaatgattgagatgatttgggctaccaattaatacgtctttaaatcaaatttttttgtgtgcatcttacatccattctctcttgaagtcattcatgtgctgccctgataacacatggcatttaagtgttatttaaatgatttttttttttcgagatggagtcttgctctgtcacccaagctggagtgcagtggcacaatctcagttcactgcaacctctgcttcccaggttcaagcagttctcctgcctcagcctcctgagtagctgggattataatttttgtatttttagtacagatggggtttcaccatgttgccaggctggtctcaaactcctaacctcatgatccgccctccttggcctcccaaaatgctgggattacaagcatgagccactgcgcctggtcttaaaatgatttttttactgtcctttagtttctgtccttgaatgaataaacaaagatgttagaacaaaaattccagtctttgcaggaagaaaactttttaaaaaatctttcatcatcagtaagttctacacataagtgcttcacatgtgaagcagtagaattgaggcggaatttttaaatgcagaaaagttgaggaagaaccttaacatttaagatctaatataaaaccaagcctgtggggtgggggggaaccaaaaaaacaacaacaaaaaaacaccctctcggtgctgtccaaggttctgatcgtttcagccatattggcttgtccacataaaatcaattaaaaaccttgttttcaaacttcagattttttttcttgtgtttgtatgacacaatatctgtttcctctttcctacacactttatatatttatttatattttgaggtcaaatattatgtgatactttgcaatatgaatttcatataccatccacaatataaatgaatttgtaagcttttgctgtaaacatagtggttatggtattaactcatccatcagactttcctcatctcaaccagagacattcctgtcagtggaaattaattttcacagttttccataattatttattcttgcttaaattagaaacattatattaaatgtttctttttgtttaaacaacgtcatatacattattcatttactcacaaatttctatgcttatttcacatcattgaagcaagggcttaggcaatttttatcatacggatttaatttttccaccactttgtaaagtgtattggccaagaatatcagctctgaagctagaattcctgggtttcagtccctgctctttctcctgcttaacccatgggcaggttctataagttctgggtgtccccattttctcattgtcagccccactgaaaatgcggctcataataccacctgcctgatgagagcacatgagagcacaagcaagtggttgtgtgtgaagtgcttagtcctggtattaatcccattatatgaatgaggaagttgagtcacagagaagttatgcccaaggacacacagcagttaatgcttagtgattaattgctatagttaattggaagagaatgagtgagaaaaaaatagatagcttcttttcccagaatcgtggaaaattaatatagcagaaatgcctggactatggctttggacgttgtgttagtgcattctcgcattgctatacagaactccctgagactgggtaatttataaagaaaagaggtttaattggctcacggctctgcaggctatacaggaagtatggctggggaggcctcaggaaacttaggatcatggcagaaggggaagcaggcacgtcttacatggctggagcaggaggaagagagtgagggtggtggagaagtgctacacacttttaaccagatgttgtgagaactcactatcatgataacagcaagggtgaaatccacccacatgatccagtcacctcctatcaggacattggggattacagttgaacatgaaaattgggcagggacacaaatccaaaccatatcagatgtagagcaaggagagtgctatgggaagaacatacgcttgcaattagaaaaactcaagttcaaatctcaacttcacttgccagctgtgtggccttgagcaagttacttaaccactctgagcctacgtttccccctcgaggactgtaccatgcactagggatacaacagtgaacaagacagacatggcctctgctctcataaggattatcttctggtgagggtgacagaaagttattaataagtgaacaaatatgtaaaacgagagcattgcatattgtagtaagtgccatgaagaaaataggcaagttgatggtaactggggtgttctttttgagtaaaagccagaagaaggttgaaaaggtgccagctgtgcaaagaatcagagagaagtgttctggaagagggagcagcaagtgcagaggccccaaaattggaaaagcttcacctgttcagggaccaggtgggtggccagtgggcccagtgcctggtggccaggggagaacatcataagaccaagtcagaggggtcagcaggaatcagatcatgcagggtcttcaaggccatgggaggaatttgaattttgcttgaagtacactgggaagctattgagccatttttagcagaggaatgccaagattctgcttgc

SEQ ID NO: 104179 - DNA, 1098 bp, Homo sapiens
ggcggggtggagtgcacagagaatcctgctgcagcagaggatggcagagccccacctgcttccattggcaggatctgtgtgggtccttattctgggcttttattcacattgttctcccccaccaaaaacctgctctttctttaaagcccggccacagtgccctccccctgtcaggaaaccttccaaggacttgggtccgcctcgatctgcaccttccactaacccctgggacgtgttcccactgccgtagatggtttcatgcattatgacgactcactcagagcaggcactgggagagagatgaatggtacgcctgtgggaagcaggcagcaggtcactgcagtcttaggcctggtcatgacagcccaacctggctttctcacagctgtgctttgatgatgcctgggctcacgtgtccagcaatctatcccttcaacaaataccaagcaccagaccctgggctgggcactgggaaaagacagtggctctccaactgaggcactaaagaagcgcagcttcaattgtgacaggggctgcaagagtgtcgaacagtctcctttcatagcgcgtgcatcatgccttcagcacccttgagctccgcaggggctactgaaaacctgaattctgcccaaacatctggccccccatctcctctcacctcctacttcaccaggaccttcagacaggaactccctcaatttctcaccctcaatccttccagcctgcacctgcacccacctgctcctgtctccctcctggacagtgaaagaagcccatctccttccaaggccagccctccacctgtgagcgacgctgcccattccacttccacagggacctcacgctcaggcaatcctcagtctcctgcatcttccacctctccctccctgccacctcctttcccgtaggctcaagcctgacccatcctaaaagaaaaagaaaatgcccgaattccagataccttgttattcattattcagctaagttatcttcaaacattttgttcacatctccccaaagaacacggaaaaaaatctgtatcaaactatcaagttgatttctaaattttttcatcttaagtatttacagatgcaaata

SEQ ID NO: 104180 - DNA, 1013 bp, Homo sapiens
ggatggaaaggccctgagccccagaagctgggtagccccagcctcctcccctcaaggaacaccaggacagggctgggcacagggacgtccaagagacagcctgggcgggaagcacccactccggacattgtggggctgtgtgaacatagatgcaagccgcttagcctcccggcctcagtttcttcatctttaacatggaaatgagaagacaccccgtgagcagggagggcactgtcactgtcacgatcattcccatggtcaccactgctctccggggaacagctgccacgggggcgctggggccgggtggcatccaagtggcccggactcactgacttactgcagccctcctgggaccggctggccagcggggtgctgggagccaccaggaggtcaagtttaagcgaaggcctcgctcgcttcactggcttaggcacgaaaaacccaaacccaaacaaaacgcagcaccagctccccacaagcgcctttgtgtctgcagaatcgtccactctgctctgggacatctgcggctgcccaggcagcagactcggcgagaacaagggctccgctctgaatagggattcacgcgggcgattctcaaccgcggctgcattcatcagggcccgggtgcccggggacttccttcaggccctgcccccaggaccccggctggctccagcattctctccccggggtggtccctggccctcccatccccagtgcctgccactgcccctgaaggctgcccggggggccggggggtattgtcccggggacacctgccctgtgccgagccgtggccgctcgggtcacctcggctggggctcgttcacacggcctgaaaggcgtcccctctatccgcacttgcccttctcctcctcgccgcagggggaggggccgggcggaggcaaacagtattttttctgttctctccggcacaaatggaattcaattagtgaagaagaaacccaagcccagccaaactgcgctttaaaaaatcccgcaggagagaa

SEQ ID NO: 104181 - DNA, 1050 bp, Homo sapiens
cgggagatcaagaagaacgcgcggcgcctcatgaacctgcataacaatgaggccggcaggaaggtagggtgcgggtgcggctggtgggggccgtagctgggaccgctgtatcacccgctgacctctcggagcctcaggctcctcttctagcagaagcagttgagtctccgtaggtgtgcagggggtggggccgtctgggtcctccacgtgcatggctctgagcctcccagcaccgggaggaggctgtccccatccagagatgtgagagccgaggctctgaatgccaacgcgatgctcacggcccccagggaagatggggactccatttccatgcagggtgtgagctgggcttggctggggaccccgtggcggagggtcccaggccacagcccatgtccctgcccttggcgttcctggtcccggaggtcacctcggcacaccaggaaagacttcctggcagaggcagcctttttgctcagcaaggaagggatgcccccaggaggcaggagcagcctgaggaaggtggaagctgtgagccgggggctgctggggagcaggccgctcctgcatggggcgggacggagtgtggtgggtggcaatggaggaaattcaggcagggacacaccggggaagaagtcagagcaagccgggccccgcccactggagatgagggccccagatactgggctgggaggagcagctgcacggcggcaagatggcctgagatagggtggccagccaagtggaacgcccagccggctccggctccgaggcctgggggctgcacccagggcagcagagcctagggggcttctcaggtgtgggacagacttgccgttccaggcaaagtggagctgaagaatccctcgggcccagggaccatagctgaggccactggtcactcactgcccttttctgtgccaggtgctaggctgggcacggggcagagaggaatcagggccctggctgtgggaactgggtccacatgaggggtgcaggggtcacacccaggacggtgagggcttggttgtgtaggagagtgtcagagtg

SEQ ID NO: 104182 - DNA, 1062 bp, Homo sapiens
accggcgtaaggcatttctgggacctaaatttcaatggggctctgttttgcctggaaactgttcataaaataaaataagcctatgtgtgtatgagtatgaagggatggatggtgatgttttccttaaaaaaacaaaaataacaaagtgcatgtgtgtacacagcagtcggggtcccaagtctgtgtggtatcaggcctagtcacggcaccactcacctgggcctcagtttccccagtctttaaagagctaagagagttctcgttctgtctgctgcacgggccaggagagtcacgtgaggcgaggtgagaacacgttgtgtaaatgatgaagtgtttgctctgcacacgtgaggtgctgtctttactaccttagggaaaaaccctctactctgaggccgttgttttaggattcaaatggttagtgattgacatggtgccgggcacttactaagtgatcaggatgattttgttgacttgaaccgtggtgtcaaaatcctctgcattggctgtaagaaagaggtgggctgagcacggtgagaaatggagtcgaaacagagagcatcccaggcctctgaaggccttcgaacatgacaacgagttggcccccactttgggggattggagtggacggtttggagatccccctgggacatacgcctgagagccctaagtgtttgtcccggggtccaagcctgtcgtctgcagcccttcattgccctgcctagcttggactgcgtaagcgtctgctgggcccaaaccccagcccggtccacacacttgggccatctctcctgggggaccggattgtgcggcctccagagctgcctggcagagggcacaccttctcggcgccctggtgccgcaccgcgccgcgctcccaacaccggcttgcttatgctttgtcctgatgatgatgaatgaggtcagcctggcttaccattcacaaaataattctttattgcagagaaagcttttctctatctgagatctgcccttgttatctacagcagttatgctttccctggcttttggtgtttgcctacgtgtaatgaagtagggagt

SEQ ID NO: 104183 - DNA, 1057 bp, Homo sapiens
tccttcattctggcatttcagatggcaggaagagcatttagctgaaatatttacctgctgatttggggttcttaaatttagaatcccctttcatgtgtttaagagagatatttacattcaaatcagccttttataattacattttaaattataataaaatgatggtgccggcgctccagttttccgtgtcttttaactgtaagagaagctgccgtgaattgaatgggggctacccatcacccagagtccccgctgcccaccgtgtgggttctggcctgcccgggcacacgtgtcctgagcatggcagctacatgggtgttacctgtggggacctccccgcactgccaggagaagggcctgacggggattctggccccacacagtgcgatggttgcccagcctcaccgcctgcagctccatctgagaagggcctgatacgggctggggtccaggcccactgccctcatgtcctgagccccacggtggcctgcaggcctggtttggaggccattatctcctcggcggccagccgggcacagcagtggccacttctggtcgaggcagttctgtgggtgaggggcgagcatcgcctcctgcaaccgtaacccaggccctgcctcccctgccatgcccctgtgggtcccgtcgttgccatctcgtcctcagtggcttcccgatgttgcctgctggcagggcaggccccgtgccatggagcatgagggacccttcccctcccagggccaggcttttggcagccaggccaagccgctgctggaatggaattcccggcgttcctggtggggcgcatggcatcggaatcctacctgctttgtctctggcatcagctggtgagccagtcacgtggccgtgtgcgtgagaccagagcccaggactgagggctcctcccgggcgcttcctcctcgctcactcacccccaccccctttttttggctttcagcaggactggctctgagcaggcgtaaaacagtgttaaaactgaatccgggcagcagggagctcctgtccacggcggcaggctctcacagtccaccgggct

SEQ ID NO: 104184 - DNA, 1013 bp, Homo sapiens
cctcggtctgagcggccggcctcggcagacagcaccaaatctgtaaacggagctaagctcacacgaggactctcggcggctgcttttgttcgtagatgagccagcagtcgatactggagggtctggggctgcagaaacaggcatatatagcagagataattaaaacatttcatgattatgacagccacattctgctgctgcaagctggaggattcatgccacccaaatatttagcaagcatcaaataaaacactggtggcaaaataaaagtaatagaaaaaaaaaacagagcgtaatacatttcaaaggcaaaagagtcaaggggatggatagggaatggatcgggggaaaagtggggagagttcagcattttaaaagaattcacatgtttaatagctggccactcatattttttttttggtataattaatgtaggcaaatagacccttaattctaagtcctggaatgagagatggtaaaatttcctgattattaatttatcatttttgttttttgtacagggtaggggcaagtagcagaaaaatcaattaattcacataaaggaacattttcattctaaattaatattgccactgcaattaaatttatctagtatttttaacatgtatggataacacactttcctgtgtacaccttggatacctgggaccgttatatgtgatcaactatcatcttagttttttagcttggttaacacttgacccctccccccacctcaaaatcagtaaaatgctgtggattctgctttttaaaaaaatcaggccaaaatctcagcattctccatggctcccagtgcttctcggcagtttttttttttttttttttttgaagaaagtaccacgcaaagcacttttcacatcatcgcttctatataaattccactatagactgaaattatacattctcgcagcacagatgggctggtctgtcattacggctgctgggtacttgttggaacacacagcatatttcaattgtggagtcgacaattt

SEQ ID NO: 104185 - DNA, 1053 bp, Homo sapiens
ctgctgggccctcttcctccaggaggccctcacacactgttgggccctcttcttccaggaagccctcacacgctactgggccctcttcctccaagaagccctcatatgctgctgggccctcttcctccaggaagccctcatatgctgctgggccctcttcctccaggaagccctcacgctgctgggccttctctccggccacctcatggcagctgggtccttggcccatctggtccctccggaaggaaccgtcgaagctaccatggcctcgtctttccacgttccaccttctcgggtgcaatgaacaagtgtgtagatgccacacatcctcctggggcctggcatctttgtccagagggcccgaggcagctcggggaaggcctttcaagtgcgtcttgggaagctcacggctgaccagtgagcagggcctgggtcccactcggccgtgtgatcttgggccagcccctccccggctctgagcctcagcttcccacagtctctctgacccccacttctgacatgtagtggatctctagagggttctgagggttcaggtgtggaattggctgcctcaggcataaaaacattcctgggcttcaacctgggatcccacctggaggacagaggagagatttattgcagagatgttcatgcagtgcctctttaaatgtggaaagctcgacgcaccagccgtgctcctggggttgggcgtttgaattgaggagttgtgataacatgacctgccggactctcgtgtggccgttcacaatgggagaagcctctgtgggcaggtggaggcggcccacgtccacacgcacacgggagcccctgcgagccaggcctggcacagggttgtcagtatttgctgccacgttctctctctctcaattttccagaactttgttgaatgagcacccattccttgtgcaatgggcagaaaatgtttaagttacaaaacttatcatctggccagagtgaccctagcctggctaaattatcgcaacatgttctcccccaaaagagagacatttgcaaaatgctcaggaggtcatg

SEQ ID NO: 104186 - DNA, 1980 bp, Homo sapiens
tgtgagggcatagagcttctaggagcagcagaaacaggagattttgcacccactctgggcccttctccaccagcgttcactgggggcttgtggtaaagaatggggcagagcaggagaccggaacgcttttaccgtggtgcagacctggaagaagagatgggtgctctggcttgatcctgtctggatccttctctctagcagtacaaaaaccttaaaccattggaatatggacagcaaatcctgtcactctgggcaccggtgaaaacctgtttcagctggggatagagaaaagggtacggtagggaggcaagaaactgtgctaggactatatggttagggtcttcatagctgggaaaggggcaggattcctgagaaagcctgtgacccagggacaccccatctcttgatcttgcagatggcgtcccatgtagagtgccgtcctctgggagtgtttgagtgtgaactctgtaccttgacagctccgtacagctatgtgggacagaagccccccaacacccagtcgatggtgtgagtgcatgccttttgggccagtgccggggaggcctgtgcccagtgctggttggtgggtggtgtgcctaggtctgacaactgtctcaggtgtggagctttagaccccaccctggccaggctctgaatgcttctggtgtaatctctggaggcctgggcaaggcttgaggtctgactcttccagaaccttcctccacacctagcccagagtccaatacctgctctagctgtgggggagcagctcagcagctgggggacctgtggtggcctccccctttggggctgcacccttgccatgacactttcttaatgggaggcctgtctcccctgcagacctggattagagccagtgggtcagggggcttatctcttgacctccagcttgtccttcatcaaatgccactttgttggaaagctggccggtgtgttactcacatgggatgcagtggcaggggcatggctttttccttctggctgtcgtccctctgctgaccaggagcctgagtgtcatcatgtcaccctggggtctcattctgatgtgtagcatgaggccagctggcttccaggggctgtgagggtgtggcttggggtgtagggaggcctggggtattcaggtggcagccttgtgcccccactgtggtgaatcagtcagggtctgggggcccatgttgcagcagccctgcttttggctgagaacaaggggttctctctaccatggctgttacagaggtgagagcaggttcaatttcagtgccagtgtggcccccaattgctgatcctttctgtcactgccctgcagcacgggtggcctagtcccctgccctgatgagcccacgcaggtatgcaggccctgcagaggtgcaggctgctgctgcctggccataggtcatggctgattttccgacggcagagatttgggctgttctgacgctgcattcactctcctgcagcctcctggaggaaagctatgtcatgaaggatcccttcacctccgacaaggacagattcctggtcctcggctcgtgctgcagtttgtgcagcaggctggtgtgtgtgggcccggtgggtaagcagcgtgggctggggccacctgtccttgctgtggttatcctggagctctccctgggtagggagggctgggagagagggagcagcgggttcaccccattatagatggggcccctcagctgatgaaggggagaggtgagagggcaagctagggtcagttagagggtctcagcctggtgtaggaatggaaataggtaattggtggctctgcacccaccccagtggcccctcagggttcctccccttcccaccaacagtgcagacagtccttgtgcgccctctcaccaggatggtgacttactttctagatgttcttggagggatctccaggagaagggactgtcctttcatgagcacttgttgtgtgccaggtcctgtgcttgg

SEQ ID NO: 104187 - DNA, 1054 bp, Homo sapiens
atgtggcctggaggcacctagtgcagaatattgtttcctgcactcaaagatgatggtttctgtggctaggcgcggtggctcatgcctgtaatcccagcactttgggaggctgaggcgggcggatcacctgaggtcagaagttcgagaccaccctggccaacatggtgaaaccctgtctctaccaaagatacaaaaattagccgggtgtggtggtgcacacttgtaatcccagctactcaggagactgaggcaggagaattgcttgaacccgggaggcagaggttgcagtgagccaagatcgtgtcactacactccagcctgagcaacagagccagacttagtctcaaaaaaaaaaaaaaaaaaaaaaaaaaagatgatggtttctgcattagcacaaaacaacatttgtttttttcccataggccttcagacttttcataaattctctttttttttttttctccaggactctgatatgttggcttgtcataactattggcactgggctttatatctgattgagaaggtaaggtgaccatctgtttgcactgtcttatcctataaagatgtctagagggagaaagatttttctagcttttgctatgtattcacatccgttggagccctgatgcaatggagcattaacatttccaaagagcactctaggcttcaacctttttagggattttttcactgtggaggcctggaaatcacatctgtggtgtataacttgcagagaccattcagagcgagtgcctgtggctggagtggagagccaagccccaactccgcagggtgtacctgcctgggccatgagatcttccaacgggagccaggctatggggcagctgctcaggacacccttgaccccagtgattccgccacagggttccatgtacaagactgtcacttgcagtgctccttatcgtgcacaaaagctagaagctccctgaatgtccataaagtgagaaatgctgagaacatgagggccttgtcatgacatgagaatgtgatgatacagtgtctggaagacagcacagaacccagctaaatg

SEQ ID NO: 104188 - DNA, 1299 bp, Homo sapiens
taatgtgtcttatgtttaaggtagatatgctaaagacagcataacttctgtgtgtttgttaaatagcttcatacttttataataatgtgatttttgtgtgtataccttctagctaaatcaagtgaatttgcaagtattcctgcaaatagctcccggcctctgtcaaacatcagcaagtcaggcagaatgggacccgccatgctgcggccagctctgcctgcaggccctgtgggggcatcctcctggcaggccaagcgggtcgatgtttctgagctggcagcggagcagctcacggcacccccctcagcatcccccacccaaccccagactccggaaggtggcggccagtggctgaactccagttgcgcttggtcagaatcttctcaattgaataagactagaagtatcagacggcgagattcctgtctaaattccaagacaaaggttatgcctactcctacaaatcaatttaaaattcctaagttttctattggtgagtaatagatacattttaatgtgtctttaaaaaatactgaagaaattgcatttaaagttttaaacaattattgatggcattgatggtgtttttagttctttcctccaacagtgctttcaggtgtgacccgctgtcttctcgcccacgttgttttggggggtcactggaggctccctgaatgtcttacgttcgttcctgtgtgtgtgacaccccaatgctcgtaggctgcttgtaaggttttctctttagtgttactgtcgggaatttgattattatgtgctttgaggtggctttctttgcctttatcccgctgagggtttcttaagcttctttgatctgtgggttggtttttttcagcaaatttggaaaacgttggccattatttcttcagctatcttttcctctttccactttatttcctaggactctaatcacatctatttcaggcctcttgacgttgtctcacaggacaccgaagctctgttcttttttttatttcagccttttttctttttcttatcttttttcttttctttctttctttttttttgttttttgttttttgagacggagtctcgctctgtcacccagggtggaatgcagtggcgcgatctcagcgcactgtaacctccacctaccgagttcaagcaattctcctgcctcagcctcccgagtagctgggattacaggtgcccaccaccacacccggctaattttttttttgtatttttggtagagacggggtttcgccatgttggccaggctggtctggaactcctgacctcaagtgacccacccatctc

SEQ ID NO: 104189 - DNA, 1237 bp, Homo sapiens
gaattattattatcccagtaaagtcatggttcgggaaaatgagggaatgtgggctctgttgcgcgtgcctgggaagctaaacccctgcggtgttgttcctgtgggcaagtgtctagcgcatgcaggtgccgtctgacaagtcgacttcgctctgtgaaggtcgtgctcggccctgatgggatatacagccagggtggggcggcgcagtgaagatggctcttctctttctcccccgtgtccatccatcagaccacagcctttgcctgggcaggggtccccgtgtaggggtgaatgcctctcatgtggctgcctgcagcagggtggccctttgtgtacttgtctgagccagtgccacctacactcaagttgggacagtggagatactcggagaattgcccattcggtgacgatcccccaacagtaggtctccccctgatcactttacctgaccgcacacttcctttcttggacttaggtgactccccggacagctcaacaccaaagctttcgcgggcacagcggccgcagtcgtgcacgtcagttggcaggtgagtgacgttggtccgcttcctctctttattgctgtagaatgactcacgcatctgcttacctcaaccatttggtaaccctgcagcctggcctgcgcatctggcttccacgccagtctcttgggtgcaggccgagctcctgatgtgtaccagccccttttagatctactgcagacttaagacatctgagacttccgcgatgcagtacggcagctcccagccctggactggtgtggttgccatgccaggctgcacagcagaagtccctccagcgctcttaggactgcccgtgcccagcccaccccaggggttctgatttggttcatctaggctgaggcccagcagctggatttcctaaagctcctgggtgactgtgacttgtaccgcagttgaagagcactggcgtggcaccttgattctgacttggctttttttttctttttgagatggagtcttgctctgtcgcccaggctggagtgcagtggcacgatctcggctcactgcaaactccacctcccgggttcacgccattctcctgcctcagcctccctagtagctgggactacaggcacccgccaccacacccggctaattatttttgtattttttttagtagagatggggtttcaccgtgttagccaggatggtctcgatctcctggcctcgtgatccgcccgcctctgcctccc

SEQ ID NO: 104190 - DNA, 1060 bp, Homo sapiens
tgggcagatcacgaggtcaggagttcgagaccaacctggccaacatggtgagaccctgtctgtactaaaaatacaaaaattagctgggcatcatggtggcatgcgcctgtaatcccagctactcaggcggctgaggcaggagaatcacttgattctgggaggcagaggttggggtgagccaagatcgcaccactgcactccagcctgtgcaacagagaccctgtctcaaaaaaacgaaaaacaaaacaaaaaaacatatataatatccgtgtatttatacacaaattacacatttttatatatcttatatgtttctgtgtatgtacatctaccaacagtaggtgttgacactgtgtgtatctatgtagttctatgataatgcagaagactctggaagaaaatatgctggcatgtgtgtgcattacagagggagagggaaaggcatggaatgccaaagagaaaatgagaaacaaggcctcactgaaaacaccagatctgatatataaataggaatatgtgtttaactatcttgtatgtttgtaagtgtaaatgtagaaacaaaattctgcttgtttttggaattttcttatgaaacctctgaagtattaaaaagaaggtactgtgtgttagttgatggacctgcggctttgctgggtttccggaaggaattcagttttgcgtggcaggtactcgaggacctgtgggcagcaggcaagcccagcagcgcccgtgcagggtcctgtgggagacgccattggaaagctggtgtgggcagcctgtacctggggcctcagccctgatcagggcactgggcagcaggggagggggcatctggggcagaaggagccagctgcatacccacctaggcctaggagaagccccccactagctgcatgcgaggaggagctggccgtggctcaaggaggggtccctgtgtgtggtctgggctcccttcaggaggtgacgggcgtgcgcattaccttgtgtttagtaactagaaaggaaggggctaacatcagcccctggtgatgctggacagctaagatttgtgagctgagag

SEQ ID NO: 104191 - DNA, 1148 bp, Homo sapiens
cgtggattccccactcctcaagttctaagccgaaccaaatcctttgccttgaaagaacagccctaaagtggttttcaaccctcagaaacaagctttaggctggtcgcagtggcttacacttgtaaccctagaacttgggaggctgaggtgggcggattacttgagcccaggagttcgggaccagcctgggaaatatagtgaaactcctgtccctacaaaaaatacaaaaattagccgggtgtggtagtgcatgcctgtagtcccagctacttgggaggctgaagtgggaggatggcctgagctcaaggagatgcaggctgcagtgggctgtgattgtgccactgcactccagcctgggcaccaatgtgagaacctgtcttggaaaaaaaaaaaaagaaacatgttttagtagaagttttatttgaaaaagaaaaataagcataaatatattcccagtgctggagagggtgggctgagggactggggccagcacggaccacccaaggcctctgcttcccgccgccaccctcctcgctgccattctctgggctggaatgtgaagcctcagtcactctaaatgaagaattttcttttgaatgttttgtatgtaaaatagcaagtggctatttttaaagttaagtttgtataaatagttagatattctagatttacattaaattgtaaaataaatggacttattgaagcatatcttgatttttaagcttatcttgattttcaaacatgcatagctatttttatcactctaatcagtaaggctactatctagactcgaatgctttcatacaagtgattttcaaaaattagtcaataaaaattgatgtcagtgcaggcccaggcccgcccccagatacactagtttctaggtctggggccagcctagtaattgttactaggcacacaggtgatgctgactcgatggcctgagacacaccccttgagaagaagctgctctggggagacgagggtatgagtggaaagaggatgggcgaggaggccgggcttacctggacactaaggtgatggacggcgtctgctgggcaggcctcggggaggacccctcagctttgctctcagcaggggcccgacaagctcagtgggcagtggcaggaactgagtgccactggaaa

SEQ ID NO: 104192 - DNA, 1085 bp, Homo sapiens
aggctgaggcgggcagatcacttgaggccaggagttggagaccagcctggccaacatggtgaaaccccgtctctactaaaaatacaaaaattatctgggcatggtgctgcgcacctgtaatcacagctattcggaaggctgaggtgggagaatctgcaagggaagtctaaaggatttcatttccactgtcactcaggcatcttctcttcctcacctaagccctgctgtgttggaggagtcccagaggcagggttttagtgagaccctcacggccactccccactcctgaccccataagccctgtgagcctacacagagacggtggctcctgagccgtagtggcagagaataacaccttgtcgggtggcccatgcagcaggttataaacaaatgttcgatgactgacgttctcctgttttgcagaaaattatagttttggtatgacaaggggaaattacattaaacaagcaatttagtgaactttttttttttttttgaggaatgtttcacacttggaactgaagtcattttcttttattctagtgactttttgaatgagtatgaaaaaggaaggactcccaatcctgacatagtttgcaacaagcacatcaaatttagttgcttttttcattatgctgtggataatcttggtaagtaatttgggtttaaaacatttttttttttaaagacagggtctcgctctgtcacccaggctggattgcagtggtgcgatcatgactcactgcagcctcgacctcctgggctcaagagattctcccaccccaggctcctgagtagcttggaccacaggcatgccaccatggtggctaattttttgtggagatggtgtcacaactgtattgtccaggctggtctcagatttctggccttaagcagtcctcctgcctcggccttccaaagtgctgagattacaagcgtgagcccctgtgcctagcctgtttcttcttgtggaacctcctgatactgaattgcttgcttagaccacctcttgatgtctgtggctatgctttatgaattttaggttcttcttcctgtcccctgccattggggtcaccataatgagt

SEQ ID NO: 104193 - DNA, 2716 bp, Homo sapiens
gaggcccacaggctggtcctggtcccctctcctgcctcccaagggcagcctcatccaacatgagcttgccctccctggagcccccagacgccccctctaccctgatggggtgatcctgcccccccgtgtgacaaccttgggccccaccaagccgctaccctcactgacccttcacctgcttgctggcttcttcccacgcgcagaggcagtaatgaaacttcaatttgaaccatcagtaatgaaacttcaatttgaaccatcaggaaaccgtgaggcaagcccgtcaccccacacaggctgcggcatcaccctcagaccttggagcccaaggggccactgcccttgaagtggagtgggcccagagtgtggcggtccccatggtggcagccccccgactgatcatccagacacaaaggtcttggttctcccaggagctcagggcctgtcagacctggtgacaagtgccaaaggccacaggcatgagggaggcgtggaccactgggccagcaccgctgagtcctaagactgcagtcaaagccagaactgagaggggaccccagactgggcccagaggctggccagagttcaggaacgccgggcacagaccaaagaccgcggtccagccccgcccaggcgggcatctcatggcagtgcggacccgtggctggcagcccgggcagtcctttgcaaaggcaccccttgtcttaaaatcacttcgctatgtgggaaaggtggagatacttttatatatttgtatgggactctgaggaggtgcaacctgtatatatattgcattcgtgctgactttgttatcccgagagatccatgcaatgatctcttgctgtcttctctgtcaagattgcacagttgtacttgaatctggcatgtgttgacgaaactggtgccccagcagatcaaaggtgggaaatacgtcagcagtggggctaaaaccaagcggctagaagccctacagctgccttcggccaggaagtgaggatggtgtgggccctccccgccggccccctgggtccccagtgttcgctgtgtgtgcgtttgtcctctgctgccatctgccccggctgtgtgaattcaagacagggcagtgcagcactaggcaggtgtgaggagccctgctgaggtcactgtggggcacggttgccacacggctgtcatttttcacctggtcattctgtgaccaccaccccctcccctcaccgcctcccaggtggcccgggagctgcaggtggggatggctttgtcctttgctcctgctccccgtgggacctgggaccttaaagcgttgcaggttcctgatttggacagaggtgtggggccttccaggccgttacatacctcctgccaattctctaactctctgagactgcgaggatctccaggcagggttctcccctctggagtctgaccaattacttcattttgcttcaaatggccaattgtgcagagggacaaagccacagccacactcttcaacggttaccaaactgtttttggaaattcacaccaaggtcgggcccactgcaggcagctggcacagcgtggcccgaggggctgtggaacgggtcccggaactgtcagacatgtttgattttagcgtttcctttgttcttcaaatcaggtgcccaaataagtgatcagcacagctgcttccaaataggagaaaccataaaataggatgaaaatcaagtaaaatgcaaagatgtccacactgttttaaacttgaccctgatgaaaatgtgagcactgttagcagatgcctatgggagaggaaaagcgtatctgaaaatggtccaggacaggaggatgaaatgagatcccagagtcctcacacctgaatgaattatacatgtgccttaccaggtgagtggtctttcgaagataaaaaactctagtccctttaaacgtttgcccctggcgtttcctaagtacgaaaaggtttttaagtcttcgaacagtctcctttcatgactttaacaggattctgccccctgaggtgtaatttttttgttctatttttttccacgtactccacagccaacatcacgaggtgtaatttttaatttgatcagaactgttaccaaaaaacaactgtcagttttattgagatgggaaaaatgtaaacctatttttattacttaagactttatgggagagattagacactggaggtttttaacagaacgtgtatttattaatgttcaaaacactggaattacaaatgagaagagtctacaataaattaagatttttgaatttgtacttctgcggtgctggtttttctccacaaacacccccgcccctccccatgcccagggtggccgtggaagggacggtttacggacgtgcagctgagctgtccgtgtcccatgctccctcagccagtggaacgtgccggaactttttgtccattccctagtaggcctgccacagcctagatgggcagtttttgtctttcaccaaatttgaggactttttttttttgccattatttcttcagttttcttttcttgcactgatctttctcctctccttctgtgactccagtgactcagacgttagacctcttgatgttttcccactggtccctgaggctctgttcacctttcttcattcttttttctgtctgtccttcagatttggctatttctggtgctccgtcttcaagttcactgattttttttcctctgtcgtcttaatt

SEQ ID NO: 104194 - DNA, 1014 bp, Homo sapiens
gctgacgtatttcccacctttgatctgctggggcaccagtttcgtcaacacatgccagattcaagtacaactgtgcaatcttgacagagaagacagcaagagatcattgcatggatctctcgggataacaaagtcagcacgaatgcaatatatatacaggttgcacctcctcagagtcccatacaaatatataaaagtatctccacctttcccacatagcgaagtgattttaagacaaggggtgcctttgcaaaggactgcccgggctgccagccacgggtccgcactgccatgagatgcccgcctgggcggggctggaccgcggtctttggtctgtgcccggcgttcctgaactctggccagcctctgggcccagtctggggtcccctctcagttctggctttgactgcagtcttaggactcagcggtgctggcccagtggtccacgcctccctcatgcctgtggcctttggcacttgtcaccaggtctgacaggccctgagctcctgggagaaccaagacctttgtgtctggatgatcagtcggggggctgccaccatggggaccgccacactctgggcccactccacttcaagggcagtggccccttgggctccaaggtctgagggtgatgccgcagcctgtgtggggtgacgggcttgcctcacggtttcctgatggttcaaattgaagtttcattactgatggttcaaattgaagtttcattactgcctctgcgcgtgggaagaagccagcaagcaggtgaagggtcagtgagggtagcggcttggtggggcccaaggttgtcacacgggggggcaggatcaccccatcagggtagagggggcgtctgggggctccagggagggcaagctcatgttggatgaggctgcccttgggaggcaggagaggggaccaggaccagcctgtgggcctctgtgttgctggtctttcagaagagcgcaaggaatccacgttagaaaccggccatctctacagtgacttttggaaggg

SEQ ID NO: 104195 - DNA, 1038 bp, Homo sapiens
gaccagagcctggctgagagtgacagtgaggaccccagcggcaagccccgcctgaaggtggagaccaaggtcagcgtggagctgcaccgcgaggagcagggcagtcaccgtggagagtaccccccggaccaggagagcgggggcgcagccaggcttgctagcagccagcccccagagcagaggaaaggtgcctggggaggccggggctgcagtgaaaggctggaggacccagaagggccagtccctggtctggaggtgggagtggggctggggctggtggggcaagtcagggcctgggcagaacagacgtggcctcctggcctagccctgggacccggggaaccaggaggaaggacaggggctgaggctggctcagctgcacacggcccagcagctgcccccggcagcatcacccggacttgaccttgccgtgtctcctcctcccaggcatcttgaaaaataaagtcacctacccgccgccgctgacgctgacggagcagacgctgaagggccggctccgggagaagctggccgactgtgagcagagccccacatcctcgcgcacgtcttccctgggctctggcggccccgactgcgccatcacagtcaagagccctgggagggagccggggcgtgaccacctcaacggggtggccatgaatgtgcgcactgggagcgcccaggccgatggctccgactctgagtgagtagcctgggcctccagggcggggatcacccacttcccccttgtcctgagtcaggagagagagggggcagtggtcagggacctgacacccacctcacctggagccctgagtgcagaggaagcccaggcggggatgggggaggggggaggcgctgcagctgaggtcaggaggataccccggagatgggcagaccccctatcctggggacacgtctcaggcctctgggactctgaagccctggccagccccaaaatgctaggacctaaggtgctgggctctgcgtttgatcagcattgtctccgcctgggaccactgccacccaccttgcagt

SEQ ID NO: 104196 - DNA, 1038 bp, Homo sapiens
cctcccagggctcttgactgtgatggcgcagtcggggccgccagagcccagggaagacgtgcgcgaggatgtggggctctgctcacagtcggccagcttctcccggagccggcccttcagcgtctgctccgtcagcgtcagcggcggcgggtaggtgactttatttttcaagatgcctgggaggaggagacacggcaaggtcaagtccgggtgatgctgccgggggcagctgctgggccgtgtgcagctgagccagcctcagcccctgtccttcctcctggttccccgggtcccagggctaggccaggaggccacgtctgttctgcccaggccctgacttgccccaccagccccagccccactcccacctccagaccagggactggcccttctgggtcctccagcctttcactgcagccccggcctccccaggcacctttcctctgctctgggggctggctgctagcaagcctggctgcgcccccgctctcctggtccggggggtactctccacggtgactgccctgctcctcgcggtgcagctccacgctgaccttggtctccaccttcaggcggggcttgccgctggggtcctcactgtcactctcagccaggctctggtcgggccagccggccggaacgtggttggccacagcgtcccctgaggcacgagagcggtgctcagcaggcagcggcactgccactcgagctgctcccttgagagccatgggtctggtggctctgacccacctctccccaacctgcaggcctggtagggctgaaccctaaaggtggggaaactgaggcccaggagggcgagtcctggcagcagggcccttgttgggagcccccgccgcatctgtaccagtaactatacaggctaatcccccactggcagcctcacctggaccttgcggtgacagtccacagagacccccctgagagttcctgcctccgctcagggggttggcctggaggagccctccagaggctgtgggggagcccaaccagagtccccccaccccaggctgtcctttc

SEQ ID NO: 104197 - DNA, 1341 bp, Homo sapiens
ccggctgtctgtcttgggcattcatctgcgtcctggcaattagctccagctctaatgacctgctctctgctttatgttgcacttattattcccagattgtaaagtttgtgccaaacatattaatgctaacatcccattttacagattagcaaagtaaggatctgagaggttatgtgatttttcccagagtctgcgagggcagggccctgtctgaagctgagacacaccttataacaccttgttatttggggcttcccatcagtaaaacgggagtcataatggggccctggcttctgggcagttcccataaaacattgtgcaatctgaagatgaaagtgtcagaggaaggtgagatgtcctttctgagagcgtctgccctcagaaggagacgggaccgcatcgcagctgtgtgaaccccgggcagtggttccagcagcggggcggacgcgagacagccccatttgagttttgctgctagatggcacgtagaacttgaacttcagagggtgctccttggaggccctgaccagacacagaagggaagggagactgttcccatggtcctgcctccgcggcagtgaggctgctcttcttacagccaggtggctcttgtcttcggtgtagggggctggtgaggaacacggtggggagcagcctgcgagggcgctgggctttcagcactcacggcacctgctgtttggtttggccaggatggcctgggagcccccagggctgggcaaaggctgccctttacagactcatgggcagagggaaccgtcttacccctgccccttctctgtcctctccgcagcgttggtgggacgggagggtggtctgcccggggctgcgagctcctgtccaggaaccggacacatgtcgcctgccagtgcagccacacagccagctttgcggtgctcatggatatctccaggcgtgaggtgggcatcctcccgtggccactgtgccctctgggcctaccgccaaacctgcccctcccccccaaacctgcacctccccgccaaacctgcccgtcctcaaacctgctgagcctgcccccaaatctgtcccctcctcaaactaaatcttccattctaagtgcttggaacaaaacaaatcaaccgattaaaacacatattcgaggattggccagagtctgaggatttccataacaaagccccattataagggttttcagagagccctggttatgtattaaaccccggaatggcagacccaaagctcaggctccgaggagctctcggaacctgcccctcacttcagtgcgggtctgttggacggtgccgctccccacctgctttgatcctaagggaggtgacagct

SEQ ID NO: 104198 - DNA, 1020 bp, Homo sapiens
atgagctgccattattttggtgtcttttgctggacactgaaaccatcccctgtgattctgccattagctattatgggctgtgacatctttgcacctgtgccttctctttctttttaaatttctgaagtcccaatttgacccaaaggtgacacctctctctgtgtgccctgtcagtgataaaacctgctctagggatgaagatactgtggggtccgtgggtccgagctctcggagtgtgattctgtctcccctagaaacacatcatggcgtgtcctcagggcatttgtgcgcgggatttaagcagatgtttcctcaccgtgtttgtccccatgctctggcttcttgacctcaggttgcctcaccggcccatcattaataccccgatggtgagcacgctggtgtacagcgagggggctccgctcccgagacccctggagaggcccgtcctggtggagttcgccctgctggaggtggaggagcgaaccaagcctgtctgcgtgttctggaaccactccctggcgtaagtgtgacgccaggagccccatgtgagggctttgccaaggcagagtgcccccgcagggtcgggggctcagtggcagagcgccccaagaggacggtctcttgtggtctgtgtttcccctttaagtcccccgtgggggcagtgagcctcctgctctgcttctgtgggaatatcagagtcctcccctagatgtccacacacagatgcacacagacctgcacgtggagatacagatgtgcaggcgcacagagagatccctcaaggctgacacccaggaaggggacccctcacctgcgggactcccgacatgcagcggccaacactagtgtagtgcccagttcaccgccggataagacaggcccattccggtcacacacgggagacagaacccagagactggcctaagagcccatctgctgacggtcttgcccgagaggctgacacagtctagctgtggggactggcttcacccccaagaggccacacctggccgcagcaca

SEQ ID NO: 104199 - DNA, 1055 bp, Homo sapiens
ggcccccacagctccccaccgccatgccagccacctgcccctctgcctttgtgaagtgtcctgaatcgagccccttgccgccacccccacccagtccaaccacagacgtcacccaagtgggccccgtgcctgtcccctggagccaggggttccagctacggccgagggagctgctctgagtcgttcagctctcagccccctcggcagggacatccactcctcacgcccccaccgcgcaccccaggagctcaggctggcgtgccctctgagctcctcacccagccctccactgcactccggccagcaggccgtggggcaagaggaacaaccctgcccgccccagctctgtagataaatgaggcatcacagatgaatgcctcgcaagggaccagagaggtctcagggttcccttaacccctacatacctttccgggctcctgtagccccagtgccgtttacttaatgcagggagtgaggatgggggggacgcccaccaacgtcgccaccctgaacatgaacaacgcactcaaggtcagggtgaaggacggctgtgatgtggacgacccctgtacctcgagcccctgtccccccaatagccgctgccacgacgcctgggaggactacagctgcgtctgtgacaaaggtgggaccgccctcccggggcccttcagtgacagggaggtctcttatggctgaaacacaggaggggggctcagtttagacattagcgtccccagccaactccctgtggttccgtggagccctgagctttattttataacaagcgggcccctcctagagagagactctgagcctcttccttactcaaggcacagagtgccccaggcgctctcctcagcacatggggtgatcagcaaagaaacagtgaaaagtaaggccgggtgcagtggctcatacctgtaatcccagcactttgggaggccgaggtgggtggatcacttgaagccaggagttcaagaccagccaggcaacatggtgaaaccccatctctacgaaaaaaaaaaaaaaaaaaaaaaaagcaaaaattagccagg

SEQ ID NO: 104200 - DNA, 1285 bp, Homo sapiens
gggacagccacaggcccttctctgtcactcctaaggacagcccatctagaaacagttctgtatagccaagattggcatgagggttggcgggtggacagagggactgcccagcacatgccctccccatcatgagtgcctggttggagtgtggcgggggcaggaccgagagtgctcccagcaggctggtggaggtcagtccctcagcagatcagcgagggctcaggagatgggtcggggctgtggggcaggggctcaggcctggacagggagcctcctgttcctccccatcacagctcgggagcattttccagcacagacctctcggattgcctggaaggtgtggtgtgcgccagggatgattacagctggcctgtgggcccttgttaacctgtaatttcatgagtctcccaggcagccccagaagcttgctccaggccaaaacttggcaagtgcggtgctgcctggggatggtattttctgtgtggtggtttcactgtcagaacaaattaaattggctgttggatgcaggtgatgaactggagcttgcaagttgtcatttggcagtggggtctctgtaggaaaaaagtgcgctttcagtaggaatggtgctggaagccacagactccggtgctgtttgtgtaattacatcatggagggctcatccccagattaggaattttgccagggactacagccagccctccctgtggaagtctgggtggctggaggggtggccttgaggggatgctgcagaccccactgggcacccagaaggcccccagggcagctcgcagaggccggtcaaccacacgttaccgaaggttctgggggatttctccttgccattatcagcttgcaggcctcccgtgggcctgtgagctccgtaaagcagcagtttggctgtccctcaaaggatgtctcctgtgcccctgccactgtggtgggacaaagaagactccattgtaatcccacagcccaagcaatttggataattgctctcgggcacccaaaatccacccaccttgtcaggtgggataaccttgagattgctgaatgcctctctgactgagagctggggacacactctcagttacctcccataaaacaggttcatcctgtggatatcacttttgtttgtagatataacatcacttttatcactgatctgctcactttggagttctttaagcaagaacaatgcaagagatggcaaaggaattttttttttttttttttttttgagacggagtctcgctctgtcacccaggctggagtgcagtggcat

SEQ ID NO: 104201 - DNA, 1050 bp, Homo sapiens
gggccgtgcctcctccgaaggctgaaggggaggacccttcctgccttttcctagctgtcggtggcccaggtggcccttggcttgtaaacagctgctccagcagctgcctccgcggtcacgcagcttctccctgtgtgcctttgcatctcagcatctgtcctcttaagaggacaccagtcatcttggatcagggcccgcctactccaggacgtccgcatcttagctaattccatcagcaccagctctttgtccagaccaggccacgttctgagattctgggaagcagaacttgagggggcattgagcagcccagcacagctagtttggggaactaaaggccgggggctcctcatcccttgtctacgtgccgcccaccctgtgccatgtcctcctcgctctatgagtgacaggtgcgcctgctgagggcactggtggagaaaacgctgacaccttctgtgctttctcttcttacagcccaatattggccacctgggcctgccccatgggccgtccggggaaaagatggccgtggtgacagtggatgattgtgacacaaccatggctgtgcgctttggaaaggacatcgggaactacagctgcgctgcccagggcactcagaccggctccaagaagtgagcatcccaggaggggaggccctgggggtccgtacccccaaacatgctcaccctgcggccttcccagggcagggccccacgtaggcactctgggtgcagtgccctggcgacctcattccaggctagagtcagacatcctgtccatggttggggcaccttccctctgaccttctagaataagtctccctaagtatgtgtcaagagtggccaggccgaccccagggttgtgatggccagcttgcagaccccgagacggtctccagccccatctccacggatcactggctttgtccccgcaaattctggtacctgggactccaggactctgttaagtgaagcactgtgtcagccagctggtcccagaggcttatgtttttttgttgttgttttgtttttttctgagatggggtctcgc

SEQ ID NO: 104202 - DNA, 1051 bp, Homo sapiens
tagccaaaatcgtccactgtacctggatgtaactggcgagccagaacactcttcaaggaagtgccgtgaaggctgggtggttttggtttcactttattttgctgttcgttggcttgtaaggaaacacattgttttttgcatcaaaatgctgtgctttccacggctgtgattttgcaaatcccttttctcttcttgggaagctccagggtgtgcccccgcttgctcgtgggtctgcgtgggtcttaccggctcctcctggagcctggccacccccgctgtgccccgcttcccggacttcacaaggctggggcctaagcttggttggcagacgagggctcctctgtcctccaggagaatcgacccagtccttctatggagagagcatcttccttctttcacagccactgtgcctggctgcgactcaccagcagttggggtccagccactgggcctgaggtcgtagtgtcgcctccactggctttcactctcctttccatgctggccaccggcgtccctccacctccctggcccgcccctcccatctgccttgaatatcccatcatctcccaggcgtgccacacagactccaagtagtggtcacctgcacagagaccatagtttttgtcctctgtcccatcagtgccaacccagggcaggtggagcttgagcctcatttgggaggagggcagatgggaggtgctggtgaggtttgggagctgagtgcttgctcggggtttggggggatattgagagaaggctggcaggtgtctgggcagggtctgggctgccgcacattggatgtcacccctagtggggcttggctgatgtttggagaaccatgtgcttgacagaggtgcaggggctggtggggtgaggggctcagggctgagcaagaggaagagggtagccctcacagacgcggatttatttgctgccattgtccatttcaaagaccgagtcttttcttgatacggtgccgtcctgtggctgtgtggggcagtgctagccagtgtgaagcgcgttcacctgggtgagctgcacgggtggccgt

SEQ ID NO: 104203 - DNA, 1012 bp, Homo sapiens
gggcaggggccagggtgctgaaggaggaagggtcaaggtggtggtcatgggtggggaatggggagtggggatgcccaggctctcttctcctttgccaagcatgcctgaggctgctcctgggatggggcctataggacctgtgactcccgcagcatctgaatgaccctgactttccttgtgtctgcagatggcatccacagcgtcacggccttctgcaccctgcgtgtcaccatcatcacggacgacatgctgaccaacagcatcactgtccgcctggagaacatgtcccaggagaagttcctgtccccgctgctggccctcttcgtggagggggtggccgccgtgctgtccaccaccaaggacgacgtcttcgtcttcaacgtccagaacgacaccgacgtcagctccaacatcctgaacgtgaccttctcggcgctgctgcctggcggcgtccgcggccagttcttcccgtcggaggacctgcaggagcagatctacctgaatcggacgctgctgaccaccatctccacgcagcgcgtgctgcccttcgacgacaacatctgcctgcgcgagccctgcgagaactacatgaagtgcgtgtccgttctgcgattcgacagctccgcgcccttcctcagctccaccaccgtgctcttccggcccatccaccccatcaacggcctgcgctgccgctgcccgcccggcttcaccggcgactactgcgagacggagatcgacctctgctactccgacccgtgcggcgccaacggccgctgccgcagccgcgagggcggctacacctgcgagtgcttcgaggacttcactggtaggtgcccgggctcaccctggctttgtgtacatgtccccaggtcacatggccgagggtctcaggtggtttcctctgtttacttccctccggggaaaacagctggaggatgggcgctgggcccaggtgtgggctccacgaaccttgagatgatctcagtaacggtacttttttttttttttttaa

SEQ ID NO: 104204 - DNA, 1071 bp, Homo sapiens
tccaatctgtaccctggactcccctcccccgcaccctggactcccctcccccgcaccccccacctgcaccctggactcccctcccccgcaccccccacctgcaccctggactcccctccccctcaccccccacctgcactgcaccgtggactcccctcccccgtggggctcaccatgctaattggccccatttgtcttttccaccaggccaaggacaccttgagggcaggactgtggttttccctcttggcatccctagatctcagcctcgtacacacagggcccgcaaatgtttgttgaattaatgagtgacagcaattttaattagagtttctttgcgtttaggttgcagattagaatctttaaaaagatattataccaaatagtttttaattatgaatgaattgcagacatcgtctgcaattagctcgagaactgaaatcctctttcaggacccttggggtactctaagagggaaatccaatttgttacttgtaagtcatctcttaatcatgcaatagcaggatatgtgatattagcgtcagctcttccatctctccagatctgagccaaaggtgccatgggaagaatttggagctgctgttcttgagaccttgggtgtgtggaagtgggagtgggagtgggagtgggagtgagggcaggaagtggagggggcagggggcgggagcagacacacagtaggtgctcagtaaacgtgtgatgagtggggagcaggggccagaacagaaactgttggagagaggtgggggaatatgggcctggaggcatttcagaagacatcctgtgtggacgtgtcctgatgcatgactttattttaatttttttgttctgagacagagtcttgctctgtcgcccaggctggagtgcagtggcacgatctccgctcactgcaacctccacctcccgggttcaagcgattatcctgctgcagcctcccgagtagctggaattgcaggtgtgcgccactacgcccggctaatttttgtatttttagtagagagggggtttcactatgttggccaagctggtctcaaactcctgacctcaggt

SEQ ID NO: 104205 - DNA, 1048 bp, Homo sapiens
aaaattacccgggtgtggtggcacatgactgtaatcccagctacttgggaggctgaggcaggagaatcacttgaacgcaggaggcagaggttgcagtgagccaaaatcctgccattgcactctggcctgggcaacaaaagtgaaactctgtctcaaaaaaaaaaaaaaaggaaggggacaccgtgggaggtgtgtaataaacagaatatggggacacagggtggtgggtgctttcagatgacagctcaccctccctttccctctgggtctcaatgccaagtgccatagccatgggagtcgcctcttcaatgcagccctcgcttctaagcatggaaaattctaacacataatcgcaagttctcccaattcttcaaagaggagagaatggaaaatatgaaggtttattgttctgtgagacttcctgtctgtcctgcatgtggccgtcagaggtcaggggtgcgtctgtgtgtgcaggacgggaagctcaggggcgtgttttgcggcgtgtctgcaggggcaccttactgtggacagaggtaccaagacaagagccggcctggggcgccgggacagtgcacatcagccattgtggttctaccctccagataccgccttgtgccccgtggaagatgacaagtgccagatggagtctgttttgggggaaaaccaggccgggatgaccccgtaggcaggaaaccggtggctttggtgttggacggccgtccaagtctccggtttggcccgggaaacccattgcatttgtggcaggaattctctcttccctcctgtttttcctgcgggtcatcggcccagcattttttgccagagcaaaggtggagcagtgggaaaatgggccaagccccttcaggggccaaacttgcacctggcagctccatgctctgcagctgggaaaactgaggcagtgggggatggggaggtggtttgtatacctcaggggaatgatccattggggtgagaacctgccctggccagagccagaccctctggattcttcccccagagtcaccagcctcaggaagtggatgag

SEQ ID NO: 104206 - DNA, 1030 bp, Homo sapiens
gacagtggcaccatgtacaccatgatggagctggactatgagaaccaggtcgcctacacgctgaccatcatggcccaggacaacggcatcccgcagaaatcagacaccaccaccctagagatcctcatcctcgatgccaatgacaatgcaccccagttcctgtgggatttctaccagggttccatctttgaggatgctccaccctcgaccagcatcctccaggtctctgccacggaccgggactcaggtcccaatgggcgtctgctgtacaccttccagggtggggacgacggcgatggggacttctacatcgagcccacgtccggtgtgattcgcacccagcgccggctggaccgggagaatgtggccgtgtacaacctttgggctctggctgtggatcggggcagtcccactccccttagcgcctcggtagaaatccaggtgaccatcttggacattaatgacaatgcccccatgtttgagaaggacgaactggagctgtttgttgaggagaacaacccagtggggtcggtggtggcaaagattcgtgctaacgaccctgatgaaggccctaatgcccagatcatgtatcagattgtggaaggggacatgcggcatttcttccagctggacctgctcaacggggacctgcgtgccatggtggagctggactttgaggtccggcgggagtatgtgctggtggtgcaggccacgtcggctccgctggtgagccgagccacggtgcacatccttctcgtggaccagaatgacaacccgcctgtgctgcccgacttccagatcctcttcaacaactatgtcaccaacaagtccaacagtttccccaccggcgtgatcggctgcatcccggcccatgaccccgacgtgtcagacagcctcaactacaccttcgtgcagggcaacgagctgcgcctgttgctgctggaccccgccacgggcgaactgcagctcagccgcgacctggacaacaaccggccgctggaggcgctcatggaggtgtctgtgtctggtg

SEQ ID NO: 104207 - DNA, 1316 bp, Homo sapiens
tcaacgccaacttgcgttaccgcgtgttggggggcgcgtgggacgtcttccagctcaacgagagctctggcgtggtgagcacacgggcggtgctggaccgggaggaggcggccgagtaccagctcctggtggaggccaacgaccaggggcgcaatccgggcccgctcagtgccacggccaccgtgtacatcgaggtggaggacgagaacgacaactacccccagttcagcgagcagaactacgtggtccaggtgcccgaggacgtggggctcaacacggctgtgctgcgagtgcaggccacggaccgggaccagggccagaacgcggccattcactacagcatcctcagcgggaacgtggccggccagttctacctgcactcgctgagcgggatcctggatgtgatcaaccccttggatttcgaggatgtccagaaatactcgctgagcattaaggcccaggatgggggccggcccccgctcatcaattcttcaggggtggtgtctgtgcaggtgctggatgtcaacgacaacgagcctatctttgtgagcagccccttccaggccacggtgctggagaatgtgcccctgggctaccccgtggtgcacattcaggcggtggacgcggactctggagagaacgcccggctgcactatcgcctggtggacacggcctccacctttctggggggcggcagcgctgggcctaagaatcctgcccccacccctgacttccccttccagatccacaacagctccggttggatcacagtgtgtgccgagctggaccgcgaggaggtggagcactacagcttcggggtggaggcggtggaccacggctcgccccccatgagctcctccaccagcgtgtccatcacggtgctggacgtgaatgacaacgacccggtgttcacgcagcccacctacgagcttcgtctgaatgaggatgcggccgtggggagcagcgtgctgaccctgcaggcccgcgaccgtgacgccaacagtgtgattacctaccagctcacaggcggcaacacccggaaccgctttgcactcagcagccagagagggggcggcctcatcaccctggcgctacctctggactacaagcaggagcagcagtacgtgctggcggtgacagcatccgacggcacacggtcgcacactgcgcatgtcctaatcaacgtcactgatgccaacacccacaggcctgtctttcagagctcccattacacagtgagtgtcagtgaggacaggcctgtgggcacctccattgctaccctcagtgccaacgatgaggacacaggagagaatgcc

SEQ ID NO: 104208 - DNA, 1048 bp, Homo sapiens
ctgggctgggctggagccgaagcctttcttctcaggtcctgtcatagctgtggggcctggggctggtgacccagcctctgccagcgtctccccaccccctcccacagtaaggttggtgacagcagagttctcttaaacatttgagatgtcctgtgctggcccgtggcagtgcaaccacagctcgtaactgtggcgctgggcagagggctgggtacgcagcaggtgcttcgtcagtactgatgggagaagcagggacggcagggggcggggggacctggatgggcgacactccccagcctgctggtgctccagggaggaccttttcagagctgggagaccctggctcagtgtccttgtccctccagtcgctgctgccttcccgaaagccctggagccttgttaaagagggcagccctggctcttggggggagtcctgggtttgggggcggctctgatatgggggagccgtgggtgtgggggcagctctgatatgtgggggagccctgggtgtgggggcagctctgatatgtgggggagtcctgggtgtgggggcagctctgatatgggggagccgtgggtgtgagggctgtgcctcacgtggcccgagggcagatggcccagtgtggggctgggctgtttggggggatggggagggctgcccagggagaaggtgagtgggtggccctattatctgaagacctgctggggccaggggatgtggggggtggctgccacctctgcagtgaccctggaagggcccatgctgcccctgctttgcaggtgagtaagcgggtgtctgagagttcccagctctgcctgcagggcccatgccctgtggctaccccccagtcccgctctgtttgctttatttaagtattttggaagatcactcctcagcctcatggggtggatccttaactcttctggcccagcccactcctcaggtttctaggtgacccacctgctttgtgtgcaccctgaggcctgctgcactgccaggacctcagcccctgccctgctccccagcagcctgactgcctcccctccc

SEQ ID NO: 104209 - DNA, 1027 bp, Homo sapiens
acaatgactctgctgcactgagtttcaagaattttggcaataaaaagagcctatatgacctatttatgaagtattccagaatcacttacatgaatattttgtcctaaattctgtataattagaagatataaaccccacattgtgattatttttgttcaccaacataacctaaattagaactctccatgcgggctttcagaaaagaaagcatttgaacaaaaacataaaaggaattggttttatccacaccgttctcaaatacttgagagtaacgtgtttgcttaagtaacatcgatatcttgtttactgttatttgatttgcagacctttcctctttaccagtaccagtagcagaaaggtaaattgtactgaaacgtttaaaaagtcgtaagttctgactttgaggcctgatgaaccatcacgggattctcccctgcctggttccttttccccggaacctcacatcaagcagaagcttccttgcgggcggcccttgttgcaggcggtcttggcgagagacatccccatttctgcagctggacggtgaaagggacgttgttgttcttggccatttggcaggtgttctctgactgcctcttctccgctgggcctgccgcacagggagggcaggtgggaccgccccccaacccctgccgcagggcctaccgagagtcccatggcgggcgggcagaggtgggctagtgttgcattaagtgacttcccgtagcaggctgttcagtgctggggcagccttctaagggaggaggcttgtgggctgagacctcttccctttttcatcatttgggcttccggggcatagaatgggatgcgtcattggcctggggtctgtgctgctgttgggcgtctgtgcatagtcctcttttgtctattttcattatttttatttatttttttgagatggagtcttgctcagtcacccaggctggagtgcagtggcgcgatctcagctcactgcaacctctgcctcctgggttcaagtaattctcctgcttcagcctcccaagta

SEQ ID NO: 104210 - DNA, 1040 bp, Homo sapiens
tctgtgatgcgcgggccacttaaaggagcacgtgcgtgcctggtgagggctgcggttccctctggtctgccctgtccctggcgtgggttagtggggacatgggcttctgtgagcgttcttattctgctaggcatctgtggaccccggacagggacggtcagtgacagcccacggaccacacaccacccactgccacctgtttctgcctgttttgtaaatggtgtctgatttgtacacagccgtgcccatttgcaccacagcagagttgggaagttgtagaggccgtgtggcctgctgggctgaaggtgttcaccgcccggcctctcacagactgggcttgctgaaccccacctaggagccgctccctgtgccttcgcgatattgcagtctttgatgcagaaacacgtctggggaacagcctgctttcagacagctttcagcttgtgggaaattgggcaagggcagtggcaggaagacatggcgaatctggggaatccagaaggggcttcctttcggccatctcattggctggttattctcaagccctggttgctaggagtgatggagagagttggaaaaagaatgtttccactagaaacgcatccctccgtgtgtttcctgtggcttagtgtatttgcttctacaacacagtagtttttgcttgcctacctgtgcctacacttaggttttcttgccagctttgttttctttaaataaacatctttgcaggccgggagtggtggctcatgcctgtaatcccagcactttgggtggcagaggctgggggatcaagtgaggtcagcagttcgagaccagcctggccaacatggtgaaaccccatctctactaaaaatacaaagaattagccgggcatggtggcaggtgcctgtaatcccagctactcggaaggctgaggcaggggaatcatttgaacccgggagacagaggttgcagtgagccaggatcacgccattgcagtccagcctgggtaacaggagcgaaactccatctcaaaaaaaaaaaatattaaataaaaaata

SEQ ID NO: 104211 - DNA, 1197 bp, Homo sapiens
tgcgaggcccgcttaggtgcagcagagctgcatgcgcgcactgctctcagctgtggcttgtgacagttgtgtggggactcatggggctcagcccactgcctggggccttccttggctcttgagtcccatcagtaaaccttggttcccctgccaggtgctgccataggccctgggggtcccgagggagctaggtcagcaaaggccctgcccttgaggacttctgttctggggacacaggcaggagatgaggggacgatttcattggcgagtcgcccctgccttcctaacttggggagtggcactgagggccatcccggcgcaccctgctgtgctgagccgccgtgcatggccattctgtgcactcaaggggtcccaggctgttgagacgtcctccctggcccctgcagagccaacggaaccgggcagtggggactgcagagccggcgggtgcattaaccctgggctcccatctctccccttctctcttaggttaactgaaaatatgagacggctcagtgagtaccagcggctctgcgtggcgcccacgatgctcagtgtgggtggggcccatggcggtggggactctgggattctgagctgaaccgactctccagggagacgtggttaagcggcctcctacccacagtgctgaccactgtggtctgctctgtccccagagcgcggtgccaagccggtcactaactttgtgaagaacctctctgccttatccgactggtactccgtctacacgtctgccattgccttcaccgtgagtgggtcctccaggggccgagcagggtgggtgggatgtgcctgccagcattcaccacatgatcaggcaccttcccagggtgggaggtggcccccaggtggcacttcctcaggccccagggacatgctcatttctccttctgtaaagtgggctcactgatgccagtgcccagccatggggtggcttcaaggatcaaagatgttgggcgtggcccggggctagcctgcagggctccctggacagggatgtggtgcagccttgtcccccagggtgcccttgggaaaggcctcttggcactcaccgtgcagtgcggtggccacgctgctgaggtccacagagtacctggtgctggggccaggagtacctccaagggcatggcagcacgaggggcccagcccagcccctgtgagccatgagtcctgagg

SEQ ID NO: 104212 - DNA, 1008 bp, Homo sapiens
ctggcgctgagaccaggcagtttgagaagggcccccttggagccacagcctggcactgggccatatttcattcacagtcacaggccctccagatgtgcagcacagcatcccagccaggaccacggggaatgagcaggcctcggtgctcccttcggggtggctcagatgagtcaggagggttgctgggctctccccactgaggtgaggtggccctgcctggaagaaggagccgctctgggccggaagggacctcgggaacgtcttcccaaatttggatcccagcttttggggaggtgtgtgtgcggccagcacatctgggtgctgcaggcgtgggcagcgggcctgacctcgacgctgtttgccgttggcagctgcagacgacctcgtcacggagctacgtacccagcgcaccggccggcctgggtaaagaggaggacgccggtcgcttccacagcaccaagaagggcaatttccacgagatcttcaatctgacagaaaacgagcgtccgctggcgggtatgtgtgccgtgagtctgaggccaggccgagcgccgacacagactgaaggcccgtgaggggggcgctgtggatgcaggacggggtcgccctgtgacaggccagaggagccctcaggatggcattcacatcccactgccccaggaggagtgcaggagccaggggtcatgaggactctgcgggctacaggggaggagggcgtgcccgtggggagagccgcccacgctgcagcactcccctgacagcaggcgtgcaggcaacacactggggagagagtccagggcgaggcctcagggcctgcagggcgctggcagggggtctgcccctggttccatcgtgtctggagaaacaagagccaccaggggacaggtgactcaggatcctggggacaggtcagctttcccaaagggagggcctgttaaactaaaccgggcagctcgaggtgtgtgatgagcggctgcagaggcagctgcggagaacggagcttcgtcc

SEQ ID NO: 104213 - DNA, 1147 bp, Homo sapiens
agctagagcctggggctgcgtccaggttgggttggaaatcttgctggggccatcgagtcaccggacagacagggatgttgggcacaggggtcccctgactcagtgacttgggaggagggaggcacggggctaaagcctggctcccctctgcctcttggctctgttcccctgaaggctggagcctggctccgggtggtggggagacacctgtcttttgcacccagacccacgtgactagcgtgctggcctggggctggtgttggacttcgtctcggtcctggtcctggcgccagcctggctgtgccatgctcactggtggcatttcttccctgccagccgctcgtgtttggtgccatggtgcacagggatgaggccttcgagaccattctcagccagtacatcaagatcacctcagcggcagcgtctggcggggacagctagtattgacttgcccaggacgttgctggaattttctttttctttttctttttctttttttttttttacgatttggtagtggaaacaattggacatcctcatgagcttttgcaataattctcctggacctgtggttctattgtgttgacctctgcgttttatcgaccaagaaggggccagggctcacagggacgggggtgcccctctcccacagggcacgtcaggtgcctctgagggccacccgcagactgggggagggggcagaggccctcgggggcccgtggagaagacacacaggacccctggccctgcccttctccgttccagcctggacagagaaacctctccagccaccccaagaggttctcgcaaccttgtgtcccgctctccagaggccagaagctcgtccaccaccaaagccatagctgaagagtgcggggcccttcctcctggggacagaaagatgtcgtcaaggagggacatgggggcctttcaccaaccaccgagaaacgggcctggcggccctccttcctcttacatgagaccctcctgtggcatttgcccttggtgccgggctggggccgggcgcagtgaccctgcctgcgctccacactcgctccacgggaacagagagggtgagaagggcccacccctcgcctgccctcagtgtctttggtggcaccttccttgctggcctccagggcgctca

SEQ ID NO: 104214 - DNA, 1783 bp, Homo sapiens
cgacagcgttccctcccccgcgtgcctagccggtgccggtccgggcacagacccccccagcccccgccctgccccagggaagcctgggcttcccgggaacaaggtggcatttgtggagggagcgcccgcaggcctggtctgctggggccgcctgcgctgggctgaagggagggaaaggcggcttgggcctcctggaaggaggtggccaccccgcgggcctgcgtgtctgctggggcggatcccgcagctccctcagcttgtcctgagtcccttgggtgtcgttgagattgttgttttttgaagaaacagaagattctattttttacagcgagcaagctggttttcttatttttgtatcctttttcagatgtaatttttatctttgctccgatcctcatttgctggtgtgggtgagggatccggcggcatgggctggtttcacccccttcacgaggggccgcagagtcacacgctggtgccgggggtgctttggggggagctgcgccgatcaccagattaagcacatgtcctatcccaggcggtggagcggagcccccgtggctctggactgcgcggacgttggcgtcaggatgaccacacggcggcctttcccgaatggggacagaacccgctctgagccgtgggtctggctcctgtaggggactggctctcttggtgcaccaggggagggggacatatcccagtgaaccccaccttggcgcctgaggcaacacagggtgggcactgacccacccccaggggcggctgcagaggcagtgcccgcagacaatggccacacctctctccccagggcccggcagtgcccaaggatgggtccggggcctcggggccaatgagcgcctcttcctaggtgctgggattcagtccccaaacacagcgggaggggtccctggggcagatggggctttaccagcgtcgggtggtttagttcgagtcccttttgtggagaaagggagatgaaaactgaccacgtgccaggtgtggccgaagcccccagggagggccacattcggggagcggggggtcgggggagggccaccgactggctctgctgccagcacaggcccctccctggaagtcctcgggagcggagcgcggatcggcacgggctctgggctccccgtggagagaagctgtagtttttaccaaattgtgtacatctgggcagatgtttaatttctgtgactaatcactgaactagacgaatgttaaattttttatgtctgaagcctgagtctattttggatctgtaaataatcattgccagtgtgacttttgttcaacaaaaggattgtactgtattaagaaccgatgaaaaaaattctcctgtaacatttttttaagaaaactttgtttgtttaaagaaaaagtattgtataaattataatttttatttaaataaacctaaaatgctttgtgctaaggctcagggctgtctgcctccttggcagggccacacgcattgtaggcggcctgagccagctgggccaccaaccccaggccctcagtgccgctgccagcccgccactccctggggccccacggctgccggcggcggggcgtttgggtactgatgcggcctgagtgacggctgtggggtgaggtggggctgagaagcagagtcctgttggacgtgggcattggaggctgggagcagggggcagggcctgagttccagaagacaggaggccaggtggcgagggacgcggcctgcagggagggtacccagggctggcacagggcgaagtgggggaggttgagg

SEQ ID NO: 104215 - DNA, 1001 bp, Homo sapiens
ccaacaaaaaaaaaagtttcccatacactggcctgccccaaaacccactaacaattttagcaaaacagtccaggccaaagaggaagcatttcatgttcaataagaaacccagccattccgcatggctggttcctgagtggctctggtgatactctccagccacctgctgacattcagaatctcagacctcgggactgctgttgcggtaccgtgtgtctgacacctgccagcagccctttgctatctgcgcgcaggatgggggtgactgcccagacattcccgctagataggctctgatttccggggcagcctttcagatgcggcagacatacaacacctgtactttagagttttaagggaaaaaaaatcagaagtgctggttagatagtaaaaacttaggataacttagaaaggctagttttagcttcctttgtggctccctggtgcaaaacaattagcagttatgcaatggacctgattctagtttattctaattaagaagtgaggccgagtttgacttcgttcctgaatacaatcttgagtaactgggaaagtctgagtgaaaggatggcctcattctctttctaatcttgctggtttcaagattagaaaatggcattatttgatctgaaatgtttgagaagacacgaataaagttacttgggcagacttggcttgctttctttcctttacacatacctgttattttcaaagcagaatatttttcatgaaaacacacacaatttaaagaacaagaataaaatgaagcaaggtgtcaccaccacctatgccaggcaactgaacgccgccccgaagccttctgtgccctgctctggagtccccccgctccccctgggagggcgctacgaggtcacgccaagcgcatcccttcctgcctctgtccatggctgtatctgcaacagcgagtttagttttgcaggttttgctccttatccaaaggaaacgtgttgttttctgtaacttgcttctttcactccaca

SEQ ID NO: 104216 - DNA, 1035 bp, Homo sapiens
gagacgccagacccttacagggcatctgtgtgggaggtcagtcatcactgctttctgccttggcgtccccagccagctcccattatggtttctggtcccccaggtcagggcttggtgtggtgtggcgtctgcttttgtccagcctgctggggtttgcctcttggcatgctaattgcttcactcttgctaagccaaggtgcttttgtgcgggttcatcctgagctgcctgactggcctgccaggagcttggtccctcttggagagggagggccctggtttgtggggccatggatggtggggccctggctggtggccctggctggtgggcttcctccaggaagcagcctgccctctccacccaggagtgctctcccatgcaatgggaaaacatcaacaagttgggaaacgctaagttgtgaatgagttcaggaatacagccacactgtctctagtttttttctcatagctttacagtccccaaaaggaatcaggcccaggttcgattcttctatgcttgaggtcagtagggccatagtagggcagaagaatgtgaaccagctcacaggacatttaatttggtcagcaaggtggcattgcccagccctccccattcccccaggtgtatctgggcacactgggattgattaggttgaggaatgatgagaggtggagaattgtgcaaaaactggccctaggaggacctgtgagatgaggcaggagcagccctggagctccaggtgaccaatgggctaaagacaaagccaaggccactgtgtgtgccctgctggggtggccgcttagttattccgactcctttgttttctccgtagcatcacccctatttcagatgtggacagtaggagtgggaattgactgggcccagaggcagtgatgtacagagggagctggctttgaacccaggcacgtgcactttcgtcagtgggtcatcatgctgggacagtgactgactgtacaagagcacagacaaggactagcaatttggatcgctgcagcttcctgggcctgggtgaggtc

SEQ ID NO: 104217 - DNA, 1031 bp, Homo sapiens
caccccagggaaggtggagagagggaggtgtggtcctgtggagccccagctccacctgcgctcgctgggagccttcgcctcacctgttggagcctccgttttctctcacacgtgaaacgaggatagtgatcgcagaacagagtggctgagagctcaagattcaagtccaaactctgcgaggaaaggcggtgagatcttgggccagggtttcctaggacggcactgtggacatttggagccacatcactcttggtggcagggactgtcctgtgtactgcaggatgtgcagtagcatctctggccttcacccagagacaacccaaagtgttccccagacattgccaaatcccccatgagaacctccgccttccagaaatcactcgatttctctgtgctttggtttcttcctctgtaagtgaagatactaaaaccaacctcatgggatgttatgaaggttaaatagtatcgtaaatgcaaagtgcttggcataataagggctcattaaatgttagttcataaaatcagagcgagcagccctggctgactgttgagcccagcatctggggtactgtcggcgttcagtcggtggtggcagtgatcatgtttctctgaggctggggagaaagcctcaggggctacctctggagggacttctgtccccaggcagcagccagaggcacttggagggctgtactccccactcagggtctggctgatgctaaggggcagaggggatccctgctggactctgcatcccctatgctgcacgcttccttcccatcctggcaggaccaagctgctgggtctgagttttggggctctgggaagtgggctcctgtgactgccatgcactccccatagtgggagacacacccagacatccctgggctagcctctggtgaccaaatccccctggtttgctggactttcctagtttagtgcttcaagtcccacgtcccgggaaacctgtcacttttaggaggtggattgctcaagttgtcccgattccaggttgtacagccttccccggg

SEQ ID NO: 104218 - DNA, 1105 bp, Homo sapiens
aaaaaggaaagtttacttttaagagtgatctgggggttagcagcgtgagttactgacagctcagacagtggctttgagaatgaagggagtcatcaaaggtggccggagaccctattcgactccacaggaccgtgcttgattcgagaacagtaagacctttcaacaaaaccagtgtcagggtccaaggtgagtgaagattctggaatggtggtgggtaggaggtcctggtagtgacaggaacaaatgctgtagaacataagagtccagggaagaggagccacatgacagtgtaacttttatgtgttacttttaggtcttaaggttttggttcctcatcagtctaaactctaattcttaatcagcttagatgtaagaataacagagctgctgtgtggagttacagcagtgactcaacctttggattgaaggctgtggctcttggtaatttgtccttatactgagttgaatttatgtccatctggaaactatggatgtgacatttggaaatagggtttttgcacaagtaatcaaggtaaaatgaggtcatactggatgagggtgggccttagttcgtcaactagtatttttataaaaagagggaaatttgaatacagagagacacacacagggaaatggccctatggagacagaaacagagattggaatagtacatttacaagccaaggaaagccaggggttgctggcagccaccagaagctagaagaggcaaggaaggatgctcacctagagacttgacagagagcatggccctgcagatgaccacttgattttgggtttttggcgtttaaaactgagagagaataagtgtctgttgtgttaagccattcagttggtggtaatttgttatggcagccacaggagactaatacagtctccagctttcttctgtgtgaacctgaaataccgaacaccagctttccttttcctctgactttgatgctattctgtgtcttaggcacttttgagagcagcttctgtattacctttgtgaagttggagtcttggagagttcgaggctgtcactgaagagggcagaagaagaaggagaggttgggtgcaccaggaaggcctgtgaagcctctgt

SEQ ID NO: 104219 - DNA, 1085 bp, Homo sapiens
actcaggctgctgcctgctgggcctgcctgcccttggagccctgctgagctcagcctgaggcctggctcctccaggctgggggaaaaccaggcttgctgtgctcggcagcagagattcttctggagtgaggtgagcagcttgttctaggtcccccctggtgttctctttgcagacaagaggcagaggtatcaggaggcccagagggaacagggctgcctgggctcttcccatttctgggccccgtgctgtggggaactttcattttgagtatccccagactttttgttccccctttctgaaatgtttcctcttttctggtgataaacatggaaattccaccccgagtgctgcggttcatgaaggggcacgtaggccctttgagtccagttgcttagaatacctgtgggtttccttattaagtaggaagtagaggctgagaacgtctgtgttgttactgatggcagccccccggggcagggccaggcattgctgggcgccctctcctccctgagtctgccttccgtaaacggcctgcagtggggaaggtgggcctctgctcaaggccccgagctcctaggggaacgggttcaccttcaggcccatccaaggcagagccctttccggcttcggggcccctgatatttctgggcccccgactgcatccgctctgttcccacgggtccctcctgggtgttcttgctcatgcttgggttcatttgagcgctgcctcgccctccgccatcctcttccttctcatgtgcgctgtgtgcaccggagcccggccgatgctgatagaatttttaagtgtgccgtgcagctttctgcacctgggcctctactccttgctgtgctggtttgaaatgggccttcttttatcaaacatttttactaaactaaaaaataaaataggcttgctggctctaaggctttcacctagatgaggcgagtgatgtttattgcagtcgtctggatgagctcctgatccttggctgaaagccatcagtggctcgggatgtgtggagaggacagggcagaggacccggtcttggaaagggggtgggtcccttggtgtcactgtggctct

SEQ ID NO: 104220 - DNA, 1723 bp, Homo sapiens
ccaggagccacgcaggagccatgcaggggccatataggagcttgcagcagccgggccttcacgctcaagcccagggcagggagagggtttccgggcagaagcagcggttcaaagggcatggctgaagctgtgttctcgaggcgggggagggctcttggaaggtctcctggctagaaggacacagctctgagtagagttctcagagtgggtggttgtttcttccttatgtttgtttttttttgaaacagcaacacttgcatgtgttataacatgacacagcacagcagggtgtatgtgaaaatgaggcctgtcccagcccccaccttcccttcctttccacagctcgaggtgtctccttccagcgatggcccatgcatctgttgttttaaacgtttcgtgttgatgcaattcaaacttgcagaacagttggcatgaatagtgccaacaactcccatatgctctgtacccagaatcaccaattgtttacgtttgcccattaccattctgcatgtgtgtgcctgtttttgtgtgtatatatacatttttttcctgaaccatttgagagtcagttggagatatatccctttacctctgaaaccttcgctgcatatttcctaagcacaaagacattccctcagtatcatcacagcacaggggtcacaatcaggaaatttaacgttgacacagtactattttaacacttgtattattttcatccacagtccatagtcacattctgccagttgtcccagtaatgtcctttccctcttttttcttagtccagactccagtggggaccatgcgttccatttggatgtcacgcctctgtcttctccactaacctggcgcagcagctttgccggtctctgcatttccatcttgacactttagcagagcacgggccagtgattttgtgggatgtcccttggtttgtgcttgtctgatgtttgcccacaatgagattctgattgataatttttggcaggaacatcactgaagggattcgtgttctccttggtcatcacagcgggggcacgtggtgctggtgggtcctcacgttgaagatgtggactccgatcacttggttgaggtggcgtctgccagctctttccactgaagagctcccctttttcctttggtgatgaagtgctctgtagagagatgctctggggtctgtgcatttctacagtgtatttctttgtccccttgcacggcaaggcagttgtgcacctcactttttaagggaatgatacattttcccatggcgtacgtggagaaccgccttagtctttagagtgccctgtaacatgccatcctatggatttcccccgacttgactgcaccagcccctgcggttgggcagcgggttattcctaacttgctattattacaaacaacttgagaacgtttcttcaggcgcctgaacctccttctgtgatggtgacacagagcatccctagccatgggtgaggcgagaaggcagtgtgggggatgggtctgtgagttcgcctagagcaccaggtgtggaggtgtcacccaccaagacaggagataaaggtagatcgtgcttacgggagtctagtcttgtagttgacgtacccatcttggccacttcctcttctagcatgccagtgccccttctctgctggctctcctgcctccagggtggtgtggagattcagaaccacgttgcacctgggagagtgggtcctggagccgggct

SEQ ID NO: 104221 - DNA, 1080 bp, Homo sapiens
gtagtgagctcctaccaggcgaggcacaggggacccaaaggcttctgctccaatggagaaagagatctgccgcagataatacggtagaactagggagggttagggcccttaagcatatgtcagaagttccgtggaaacacagaggaacgagtaatgaattctgctggggatttggctgggggtgggagcaggtgggccttcaggggccagaatagctgcagagaagttatcctgtctgtgctgggccccggaggctgagccacctcctcagcccaggactggggcaggggttccatgaaggcaggggcacctgacggacaagaaatcagatctaaaaatgcagacagtatttgggaaagtggcgtggtttggacatctgaatctctttgtcagacataggaggctgagccctggtgctccttccaggagccttggtggcgaccagaaagctgttgctggtttctgcctttccgcagcccttgcatagtcagcgcacaccctggcctcttcacccacaggctggcgtggcaggagcaccagccttaccttcttagagaatatttacttacattcatctttgctattcttaaatattatttaaaattacagatggtcagtgtttgaaatttagaaactactgagagtaataataagaaaaataatagaatctaatgctatgtgccaggtgtggggtgtggagtccttgatgtatattttcttgatcatttctcacagtagtcctgtgaagtggatgctatttttattcctgtttgacagatgaggaaactgaggcttgaaggggttaagaaacatgcctgacattccaagattttgacgtcacagagccagggctcaaacttaggaatgtctgagtccactgggcacaggctctcctgcctgctgtgcaacctgccaagaccagtctcaggaagaaagataaaaacccatgtaaactaccaccctggattccccaggacgttaaaaaagctgatcttctttgtctttttgtgagggctgtgtgtgtgtgttttccttttcacgtagacttgagattaagcagtgtatctaattatatatctt

SEQ ID NO: 104222 - DNA, 1106 bp, Homo sapiens
aatcccatagcacccacgcagcagagtcaggatttgaacctgggcagacgcttgccccatccagagtgaaacttgtggacgctgtgcaggacggttcctggcttgcagtcagcactcagatagctgttgaatgaatacacgaaaacgtaaatctggttttagtttccgtttttttttttttgaaagacagattagctcactgtaaaatctgtttttcttcctttgccaggaagccatcaacagagactctttcctctatcctgttgtagagttgattgacagggttctttgtgcctggaaagcaaattatgttaaaattatcttcacgacctatttataagtgccacgattcctcagcactctttggttataatctgtgtcctcaggtgagtggggtctcccgggtcccatggcgccccctgcctgttcaggtcaggcttctaacttaccttggagagtgctctgcccgccgtcaccacgcgatggtgttgtgacctcacgtggggcaagtcatgcaggccgagtcggcgttcctgagctcccatgcagcgaatgcatcacctcgggagaaaactgtgttcaatgtcctcttaatgacgttggcattttcaccatcggtgcagcttgtgtttctaaaacatgactacctcacccacattgcctatccctaaggcatttcagccacccagagccccttcggaatctgctttcctttctcacggacttaccttttgaacatgcgtgtaccaaatggtattttataagtcgtagtcttctcgtatcaaaacgagtcctggccgccagcagaacgtctgatcagcctaggtgatcggcctgcccagagagagctgctgtcatttccacttgaggatgcgtgtgggcttggtcactttgtgcagcctggtggtgtgagtgaggtctcagccttaggtgggcttctgaagggtgacctatgactcctctcttctctgagagtacctgggtggagcgtactggggtcccaggatgatggatgatgggccactttctactggggcgggcagtgaagacttcatctggaggtgcttgtcttatccgcagggactgtctgtctcaaccacgtgagc

SEQ ID NO: 104223 - DNA, 1051 bp, Homo sapiens
aatatgctgaaaacaaggacatatgtttgaccaagtttttttttttttttttgtaagtattagtagcgctgttaggaaaagagaagaaatggatgagacaagtggtttgtgtttctgtgggtgagagaagtggtttgtgtttctgtggtggagtgtggagttctggctgccgcagctctggcgctcagctgccggtctggaagtccttggggaaaggttggggtaggcggtggtgacatcagcaatgccctcgtacacttagctcaggcttgccgttggaagtgagtttggccctgcccaccatttcagaattgtttatagacagttttcttctcttttcctttttcattatttttggagctaagtcaatagggagctctaagtgtttactctaaactgggtctgacttttagtatttaagactctttctggctaatgagccttaataagtttgcagcttagtacctcgtaatcctaaatgcagacgcagctctgaacagcgaatatttattgattaaatattcttttgcaattaaaattagacttgctgccattgcttatgtttttgttttgtgcttttttattttaacctagttttccagtttatatccagttttctaaatgtcccctaagataggttgcagacttctcaggttggtttgtaggaagttatgatgaaaacaccgaattgccgttttctatttattaaggatgtgccgtgtctagggggaaagtctcatgtgagttattttatactgtgctttctcctctaattctcagcctctgcgggttgtggttccgcttccctaatgtgtgtagcacaggggttgatgtggacatggacactctgatttcagtagacagaggagcacaaggggaggtgacagccccactctgctggttgtggacaggagggcaggtgggtgtaggtggagtctgacccaggaaccccggcgaggcaagtgagagtgtgaacccaggagatctgagactggtctcagttgatttagaaagtttattttgccaaggttgagggcgcactggcgacgca

SEQ ID NO: 104224 - DNA, 1007 bp, Homo sapiens
gtggggcgtacctgtagtcccagctacttgggaggctgagacaggagaattgcttgaactcgggaggtggaggctgcagtgagccgaggtggcgccactgcactccagcctgggtgacagagcaatacttcgtctcaaaaaaaaaaaaaaatttgtcttgtgttggccagtagaaaaaattgagttatggtttctggcattgtagaggtgcagaggttagatttcaatacatctgcaagtgatggcaaatcccgaatgtgccttcacaggccagaactcgattactatctccagtacgaggtcattgtcagcacattgtttgttcctctatatgcttggctttgacctcatggtccaaggtggctggcctagcactctttatcacatttgcattccactagcagggataataagacgtgggtagagaatgccatacccccactttaaagatgtgtcccagcagctgctcatagcacttctgcttgtttcctactggctgtaacttagcctgtcatccaaagtgacatggttgtatacttagctgtatggatcagggaaaatgtaactttgatttttttagttgtgtgctcccctaaagtttgggctgctaataggaagaaggatttctgccgtaagcatccctccaaccccctgcatctatcgaaacatttgcttatccattccacaggtgatggctgggtccactgtgatcagtttctactttccttcttcctccttttctccttccctttctctttctctccctctggtcagctttatcgaggtctaataaaattcacgtattttaggtttataattggatgttttgacagctgtggtttttttttttttttttgagatggagcctcgctctgttgcctaggctgctggagtgcagtggtgcgatctcggctcactgcaacctccgcctcctgggttcaagcgattctcttgcctcagactcccgagtagctgggattacaggcacccaccaccatgtccagcta

SEQ ID NO: 104225 - DNA, 1086 bp, Homo sapiens
tccaggccaccaccatcttcgttgcgctatttcaaggcctcgtggaagccatgggctgctgctcccgcttgtctgtgttgtgttcgtctgtgttgcacgtcctagtttctttcatacattccctctggcccttgcaagtgtgatctctccctcctgtctccctccctttctccctccctcttcctccctcacgctgttgccaggagtgggaggtggcagagacgcctgcccaaggaacctggccagagatatcatgaggactgcctggctctccatatcaacctgttcagtagtctgcctgttctttctgaggattctgtggccacctttccattctgttgctaactttggggacctgtttgtttagctctttctcatcaagagagattcagaaaaattgccagggcttttagaatcctgccctcacctgataaactcgccttttaatgccagctgtgaatgagagaaggacgctctttgtacacttgcataaatgaggtgctctgagctacgttgggttgtctaggaaacatgcctttggagggcggcaaggacggagggctggggtattagaggcgaacaggagagatttgcaaaacaaagcaaataaaaacaaacctgcatatcttcaaataaaacattttagctgaaagagagaaaacaagaaatcaaagccccttaagcaggaaagattttcattttcattttcagtcttaaattgacaagtaagatggcatgcagacctttttcccctttgttctacgccagagcaagactttgttaaagaaacagtattagagtttcccaccaactcttgactgctcaccatttaagagtcatttttatacagggtcatgcctttgtagtcaagagcctacattcttggtaatgccctttgagattttcccacatgctgggtgcccatgggggtagagtctcctccaccaaaaccttggttgcagtcatgagctttgctcatccccccacggtgggtttctcactccgggtgtgtattggtcgataaccctttgagtctctggagttggtctctctgtgttccgtggcaatggtttgtgctcagcttgg

SEQ ID NO: 104226 - DNA, 1033 bp, Homo sapiens
gactgattgtgtcgcattttgcttctcttccatttttgagtcctgtcttcacacctgaccctcaaagaagacgcaacatcaaggtccacccgaatacctggaaccaccatgagcatgacaacagccggtcacactcgtgtggttcagggagtcagaggctgtgagtgccagacggaacctcgggatcatctgagtcatcctccccattctcagggaaacctatgccagagaaagaagttggttttccgagggccccatctgtgatggagctgagcctgaccccgtcccccatgtctgctctgatgctcccctccagccctgcctcctgccacaatgtttgtgtggggccttgaagagggcatggcctgctttaaatgttcccatgtagatctggggtatgtctggcagttattcctactcgtttggtgatagagcaaatggaggcttcagatggaagcgtctgaatggatctcttgttagcaaatttatatcatttcatccatctgccgaccaggtatctctgcacgcagggaacttttattcttttggtggggagagagaaatactaagttggatattggcaagcactaagaagcactaagaagaaagaactgagaaaggaaaagaaagtgttgcagtctttaatgctggctcagcaaggcctcactgagccggtcagcagtgacgggagtggtgagcaccatgcgcaagggcaggcaagtgagtgcggagacttccagggggccctgaggcctgagccgaggctgctggggctggagcagcctgagcaggggagggctgtgctcagtgtcatctgagcagcaatgacccccatggggcctggaggccagtggagggacattggttaacgtgggttaacatggccttttttgaaaagggtcgccttgggaacgtactgagactaggttgtagggagaagctgggtggactccaggagaccagttaggtcattgtgctaagccaagttggagtgatcggtggtggcttggagcaagagggtggtaatagtggc

SEQ ID NO: 104227 - DNA, 1044 bp, Homo sapiens
aggaagttgcaaggaacaacaggaggatggtggtggtagctttcctagattgaggtattcacggtagatgtgcgcgaatgacgggtgagtgtggaggagaatctgaagaggtagagagagcgccttttacgaacccttgcgtctccgggatggatgtgtgcatggataaccggggacaatacaaaaccaaacacaccccacacctctgcagttctgttatttttctccagtttaccagtgtagttttaattctgttccttttctctagagaagttccttataaataatctccctctcacattccttgtaagtgttcgggatatgtgtttgtcctgaaatacgtgtgtgagtctgcatccatccgtagaagtgtgtatgcataggcgcatgtttgtggacagaaacagcccagcacttccggagctttcagctgtccctgtacgtggcattgggcctacctaacctttgcttctttgccgtagactctccatctgcaaaatagagacaatccttgcagcttttcttctctctgggaggttaatgattgagtgtatgtatagtgctgggaagcctttgaagtaaaatcacaaagtacatgtgtattatttttgtagctctaatggtatttatatttaaatcattattattacaataataatacactggtttgccaataaaacacaaaccacttcagaagaacgttctaaaatggtagcattttctgaggccgggcagcagtgtctaattttgggccttcacagtcagtttcgcgattcatgtgttatgcattttcaaagaataatcaagagcatgcaggattgcccggggcagtgagtactgaaaatgtacagttgggccagttgtgctaagagagtgatgggacatctgcacggacatggctgtatttcacgccagttaggggctgtcactgcagccggcgccatcttggagccctcggagcttgacttggtgataatgcgtcatcagagctgagcaccttgtgtcagctgtccagttacagcgaggtgtaaagtggacgagtgt

SEQ ID NO: 104228 - DNA, 1004 bp, Homo sapiens
cggttctggtgcccaggattgccatggacctctgattcactctgattccgcttggtcagagccggccaagcccagccgcgcctcctggctttctgggcagcctggcacccgtcagttcactcttgtcgggaggttttcctatgacttactgtcagcctggacttggcttttccagactccacgttttctaatgacctgccatcggcatttgcttttttgacatttacttggcttcttggccctcgaaactgactgggttcacttagcctttttagcactgccttcagacacctctgaaagtctcctttagctttgtccacaggctccttttgaattcttctggcccaaacctgcatcagctaagagccctggttccttgtagcagaggatggtgtcaaagactaacatctcgttagttagcaggggaatcacacagtgggactgactgctagtgatggagcaggcaaaagggcctgagtctcttctgttacctccaatttaactaagtgcttcttacctgcctccaacaggaatgttgttattagtgcgtttttcacggtctttggtactggcctgttatatagtgccatatcagacattatgtaggaggtacagtgttggactcatcttttttttttttgagacggagtttttgctctgttgcccaggctggactgcagcggcacgatatgggctcactgcaacctccgactcctgggttcaagcgattcttctgcatcagcctcctgagtagctgggattacaggcacccaccaccacgcccagctaatttttgtgtttttattagagacgggttttcgccatgttggccaggctggtcttgaactcctgacctcaaatgatctgccggcctcagtcccccaaagtgctgggattacaggtgtgaggcatcacgcctggcctcttggcgtcttttggccctttggcagtgtccccaaccaggcagtctgctctgccactaccacacaggcatagctgaggac

SEQ ID NO: 104229 - DNA, 1011 bp, Homo sapiens
tgggggtgccaggagcccgggccgtttcctgtcgccttctgccctgggcctgtgtgctgcattcgattttttcttccaagcgctctctccattgaaatgcggtctttaaaaagtatactcctggccgggcgcggtggctcatgcctgtaatcctagcactttgggaggccaaggtgggtggattgcctgagctcaggagttcgagaccaatcatgggcaacatggcaaaaccccgtctctactaaaaacagaaaaaattagccaagtgtggtggcccacacctgtattcttagctactcagaggctgaggcatgagaattgcttgaacccgggaggcggaggttgcagggagccaagcttgcgccactgcactccagcctgggtggcagagcgagactccatctcaaaaaataaataaataaaaataaaagagtatactcctggcatgctttttatctgagaagatgtaaaacagggaaaagaacttcaggccgttctctttgtggctgagtttcattctgcctgcgtggtgacagcagccttgagctctctgggaattcacatcctgagcagtgtgctaggaggatgcgagggatgctggtgactctgctgtgagtttgagctgcttctgccaaaaaactcacgctcaggactcacaccttgtctatattttgagttacatataataaagattttttaaaaaatcacagattcagtgtgtatgaaattttctactcttcaccaattctgatgaaattcaattcttcaggaggttgagttttctggaacaagccacctctcttcccttgagtgtcccatcacttattctagcaccttttcattttgttcgagatgtttgctgaagcggaggcggtgctgtggggggtttacgcgccagcctttcatcatcagttacaaatagcaggcaccattatgtgggattaggaatcaaatctctacagagtgctaaagaaagaagcgtatggctggttttcatcccggcacctcaag

SEQ ID NO: 104230 - DNA, 1028 bp, Homo sapiens
cagcctgttctgctgccgctggtgcatcatcatggcacctgatccttgttcagtatcttaggtgaaatgtcttcattttattttcttcagcatggccagtgcaagcctcgccatccctggggagggtgcgtcagaaggtcgctggaggtggggcctgcactttgcagatgtccctgatatctctcaggacagagcttgatcctgggcaccttgggccccgaatcactcagcccacgtgcagttatcagcgcctgctccgggttgggccctgttctcagccctcaggcatagcaacgggaaaggtgggcctgctgtcgagggctcttttctcagagagggatcctgacagcaaaccagcagcatctctcaggcacctttcaggtgatgaggccatgtggtgggaggccacaagagccggccctcaggcagggtgtccatggcagggggtcctgaattgagatctgtgctgcatgatggggccccaggttctagtaggaggattctggcttggagtgcctgggccaggacagagcaggcgaagggtgtggggagcagcaggtgggccggggcgacgggcacgaggtcagggccaggatgcggctgtccccgggcttgctggagaggctcagcacacctgcagtgctccaggtgagagacatagcatggtcaggaaaagctgttgtggggactgagcgagtgagggccctatctaaggcagcagcccctgccacctgcaatttcgcagcccagctggtggccagcagtcagcaagagtgcgatacaggtgcccaggtgtgctgaggacgtagggaagatggggtgtgttcatctttccaggggaggaggaggcttcctggggagacatgtgagcagggtctgggggctgagttgcagctgaacaggagggtggaagggtgcaaagagggtcctcccatagggcatagagcaggtgtccaggaaatgagtgagaggtgggttgcaccaaggaagagcattccaaggctctgagggcaggggggcgcagtgtg

SEQ ID NO: 104231 - DNA, 1058 bp, Homo sapiens
ggttttaactgaagaggagccagagagccgttgacatctgagttgatcatctccagggacccctctatcccagagccctggatccccccagatgccagaccaaggctgcgggaacagcagtatgccaggtgcagggcctgtgcaggcagcctgggagcttgttccccaggagtgtaagaaaggctggcgggtctgccccactccaggccacaaagagtgtactttctttggggcatttttggtaagctttcagatgatgtattcattaatattttatctgcagtgtgaccttaagcaacttgtctaactgctttaggcctgttgtgggacgaagccccagaggagggcttggtttcgtttgctgtgaggatttgtgtttctcctgatcttagcttgttcttagtgcgagggtgtggcggaggagggctcggggaccttccctgcttgcatgtagcaattctgtgatataccaaggccagccctaccctcttgctagaaatgcatggcctgggaagatttctgacaagattagaaagaaaggaatacacatagcctattaatgaaggctgcatattaaatacgaatcatacatttttaggaaaattattgaattgtatctttgtggccggtgattgaaatcatagtcctaaagagttgagtagatcacctgtgcagggcagcgtgctgggcgctgaaggagaggggcacagaggagaagttcttgccttcaaggcaccaaaccttcagcacagctggttgctggaaatagatggagacagccccgagcggagcagcaaaggagaggacccagagaggagtagtcctggggctgtcgggaagcaccggctgccccaaccctgggcaagtggctgaggcctactgccccaggttggccccaccagtgatggtgaccaagaggtcaggcctgcagtttgatgggactttgagaatgaacactcagttgacctcatccttgatggtggaagaagcttgccccatcctgtgtggagggttcagagctggggtctttcagagcctgtcgggtgccctggcaaggc

SEQ ID NO: 104232 - DNA, 1101 bp, Homo sapiens
gcaggcctggctccctgcccctcccctgcctgcccttgggggagagttaagaaacaagtattagtgaagatttcattgtgtttttgctgtgggtctccacgaggacttagcaggcctcggagttgggactgggttggattgagggagacctgcgtgagtcacatcctcagtttccccatctgacttgaggaagctgcaaagttctaaggtctagaagcagctggtttttagtgttgtgttttgtttcaagtgagtgacttcaggtgaggagatgcgggttccttggccacgtcgtgaatcctgctctgagttcctcagttccccctgtgtccagctgtgcgtggggtgggaaggaaggaggatcgggagaaatgcagtgtccccctgggaatacactgagtgagtggaccttgggcacactggacccatgcctagcagacaactggacatgtagatccaggaaaagagccctcctctgagtcacgccaccctgtgcgtcatgggagataaagacttgtattaaacaagctggtggaaagaaacacatttatcgaggatcgttagggaaggtgattgatgtcatcaaaacactttgcattgcaacatgccaacagcattttgggaactaagctgctggggactagataaaccaaggcatatgggtacagctcacaggcgtttcttaaaaagctggttttgttgaaaaggaaatgcatcttaaaattcacacaaacaatggcaaagccacctggtgctcacgcaggaggatgtggtgctgcctgaatcctgaagtgggtggcacccacgaggggggttcctcggaatgctggtggcgtgtgccgggacgtacgtgcgggactagagggcacatgaggggatgctcgagtcaggggaggtcgggagggagggagggccaagctttggctgcccaagggtgcacagtatatcatggctcagccccgcgaagagacgctcctcttgagggcacctgtccctctgtttgcatcccttggtgagggaccaagcgtgtgcggagggaggctgggaagcacagcctggctgtgtgtccactataaggtattcccgtggaaggcaaagcac

SEQ ID NO: 104233 - DNA, 1034 bp, Homo sapiens
tgcctgacctggctctacatcccacaccctgtgcagggggcctagcatgctggcagcctgctaagagctggataggtatgtggtgagcacatggcaccccgatccgatttacttggtgtcctgtcgggcacacttgtgaatacccgccaggcctgtgtgtgggtggagacagaacctgccctctggccatcgaggctgtgcctcttggccatacatgtcatggtcttgttcatcagacctgccctgcctgtctgctgggagggcccgcatggagcctcttgcccagctgcagacaagggagggtgaccggccccacactcctatatgaaggatggatagctctgggcagctttttggttctggggtcagatttgaatgtaaaactgaaaagtcctaaatttattaaaggctttcttttggggctggaatatgcaatagattttctatccctctcaattccctcttaaaatttaatactgccataaaaatgatggataacaaattattccaggaaaaatggtactgaaagactcttctaactgttgaagcagaagtacagacttggcgaagaaatagacatgacccagaaaactcacgaggaaagaggaaatcgtgtactttgtggaaaccatatccacgtaatgttgttccaggctgtagaaagcaactattgttattccagatactgaagcacagagtctattttgtgccgctggcggtttcattaacatagtaacactctgcctttctagaattgggtgagcagccttccctgtttggaacactgcagagggagactgaaccccacaattgatatcagaaggccccgtgtggatgcctcttcagggtgccttccacagagctctgccagcatgctgaggctgcggggaaaaaccatgaagcctcataaatatatacaatgattgtgtgtacccataatcattagaaataaaaatttaaaaaaacacataaaaccacaagggctctgattgctgggtctaggacttccccactccgacagtgatggtagcaga

SEQ ID NO: 104234 - DNA, 1065 bp, Homo sapiens
ataaaatcctagtagagaagataaaatggagtactgcaagatatttgattgatccgaaagagtctggacatgtaggaaaaaagaggagtacagaagagaacatcaaaagcaacagcaatatagtagacttacacttaatcatattaacagttatgttagatataaatggattaaatacttcaattaaaagatagattgtaagagtgaatagacaagcaagatccaactatgtgctgtttgcagatgaagcactttacgtgtaataacatggatagaaaaaatgatttaaaaaaggtgtatcaatgcaaatactagtcagtagaaggctggctacattaatatcaaattagggagactgcaagacatactttggcatactaccacagctaaagaaggacttttttcttttttaatgataaaagatctgttaaccaaaaacgtataaactaccctaaatgtgttaacaggacttctaattacatgaagcacaaatggacagacttgaagggagtagataaactagttataaccagagatttttacttttgtttctcagtcattgatggcatgaagagaccaaaaatcagtaaaagtatatttgatttaaataaaattatgaagtagcttgcttgatctcattgacatttatagaatactacattcaacaatggcagatacccaacaacattctttgcaagtactcagtaacgaatcaccatgatttcctgggccgtaagacaaggatcaaagttatatggagtatgttatctaactctaatagaattaagttagaaattaatcagaaagataaaaatctcaaaaattttgaaacttaagcagcatgcttttaaataatccgcgattcaaagaagtcaaagggaaaagagatttttttttaaccgaatggattataaaaatgtaacctttgaatttgtgggttatagctaaagcagtgcttggggagctaaccatatacctgtaaaaatatatatatatatatatgaatgaaaagaagaaggacttaaaatcaggaattttagtttttaccttcagaagccagtaaaa

SEQ ID NO: 104235 - DNA, 1044 bp, Homo sapiens
tcgccgctgacctcctgctggttgaaagctcgtccagctgaggagatgagcctggcagtggtcacgtggtcacagcagtggaaacgctgcccacgttatgagttattagatgtggctgtgtgacaagctccctgcagaaccttccctggggcagcgtgcccctcagcagcacgacccctgcagtgtgcggcttgtgacctctggtccctggaaccctctttacagcacgtggactgtgatgctttagggacagggctgggcaagaaatcacacagcctggggtgccttccagccaggccactggaagctctgtgactgggggcacattgttcagcctcactaagctagtccctggcgacttagcaggagagccctcctcgcatgccacgcgtcagaggcacgccctgctaggctccgtgcttgacctgtgggactccctgtggactagtgtccagcccctgacccaccccacgtgttcctctgtgaggcgtcccgggcacactgtggactgttggccccttcatggggtgatacccactgttccccaaggtgcgggctgggaagtccttctgcccagtgttcacccagcagagggctctgggtgcagcaaggaagaccccagcagtgggaaacagaccaggctctgcaccagctggctggggtcagccacacttcaccgctctcccttctcgaggctctcgtctctcagataaagggacggacctaggtccccagggcagtgctctgcgcagctggcagcctgttgttccccagctctgtgcttggcagaggctccaagcatccctattccttccgagggccttgggaggagccagggacctcctgccgccccgcttcatctcggccccaggagagaccagacaggtgagggccataccgaggccaagagctgccaacagatcctggcccagcagatggaacccagcccgggtgttcgcaggtggatgggacaagacgctccttctgctaacttagctcctgcctttttgtcagtgtggggctcggttgtgccctgcggggagc

SEQ ID NO: 104236 - DNA, 1005 bp, Homo sapiens
gaagtggatgaagttggcgtaaagcaggcatgctgtttcattctgatgaggggtgtgatacacagcgtttctgcagagctattaataatttatatcaagagcctttcctcgatccagtaattctccttgtttataattatggaaaaacaaattggcagcagcctgcatatccagctctcggggtacagttacctaagttatggtacatggctggttataatgtttcataactaccaaaaattacatcttcaagtaatatttactgaaacgagcaaatgttttcattgcgtttctatgtggaggaaaagcatgacctgaaattgtatatatcgacatatgtaatacagataaaaatgatcccagatttgcttctattccacgcgtggacagaaagaccgaacagaaacaaaccacggtgctagcctgacttagttttcattagtagagttatggatattttattttcttgtttgaaaaaaaatttttttttttttgtattttgcatgttcttttcaatatgtgtaaacatggttttctcactagggttaattcccacgttaaggatggttgtggggattcggctgctttgtgaggttcgtggcttggagctggagctcagaatgctgggctctgggttctctgcccttcttctaggatgtcgcactgcgcccgcccctcgggtgtcctgccgtgcctgcccctcaggtgtccccaccgcatccagccttgaggtgtcctgccatgtccatccctcagatgtcccctcagctcgctgacatgcacatgtgcaaacacatcactcaacacagagcacacaggcccatggccctcaaggcaagaggcgtgccctgctcgtctggtggagacttagttagcagatgcttccctggtaacacatgaggggcactggggatgaggagctggggatgagagtgtgagagggtcagaggggctgtgggaagagagaggtgggtggactctgcaggtcaccccagctcctaggct

SEQ ID NO: 104237 - DNA, 1001 bp, Homo sapiens
tctttgcaaatggaaaattcttggttagtgataaagaaaactactccttgccccatgtggaattggcatggatttttttgtctttatctttttttttctttttctcttttttttttttttttgagacagagtcttgctctgtcacccaggctgaagtgcagtgacgcgatcttggctcactgcaacctccgcctcccgggttcaagctattctcctgcctcagccccacgagtagctgggattacaggtgtgtgctaccacgcccagctgattttttttttttttttttgtatttttagtagagacggccaggctggtctcgaacccctgacctcaggtgatccacccaccccggcttccccaagtgccgggatgacaggtgtgagccaccaccacgcccagcctggatttcttttgacgtgggcctcctaggctttcattattgcagcgagagtcttcatttgaggggctcttgcctgcacctgtggccagcttgctcttccactgccgtcggggaaggcggccccgttcctgtgtggagagagaacatccgcctcgtcattgttcactgagagaatgtgagtggcaggcactgagcacttttcccaggtagcaggaggagctggggccacagggagtgggcttccacgcatcagggctcacagatgtgctgctcttggcgcctgcttttgtggcaagtgccttatgttggttctcttcagggcaagtggtcttcgccttctcacctgagccatcctggcccagccttgaggagccccctgaggtgagggtttccggcctctcccacccacccatcctctcctccaccccacccgtccttccctccaccccacccatccccccatcctccctccaccccacccatcccccctccacccaacccatcacccccctccaccccacccatcacccccctccacccacccatctgctccacattttccccagctcctcacctatttcagcagggagccccatgg

SEQ ID NO: 104238 - DNA, 1359 bp, Homo sapiens
gcctgggctgagctgcgctcgctaagacccaagttcaggagtggcggcaggagaagccccgctctcactgcctcaccgccctgcttatgtctccagataatcccgttgtaataaacttaattcctgccagtccgtgagaaccagcctgtggacctgttgcgaagtccacatcatgtgactgctcctattacactgtcagtcttgattaagatcccactctgaaatgtcaagctgtggtcttgtctgcgctccctgattcattcatatctttttataatcattatcagatgacacctctgtcactttggagatgtgtagctaggagcactggtgacacccacagtgaagcccagcaatttttgaagtgatttctcctcattgggagccacagacctaatgttgagcaaaaactgagctgtgtgtatttagaaatcaattgaaaacatcacattgctcaggctctgaatgcgcgtgctgagtctgcctattcttctcggtggcccaggctgctccgcttattttaagatagagctcatcggttgtgaaaatgctactgtgggccgggcgtggtggctcacgcctgtaatcccagcactttgggaggctgaggtgggcggatcacgaggtcaggagatcgagaccacagtgaaaccccgtctctactaaaaatacaaaaaattagccgggtgtggtggcgggcacctgtagtcccagctactggggaggctgaggcaggagaatggtgtgaacccaggaggcagaacttgcattgagatcgtgccactgcactccagcctgggtgacagagtgagactctgtctcaaaaaaaaaaaaaaaagaaagaaagaaagaaagaaaatgctactgtgtggcacccatttcaggagacaaggctcgtttatccggaagctggccttgcttggcagccagccaggcctgcaggggatgcctgcccctgcctttgctccttctgcaggccctgaaagcctggccctggcggcttgggcctgggggttgtccctggggctcagttgctgccctggcttctgcagcctgtgagcattccccatgctggggcggcttatcacaaagtgcaacttgcccctaccccaaaaaaacctgcctcccacaatcggcagcacacagccttgggcaggtgctggagttggaagggtctggcatacagactccggagccctgactctaggaccgctctggcttgttagcatgtatgttagtccattttcatactgctttaaagaaatacccgagactgggtaatttataaagaaaaagaggtttaatgaactcacagttccacatggctggggaggcctcataaacatggaggacggcgaa

SEQ ID NO: 104239 - DNA, 1047 bp, Homo sapiens
gcacgcatttataatcctcggaccagctctcccacagagggcagttgtccccagatcagagctgaacttgcttggagccacacagctggtatgtggcactgtgagtggaacccagggcagccgactccacgtctgggcttccagcttcgtcggctgccctgactttcctccatgtcttccggaaggccctcccaactgcctcactctgaagcagggcaccatgattctgtaaggaaatgagatttgagccacacgcctgtttgtgccacacacctgctctttcctacgttgcttgtagtgttttcccagaaaggtgggaagaaggaagaagggaaggagagaaggagggagagaacaaagaaggaaatgacgtggataatatcttaaacactacagttttttaatatcaaattccactagttccaaaatagaacttagctggataatattctgagttgtggctggaatttctgttctaccaaatggttgtctggcatgaaacgtatttggatttttatggatcaattttatcagtaacagtgctagttggacataagcaacatcagcctcctgtgtgctgggcccactagtaggcactgagaattcttcccacatctgccacagctctggcccctgtggctctttgccaaggtcagctcctcataggactagctccctccaggttcccagtaggaagatgggacctgtggagcctactttcaagcctaccccagaagctgtttactttcccatccatccacccacacacccatccattcacccacccacccattcacccaccaacccatccatccattcacccacccacccacccactcatccaccccatccacccacccattcttccatccatccatccacccacccatccattcattcagccacccacccatccatccacccacccacccattcttccatccatccgcccacccattcttccatccatcctgccacccacccatccattcacccacccacccacccatccattcacccacccacccacccatccattcacccgcc

SEQ ID NO: 104240 - DNA, 1034 bp, Homo sapiens
cgcattgacctgtcataacacaccagaggacgggtaccaccctcattccaatcgcacaaatgagaaactgaggcttggatacatcatccagtggtttgctctgtgtcatccaggtggtagctggaattagaaccccagttttgcaggctgcgtatggtggctcatgtctgtaatcccagtactttgggaggctgaggtgggtggatcacctgaggtcaggagttcaagaccagcatggtgaaactccatctctactaaaaatacaaaaattagccaggcatggtggtatgtgcctgtaatcccagctactcgggaagatgaggcacgagagtcgcttgaacctgggaggtggaggttgcagtaagctgagattgcgccactgcactccaggctgggtgacagagtgagactccctctcaaaaaaaaaaaaaaaaaaaaaaaacaggttagtgacacctgacccggcgccctttccccagcaggctgtagccacatagcccactcagtgccatctgcaaaaaacaggctgtgccccactgaaagcaggctctgccccgcagcccccccccggaaaatcactggatgcccctggccagccactgcggaccaacgtgcagcttcctcgtatggatcccctctttgttcacaagttactccattaaagggaaaggttagataaatgctgtgctttgagtcaatggagccaatctttcttttcccactggctctgagctttgccgcttgccccatgagtgctctaaacgccttttactacttcataatcacccgcattgtgctccatgctcaccttgttatttaaactcccataaaaggtaaaattaaaaaaagttaatagcctaaaacttgcttcttcgaacaacctaagaggacattttactcataaatgtaagcaaggaaacaggattccatttctctggttatgagacaaataaatatcttcccaaggctccaaagccatagtacccagcgacagcctgctcaccgcctcgtgctcagtggctctggggagagcc

SEQ ID NO: 104241 - DNA, 1044 bp, Homo sapiens
atccatcaactctgttgaccagttgtgatatgaaatagataggacgtatgttggtcctgttttaccaggggtacgcctgcagctcagagaggttaagtctgctccagggccaccagccagtaaggagcagagtggaaccacacctgaaaccaaatctcatgattcagacacctgagttagactcttcagatgggccttagaatatgttctgggcacaagggtcacatcttatgtcctggtatcagtcattgtacctagcacactactggtcatggcatgtatttgcataaattatttgatgaaggccgtctgggagaaagctgactttgcacatttcaggcaggggctgtggctgaactcattctgttgggacactgagtgccctgctgacccctgaggggcaccagcccacaggacctgcaggaaggtctgcacctgcagaagtatgtgagggagaccaggctgcctgtgggctcctcattctttaactaaggaggatttatgacccagccgcagtgataggaattcaagacctctcaacatgttcacattcaaaaaatcagtaggtatcgattcacattactgagttgactgaaggcagaggcagtatttattctgagttgtgttcctgatgtaatagtatttagattacaatattttctgtaattacttagaaatgacaatgcatactgggttagtgataaatcagaggcaatttaaataatgtcatcaggaatcgagcataaattctgtggatctcatctcagccaatgggccattgctttgaagggtgaacagtgtctctaacagccagcattgcccaggggaggtggggtgctgagggccctagctctgaccctggcctgtggcggcctgtcatctcatcccggcagctctgggtgcagctggcgagctctggctggagcctgcagtacggatcatgccaagggtgcagtggaggcaggactgcgggatagacatgactccgggcagcaacaggtgagggaggagagcgctcagccaggtgatctgtgactcatgaag

SEQ ID NO: 104242 - DNA, 1356 bp, Homo sapiens
cagcacacgacctccctgttctgaccctgagagcccaccaggacttccccttctctccagccctcattctgcaagcacaacctaggacctggtttaacttgggattctctgtcgtggaacacacctgagtggagcccagcaggacaggtgttcctcttcacttccattttgttcttctaaaattgagatggaagaggctcttttcaggctggagccatgcagagtctcaaagaggaaagaaagaagacctctgctgtgatagaaacccttaagagacagtgaaggaatttcacagacctgaacatcaactgccggagaaagaagtttgcccaaaaagtgcttcaaaaggtaaggaggaagcttatctatgagaacactgtgactaccacaaagaacacagaaggaggcacagagctggggtctggatggctgggacaacaaggaaaaccttgtgggtgcctgcagaagccaggctgaccttcgtcatcgggatcagaggtgtcagaagtgtgagcctgaaggcctaagaggtgttgcagcttctttaccattttttttttttttgcaaatggagtcttgctctgtcatgaggctggagtgcgatggtacgatcttggctcatgtcaacctctgcctcctgggttcaagcgattctcctgcctcagcctcctgagtagttggggttataggcacctgcgaccacgcccagctaatttttgtatttttagtagagatggggtttcaccacgttggccacgctggtcttgaactcctgacctcagatgatccacccgcttcagcttcccaaagtgctgggattacaggcgtgagccactgcgtccagcctagcttctttacctttgctgtgtcttcaaataacttttgttaagctctgcaaggcttcagttatgctgaggctggagggctcagatgctgtcttgcatggggagacctaaacgcagagtcagtaaatgagctgatctatgggcaaaatcaatgggaagcaaattaccttgacagagagctttttgattgctggacctcttgggaaatacagtatcatctgcatcaagggtctgattcctgagctctatactgttggaaaacgcttcaaagaagcaaacaactttccagggctcttcaagttttctctatgagctggagtgagggaccacctactttatggaaggagctgctggcagcaggaaagaccagaccaacaaactcattagaaggatgagccaaggtgcctcccatggttattgtaaactggtcagttaggaaacagtgactactttcaaatcgaagaaacactgagatgcaggaaaataacttaggttctagttagatacattg

SEQ ID NO: 104243 - DNA, 1024 bp, Homo sapiens
tcacgtttctgttgttgtagaaacagtcatttaacaaaatatttcatgagtattgaaatcacttgctgtgcatctcgggaatctaatcattgtgattaagcctaatgagcatgagtcacctgcacagaaataaacgggggggccgatttccggtgagaagtgcctttggaaccaagtccctacctcaggcttagtgcccccgtgttcccagtgcaaggctgttggatggacaggtgaaatgcagatggaaaaacgcaactcttttcaaaaatggagcggccaagagtggacgcaggctctctctgacaggccttggtgatggaagtctcactgtgtaggggctggagttctccgaagactctttcagtttcacaaggaagcctcaggaaagcagcctgatcaggtcatcccatgacaaagagaaacaatagctacagacagcagcaacttcctgagacaactgacccagcatacaacagacccaaggtacaacagacccaggagacaatcaacccagggtacaacagacccagcaggcaacagacccaggggacaaccaacccaggagaggatcgacccaggggacaatcgacccaggggacaatcgacccagggtacagcagactcaggatgcaatagacccagggtacaacagacccaggacacaagagacccaggggacaaccaacccaggagacaatcgacccagggtacaacagactcaggatgcgatagacccagggtacaacagacccaggacacaagagacccaggggacaaccaacccaggagacaatcgacccagggtacaacacactcaggatgcgatagacccagggtacaacagacccaggacacaagagacccaggggacaaccaacccaggagacaatcgacccacggtacaacagactcaggatgcaatagacccagggtacaacagacccaggacacaagagacccaggggacaaccaacccaggagacaatcaacccagggtaccacagacccaggagacaacaga

SEQ ID NO: 104244 - DNA, 1008 bp, Homo sapiens
cctagaatgtgctaagactcacggcagcagcacaagctgcctcggtgctgggctttccagaagcgggcctggcagctggcagcagatctgggcgactattctcgtctctccttcaccccggcgaatgtggtagagggctccctgaggctttgtagcgtttacttatttattaaaatggctggcaggaatcgggtgtggaattacttttatctccaactaggcgagcgggactcctctggaatcccctggtcctcctggctccagggaggctgagttccagctttgtatgccagcagcatcctgcgggacggtgggtctgggcccagtgggatggcagccccgcagtgattctccctggaagaggcctccctgtcccttggcgtgtcacctgccatggggtgagcctccgctttggaggggcctggctctgcgggtctccttccagcactgctcgaaggaggcaggagtggtggagctggctgcaggcttgcgggtgaagctggagacgtggcttccagggtattcatttaattagtcttgggtgagctctagccatgcgccaagccccgggggcagagatggtcactctcctggagctgacattccagaggggaggggacagtcagtcggcacaaagcaaaggccgaagatgatgggggagcagcctgggctaggcccctgtgttctggtgggttcttcatgctacccttctgtgtcccaacccagccgccacctcagaatgtcagggacctcccagaggtggtgagaggcagcccaagatctagctctggatctggtttccatctggggaggctcctccatccttgttctcccttccctgggctccctgtgcccctggccctgcacccagccggcatgtccattcgttgtcccaaagacatcttgcccgtcctctctctgtctgggctgccgtcacttgagacctcacacctgctctccctcctgaatgtagcagcgtcatcctcagtggcttctccgcctccaggc

SEQ ID NO: 104245 - DNA, 1031 bp, Homo sapiens
tcccactggctaaagcaggccacatggccaagcgcagcatcagcgcaggtgagagcgtgcatgagagttttcccaacagtcgcctaacaaccgaagtctcttatctcctggcccctttaatccagttccctatactacctggcatacagcaggtgcttattaaatgcttggcccactgctggactaaagtcatttggtttcactgaactcattgtctttttgggaattatatcacaagaagccttcacacccatgctggaagagccttttggccaaagagaagttctttatagcgatcagattgacctaaagaagagttttcccacataaaatgtgaattcattggcatgaaatgacacagtttcatcatacattgtctcctgagtagaaataggaagagtaaacacataccacacctttctcaaagggaatgagcctcgcttccagccaaaggcaggattcatgatcccatttctctgccttgattctctttagacagtcaccaaaaaattaattgccaagtagtctgcagtgtgtagacacagagggcttccagcccaggcctgatgttgatacctgctcatcagcgtgtttgaattacctggaccatcaataaatgcccggaacaatatgagcttcagggacatggaatccattcgccaccaggcagctggtggtcagcactgagcagggagatgggtggctagtactggatccgtgctcttctgaactttggtgcagcaaatgattctgcatgcattccagaaagtggccctaatttgaatttaaatcttattcatggtattcatgtggtggcatttggagaaggggacaccatgacaataccaagcaggatgcagggactcagcaaaagcaggcgcaggtgcctcccaagggaccacctgctcctgtaaaactgcagtggtcctgcctatcctgcttttggagatgactgcccctgatggtgtggcagggccagggccaggctttgggcttcaggaccaggcagtgccgggttgggcttcatcttc

SEQ ID NO: 104246 - DNA, 1038 bp, Homo sapiens
gcaagcccagtcctccccaccagggtgagcatctagggagggagggggggaatttagctcctgtggggacccccggggcccggtcacagcctccaaggccctcgggactccactgacactgccaggaaaagctgccttccacccctcctaggccatcattgactggcagatgggacagccaggcccccacgcccagtctctggttaatggtgggtcagggcgggtcaggcctgagcccctgacacggcttctcatgagaactccacccccacagtgagagaggactcactcgtgaactttggaaaactcccccaaaccacacggggccccacttgacagctcggagaccctctttcctctcacagccccgggaccccgggatgcccgtctgtgcggaggccctggggggtgatggcactggaggccctggcggagctgcaggctggtgccttggcatctcccacaccagagctgggctggaccgagccgcccgcttgctcctgcacagccgcaactgaccttcaagagcctcggcccttgaccttccaccatttctctgacatttagcaaacagtgccggccgcccctcctcaggtacttggccaggtctttgcgtggcccccaagagccctgtggacaagtggccccctcatcccctccaagagccctgcagacaagtggcccctcgtcccgggtgctcttcctgtttattctccagcggggaccaccgtgggcgcttatgtcggtttccagagacttccatgactgtacccaccccacactcctctagagctgtcctccagtggggaccacgggggccgtttctcccagcttccggtggtctgtctggcctcactcaccggcagtgtggaggctgggccctgaactcctctgggcacaggtggggctggtgttggccgcatatctgagtgtctgaaggcgggtggcgtgtggggctcctcttgtctctatatgggaagaggggcctggctcccagagggtgcctgcatctgccatctgagaaggggctcttgctgc

SEQ ID NO: 104247 - DNA, 1581 bp, Homo sapiens
agtgtgaatcacctctaccctgtgtagcccaacaggcttctcacttgaccatgagcacttactgtattccctgggaatgagcaaggtgtgtagacagatgggccaccctggaagtgggcatgcagccgatgggcaaacagggtccccacatttgctggtgctggcggcttgaccctagggacaggtgtttttgtgcatttcactcttgggaggaattgtgctacctttggacctgctgaccctgcttctcatgagtgaccaaagtccttaactctgctctgccctggttttttcttagaccttgagtttttcactccagaagcaggttcctggctttttttgtgtgccatgggcctgtttggaagtctggtgaagcctgtgccacccatctcaggacaaactaaaaatacctgatgaagaagatcaattatatccacatgcagttagcaaatggtaaaaagcctatttttgatacagtaatgtgttttctttatgaacacattacatacaaagtctagtagtgggacgaccataatttgaagtaatggtgaaaataagcaatagactgagatagctacaagagctgtaatgtgatatgaaaatacctgtgctttttgttggtgacaaagtcatagttatggctgaagtattgtgtttactgcctacatgcctaactgaaggcagtgttaaatttcgtttagagacatgttaaatgctcactttctccatccaaagtcccacacctcaggcactgtggggactgtccccgggcagaaggcaccccctctgtggacagctttcctctggccctggtctgagctacactagccttaaagcagcagtttgcaggggtttgggggaagacacacccacccggcactgtggaagtgcagctctttggccaagtgccctcctgcctggacacctggccatgcccctggtttgtttcaccttctcgggaggatgtgggcatccttctgttggttcccaccacagttttttctcttctgtccagagactgggcccaggaccccctcaccctttctggcttgcttagattttgattagcattttgattcccaacacagtaatggtttcagtatttgtaaagggtttttcctgtcatgtcaatgagaaccctaggtgtctcctcctgagatgtgtgttggttttatctggttcaggtgttcacactgccatctggagctgacttcccaatggcacccagggcctctttggtctgcactgttaactcactcttcggaagccctacacgaggttcttgagtttgcagctgtgattgcttttaaaagtgtaagcaatgccacatgcatttactaacaggaagccttggtgcccggagaagtgtgatggtggtcccccaacattaggtatggaggtcctcctgtcccacctgttgaaagtgaattggtgggcctgcctctatttatgaactttcttttttttctcctttatcctctttaattctctttacagaaggatcttccaattgtagttcttaaatattcccttggtgaacgtagcacacttttctattttcagaatttcaaatgatatgca

SEQ ID NO: 104248 - DNA, 1030 bp, Homo sapiens
cctagtgatccacgcgcagttcctcaaagaaggtaattgtccccgggcgcgcggaccggtcctccgcgctctgcccggctcgcggcggctccggcgcccgacccggcttccagcacgttccgctgccgccgcgctcggctgaggctcgtggagcgccactgcgggcccggagcggccggcggcgcgaccctaccaggagcccgaccccccgcggatctcgctgccccgcgcccatcggggctcaccggcagggcgcggggtcggggcgcgctgcgttctcggtgcctctggcgccgccccggatccccagcccaagccgaggctgccgttcccatcccctgccccactgggctcggtggcagcggcgcccgcccgcacgccgccgggccctcggtagatggcaccagcgctccacggtggccggccgggctggggcgggagcggagctgggacccgccagggtgggcgccgggctgggacccgcggacgtcgggaaaccggcctgcgcacctgttccccagggcccaagccgccttccagagacccataggtttgggaagcaggggcttggtcaccggggtgcgcaggtccccgcgccaagttctgcccctgctctcttggtctttgctggactgcagggcagtctgggactattgaggcgcccaggataacggttggaccctcgtggctggagaggccctttgtactgggaagcatcttactgggggttgggggcagggccacacctcccctgatgggcggtcggtcggctccaggcaccccagacacactcctggaaacttcctggtttcagggccaggctccctttgcagggctcccggtgcaccccgggatcagcctggcctgtcatatcagactgggggcaactgaggcgttggcctccccccgggcacccctgctcatggttactagtgctctggcacacaggctgggccagctccgcctggtgctccccttggtccgctgggaaggctgagcaccggagggcgcctgtgtggctggtaaggcg

SEQ ID NO: 104249 - DNA, 1017 bp, Homo sapiens
aggtgtggagcaggcctcgcttagtggagtactttttgtggatttagcccttcacagagatctccatgtttaccttgaagcagacacacgtgtgtcggtgttgtggaagacggcgcagtcataggaaggtgggatgaggatggggtcagctgtacgctgagggcacaggtacctttggaggagcgattgcgggtcccagtgtttgcgcagccctccaggactcctgaagtcctgtctccctgtccggaagcggtggccttcaccaccctgggttgagccctgctgcctgtctgtctggaaggtcaggacttgggcagcctccctgtccttgctgagacggccttttggccccttggcatcaggagccccaggggaggcctgggggaccagcagtgagaggtgcagggaggggggtggccgactctggttcctggctgatgggctcggcctggggccactctcctcccagcagccgctgtccagcaggagggagggaacaaggcaggcgggtggacaattgtgacttgttgtctgggcctgagtgggaaagagctgtttaaatagccattttcatgaatctgttttcttcaggggtgaagaatgggggacccagggagccgtttttccacacttctccttttgtgtggagatagaggccaccccgtggctaatccgtccccccctggccactctggtcttccagtgtttgtggagatgaatagggctgtgaaccgagagagaggcaaattgcggtccataattgcagcctcggtatgtcccagctttgtgagaacaggtcctgcccaccgcaccaggcctggctgggcagccacaggcccaggaagaaagcagggccgcagcgtggggtccggcactggggcctgggcagctgctcttcttgccttgtcatccttaggacacgctgaccctcctctgggaggggagagccgtcctttcttctgaactgcctggtgtgtgcacgtgctgtgtctgcatggggtgtagttaaagtggggg

SEQ ID NO: 104250 - DNA, 1045 bp, Homo sapiens
ctctcagtgactaactcggtcctgggaaggttggttcttgcctgccctcctgctcagaggcctgagccagtctagagcaaggaagccctgtgctcccgagaaaccgagcagaaacacagttttctggggcatttgtaggagatgcaggtgcggggagcattcctggagcttccctggaatccctcctgtgtgttccgtggtggtcccaggggtctctcagaaagacacctacctggggacagagggcttggctggctggatcagggtctttgtggtggacctgtctgtggggtttggtcctgagtcctggaccagggcctcttcagagctagctgagtggggcgggggggtctgtaggagggaggcgtccctgcagccgtcggaactgagatgtcctccgggaatcccgacaggagccgcagcagacgcgggatgggaggtgcccaaagtcacgtccgcgaacagtgtcacctgggagacgccatcactctttcccagcttgacgtcctgaggccgaggccagcccaggaccccacctgtgtccccagcagcctggtgtataaagcggagcattggagctgggagaggagggctgcagaggctgagatgcagctggtcgggcccagcccctccattttgcagatggggaaatagaggcacggggcaggggagggactggcccaaggccatatgggtctcaaattactgatggtgaccgatgtgaaggggacgtgtcttttcaggcagggagactgctgtgggcctggcaccaggtagaggttctgagctggctgtctgggctcggggggtgtctcagggcacaggactgatgggggtggctggggtcggggattagggactgctgggttgaggagggctagtgccaagttgagagaaacatccccttggcccagcaccccaggtggctgtgttggtaccaattgcttaaaattgcaccttcattttgcagctcctgttgggcgccttctcaccgcgcgctcgggtgcagtgaactctgggagccgtcgcagcccagggagtcccc

SEQ ID NO: 104251 - DNA, 1033 bp, Homo sapiens
cattaggtattttttgatttttggaattgagccattctgggaggtgtatggccgttacctccttatttcaatttgaagtgtcctgatggcagatgatgttgagcaacttttcatatgcatatttgccatttttttggtgaagtgttcattcagatcctttgcccatgttttaattgggtcgtctgtgctcgtattgttcagcttaaaggtttccttgtgtgccctccagataacaattcttcatcgcatttgtgtttgcaaataacatctctctgtctgcggtttgtcttttcatcctcttcacagtgtctttgcagagcagatgtttgtaatgttagtaaaatctaatttatcaaatggttttctttcatagagtatgcatttgatgcttatctaaaagctcatcacccaattcaaggctccatagatttttctcctgtgtttatttctacaagtttcatattattgtgtttcgtctttaggtctcaggtccactttgaagtggtttttgtgaaagtgtgaggttggcgtttagataccatttttcctttttgcctgtggaccttccagctgctccagccccgtgctgagacctcctgtcctccgtgggattgccggtcttgtgggtttgtgtgggctccgtggatgttggaaggatggccgcggggcccctttccttcactgtggcagcagcccctcctggtgatcctgcagcttcctctgtttcctgtaatctgccgggatacacaccaaggccagaagacatgatttccactcggcttggcattggcaccacgtatgtgtgtctaaagaaggttaagcagaagaaacctgataatagttgaatttttctggaagttcagtcttttctgtaccatcctggacctcccaagttggctcctcccaagacaggaaagtctgcagtaagagtcttggtacagtgaaggatgtgttgtctccgtcactgtccccggagccagcacgtgcccggcagctgcaggtctgggggtggcgggggaggcagccccacagg

SEQ ID NO: 104252 - DNA, 1041 bp, Homo sapiens
gacacctgggctgggcctgaccctgggcagaccaccaccctcccctggggctggggcgctggtgtcctggccccctcgaactcttgaagcctgcccgtggaaggcccactgcacgtgggatgcatcgtccacgggcctacagggtttggaaggagcacgcctgctccactcgtgctcctgccttgaacccaccgtcactccttcccatgaggatggggacagcttatgcctgctccacaaggcccccactccgtgtgattcggggacagagagctgcagggtcctgggcaatgggaccccaggctgtgctgcccaggcacgtcccatccctcgtcctgttgggcccctctgccaagtgcaggcctcccggcactgactttcccatccgaatcactcccaacaaacttgggtggggttttaattttttttcgaattctgtcatttttgagccgaatgactcaaatgactaataactgtctggcgtggaggaaaaggaaggggagggctgggaggagctcctgtgtgaatttgaccttgatccagcacccactctgcagcctcccaggcagaaggcccctgatggaagctgggacagatgtggggagagcaggggcaagcagggagcaacctccttatccccacagtcatttcaggagcactgagggctgggaggaggggccgtggtggggcagcctaggcctatggggtctgcgggcccagagctgagtcaggcagcgtgtggtggatctggtagtagctggatgcatcagtgtggcaatccaggaaggcttcctggaggaaatgggcactgtgtttaaaggggaggccacacccatctgtcattgtgtactgggcatggttgtcatccaggatgccccagggtccttcagcagcaggcatgagtgggggtccactccacatccagccctgcccagaccccctggctgctcctggagcaaaccgtgtctgaaggggctggcaggatgcagagtggacagcagccctcactcttctgcgggaaaagcttttgtgtgcttcagt

SEQ ID NO: 104253 - DNA, 1015 bp, Homo sapiens
tgagatggagtctcttttttttttttttttttttttttttgaagatggagtctcactctgttgcccaggctagagtgcagtggtgtgatctcagctctctgcaacctctgccctcccgggttcaagcagttctcttgcctcagcctcccaaatagctgggattacaggcttgcactgccatgcccagctattttttttcttctatttatagtagagatggggtttcactgtgttggtgagtctggtctcaaactcatggcctcaagtgatctgcctgccttggcctcccaaagttctgggattacaggtgtgagccactgcccacccagcaggttagttctttcaaagataaatgaaattgacaaatctctagctaggctgatatgagggagtagagagggatagagaagaaggaaagtgaaggaaggctgaaattaccacatcataaataaaaggggacattagtacccaccatatgaaataaaaaggttaaagggatactatgaacaattgtatgccaatacagtagatagtttagatgaaataaacgcattcctagaaagacacaaacttccagaactaactctagaggaaacaaacagtttgaatagacctatgttaagtaaaaacaaggaatgagttatcaaaacttcccaacaagaaaagcccaggaccagatggcttcactggtgaattggtccaaacgcttaaagaaaaattaacactggatcttctaaagctcttccaaaaaatagaagaataggggccacttcttaactcactctatgaggttggtattgccctaataccaaagtatcagacatcacaagaaaactacagatctatggatacggacatagatgtcactttgggtttcgtgcattcccacagtacgcctcatccctgaggcacgtgtctctcctgcagcaccaccgtgatggggacagtgacatccatgcctgcatctccagcacagacctgtgccctgagtatgtaaaggcgctctgtgaatgtc

SEQ ID NO: 104254 - DNA, 1048 bp, Homo sapiens
aaagactcggggtgctggttgcattgctgcagcaggagagactcggggttctggttgcattgctgcagcaggagagactcagggttctcgttgcattgctgcagtaggagagacttggggttctcgttgcattgctgcaagcaggagagactcggggttctcgttgcattgctgcagcaggagagactcagggtactgcttgcattgctgcatctctcaaaagctttgttttgttgttggttagatttggcactgtgtagtcatggccatgtggcttcaggttctcacaggacacagggacatgtgactgatgaggtttcaagagaggaggattggatgagtgggggattgcagcttccctcctcccgacacctgggaccctccactcacagagagaatgagcttctccagcgtttggaggagagaggagaagatgggctcccctgcaagtccatagaagcctccgtggctttctggattaatgcagccacacactcactccttgcacagcctctgcccagtgtccagttttacatatgctttggaaataagaacaactgtcaataacaccatgacctaaagaaagaaacaagtaagcgctgaaaagcactggggaaagccccctggggctcaaaggagtggaagcccgtgccttatcctctgagccccagctatgacagtgacctcctgtaatgcacaaaaagccctggacttccttctcaggcctgggtctaaccgtaggacttagaaactagtgatcagagggttcacaggcaggcagaggtggaatcctacccacccagggggcatcccctgctcggtcctgcagagactcagctcccagcctgcggcatggcagggaggaaaggcagtgggtggaggtaagtttcacagaagaggcacagagatggcagaagagcctcttagctagagtaggagtaagcaagagggccaggggcgcaccaggaactgtgttcttccgttcagctctcattcccaaaggagcagaaaactctgcagcttagacagaagtctgacctcccaaaag

SEQ ID NO: 104255 - DNA, 1049 bp, Homo sapiens
aggctgcagcccagcccgcctgagacacgacgcctgccccaggggactgtcaggcacagaagcggcctcctcccgtgccccagactgtccgaattgcttttattttcttatactttcagtatactccatagaccaaagagcaaaatctatctgaacctggacgcaccctcactgtcagggtccctggggtcgcttgtgcgggcgggagggcaatggtggcagagacatgctggtggccccggcggagcggagagggcggccgtggtggaggcctccaccccaggagcaccccgcgcaccctcggaggacgggcttcggctgcgcggaggccgtggcacacctgcgggaggcagcgacggcccccacgcagacgccgggaacgcaggccgctttattcctctgtacttagatcaacttgaccgtactaaaatccctttctgttttaaccagttaaacatgcctcttctacagctccatttttgatagttggataatccagtatctgccaagagcatgttgggtctcccgtgactgctgcctcatcgataccccatttagctccagaaagcaaagaaaactcgagtaacacttgtttgaaagagatcattaaatgtattttgcaaagcctaaagttatatatttaacagtttttatatgttgtatatttgtagaaaatcctatttaacaattaacgtggcagtcccggccgtcctgagagtcgggccgagccccgtgtgtttctgaagactctgggggtgggacacggcggggaggtggtgccccgcggaccccggggtgccaggcacggaaggcgggactctgggagaagcgtgcggaggaccgtggcgtcggcgtcccggatgtgtcggtcgtgcccggggaggccgggttcccctcgctgcgggccaggcttggctcctgattccctctctggtccctgtattggtcaacacttgagcgtacaatatcttgaacatgcttcttccaatgggttttgtttcccatttcctgcccctttcgccactcacggaccttgaggccagttgacg

SEQ ID NO: 104256 - DNA, 1018 bp, Homo sapiens
ctgaatgagagctgcccgtggctgctcagtctcccccgcacctgtggccaggcagggaaaacccggcctcggggggcgggggcgcccactaggctgagacacacacggtgagagctcacaggccaggcctactcccgccaaggcatctgagcctcccagggcagggtgtcccgctggctgggcctctggaggcccggcctgtgggggctgagctactcctgctggggccaggctggtccctgccttccgctgggcccctgccgcatggggtacctctgccatccctggagcggaggggagctccgaggagggcacgctgttgtctgaattctctcaggtatcccatcccaggcagcgggaaactcatcaccgccctgggagaggctggcaggtatcgatccccatttgctaatagaaaacacagctcagaggcggaaagtgactctccaaagtcccccagttcataaaggctggaattaataaggccagatagataaaggaacacttagaggagatcccggaggtgcagttgctctgtaacctgcaaagcccttaccgacatttaatttttattagttgtattaatatatgagataccgaaggaagacctttgtaaattaggtgcagaactaaagtattagttatgaatatacatgataataacagaaatagatgagttcacagagctgtgagctgggggtcaaagcccaggccctggtcactcagcctgctcaaaccttttggtggcctcagccactggcccttcctttttcctcctgggccttagtggactgactttttccagcttgctttgcagatcttacttggctggtgaatgcgaacaaggagtcagtgccatccccaaccctgacccctaagtctcaccaggagctttcagctccgtctctttccatctgctggctgagccccgagaactccagggatggcgaggagcccgggctgcatgggaaggaggttggccctcgggatgaccaaccaggggtggacgacactgccc

SEQ ID NO: 104257 - DNA, 1063 bp, Homo sapiens
cacacaagcgtcagtaatccacaattgaatgatgctgccattcacaaagatgaactaaggtcattatctaccctattaaggtatttacaacacgtgccttccaaggagaatgtggctcctcccactgtcccattgtccaggccagggtgatctgagtgttggaatcccagggttgaggggagtccaggactggcctccctcctctggctgctgggcaggctgatggatccaggctgattcgcagaagatttggaaaagatgagagctcttagctgctttctggtctttgcagcaaaaacctgacctgcaggctttcttcaggcttctccagaccgaccaggaggaggtcatgcatggtcaaggtcatgtctcagaagaagcctcttaaaagaaagttggaagggtgggttttcataaatatcttttggtgaaggcagatgctacaagtctctttgaaaatgaagacttcttttcctgagaattataagaaaagatatgaaagatattagtagattaacttacaatatagaagcccggaaaagccattgaaatccacgggtacaggcacaaggaagtataggacaatgaggtgaaatgagctgagatgatataacaactataagagggagaaaagaaaatcccagcctgctatcagcgctgctattactagttttgacaagagaaatatgctttcatgatgggatattgtgttttcagtgagtctagtaatgaaatttttaaaaacccagtgacgatccaaattttagctaggaagcctattattaaaattgataacaccagcctaatgtattctaagttatgggtacaggagatgataaatattgagcatttgcattgtataaaaatgttttagtagatggttttgtagtcaggaagattagctgactctttgattggctgctacagagcaggagaataaagataaatgctgtaaaacgcgtatgtacctcaagggaagtgtttgaaatgataaacggcttccttgtactcctcaaaagcatttacttctaatcattgcatcccatttcttatttggacctga

SEQ ID NO: 104258 - DNA, 2066 bp, Homo sapiens
ccaccctgactctgggcttggtgtgtgcatgtcttgtcactaagcaggcactgggaaacgttttggaggtggaggaggaggtgatggtttttatgccttacttagctccccgtatccccaagtcggggaggggaagggaggggtgcactcctggcctcgggcctgtccctgcacggggcccagctgtcttggtggtgctgagcagggcccctttctatcggagggcagtgaatttgttagatgattacatggagcctgctgaaataccatgtgcaagcaatgattttccgcttgtttttccttttaaaaaggcagtggcttcctaagtccaaaatggttccccttggtattgacgaaactatagacaagttaaagatgatggaagggaggaattccagcatccggaaggccgtgcggatcgcttttgaccgcgccatgaaccacctgagccgcgtccacggggagccgaccagcgacctcagtgacattgactgacggcccggccgccagcgcgggtcttgtccatagtgttgataagctgtacatgtttgtatattgttcaaaacttaacttattctgatttttagttatagctctttaattctttttccccggggaggggggaggttttatttccaagttttctaggaacccatctccgtctgggcgctgtgagtggggtgggcacgtccgggcagcccagtgcgtctgtcgcacgtccccaggccgtgctgctggcgtcactttctttgatatgtagctttttcttaaagacttttgaatgtttaataattttgtaaatcatgctctttacacagagtaccacttatttaataagacgggatgtaaatttacaatgacaaatgtgtattttaagaaagaaaatgacattattttgaatggtactttgtggaaagaggggagaataaagttatgctgtgtacatcacttgcagatcaccaaaaacactccgctgcccgtgaccgccggtgggtgtgtccccgctcccgtcgtcccgcccacctcaaaccccgcaggtgtgcctcccagcggattatttattgtagaaagtgtattcatttgctttataatgaaaaatacatttgcaaaggtatattgatatgcatttttatacaggcacataaaaattcaacttggcttgggagcagaatgcattgcattgtataaatgactctggcctgtgtgtactttgattttataacttgtaatcttttgtttacaatgaggggctttctgtaacttgttttaatttagaacactttggtagcaatagaaactttggatacatttttgtatggtacctgtgatgtatatagaattagtactttatttttatttttaagaggtaaagcattatgttggggaaagtagggtgggtttccaaatttgcattttttatattaaaaataaagtcaagatttggacggtgtggccattttattcctacagccctagacggctaggtgagccccaaggacgggtggggtgctggctgcagggggcggggacacgcctttatcttgaaaactgtcatgggatggcattatttgttatttcacctgatcatatttttattttaaaacttcagttacataaaagttttaaatgctttttttaagcctacaccgtttgtaacatctccatagaaacttggaaatcaagtcttccttagatagttgctgtcctgcatctggcaggtgcttcctatctgtcgtggctctccttcccacagccagccccgcccggcaggcccctccccaccacgagcagctggtggcccccaggatcactcaccgcccacgcagaaaggaagcccacgcagaaaggaagcgggtgcaggagccaggtggggacaggccgtggagcactcagggctaccaccgagaagcccagctaatggcgggtgcagtttgcaccccttctctgccacccacagcctgatcgtgctgtcgatgagaggaatctgctctaagggtctgagcggagggagatgccgaagctttgagctttttgtttctggcttaaccttggtggattttcaccct

SEQ ID NO: 104259 - DNA, 1057 bp, Homo sapiens
tagcctggagggcaggagcttccctgggtccgtgggaggctggtggccccaggtgggctgcagggacagtggggatgcaagggcctggaccccacaggggaggcagtggtgctgccggggtggctgagaaaggcctgggagctgggctgtgctcgggggacccaccctgttgctgcaccttttgtgggggggcggggcgtgccccgtgtcctgctgacgcctgtgtcctgctgacgcccctctccgcagaagtcggccagagcagcatgtggatctccactgatgccgccgcctcggtgctggagcctctgaaggtggtgtgggccaagtgcagcggctacccctcctacccggcactggtgagtacggctctcgtggcgcctgcgggtccagaggaggctcacacagctgcggggcgggggtggtccgaggaggctcacggcggtggtccaaggaggttccacagctggcgggggggcggggttggtcagaggaggttcacacagctggaaggggcaggggtggttcggcgaggggggcgtgggggtggtctgaggaggctcacacagctggggtggggaggcgggggggggtgccagtgacaggtggggttgtttatgggtgtgagcctcacaatgacctcagcgggtccttctcgtgcagatcatcgaccccaagatgccccgtgtgcctggccaccacaacggcgtcaccatcccggccccacccctggacgtgctgaagattggggagcacatgcagaccaagtctgatgagaagctgttcctcgttctcttttttgataataagagaagttggtgagttgagaggccttagactccggggaccggctggggtggttgggggccgtgggctcggtgacctgagtgtccctgtggtgagcagcgtctttgtctgctgggccctggcacagctaaagtcggaggtgagtgctccgctgtttgcctggtggagaagggcactgcccagccccctcgccgggactgtgggacgggcactgagcaccgggtctgtctctgcccgatggcttcctctc

SEQ ID NO: 104260 - DNA, 1049 bp, Homo sapiens
tgctttgtaagatgtgttccaagtgtaacgtcgttgagtcatgcttcagtgtgccctggttgtgctgagctcagggcctgcccgcctgtgttccaggtctcaccaacggctttgggggtgcgaggagcgagcaggagccgggcggcggcctggggaggaaggccacaccccgacgacgctgtgcctccgagtccagcatctcctccagcaacagcccgctctgcgactcgaggtgggcaccgcggccctgcgcttcccaccacgcagctcccagcaccgcccgccccgcctggctgtcctggaagccgggacattccagctcccatcttagtgttctctgaaaaattctggcctgggattcatgtgtgctctgcccttgtggacagtttcccatgctgcatattaatctgctttatagaattcaagcagaagtaggaaaaacactgcgtgaaataggaacacaattttagaatctgcaatgaagttttacacttgatctttacctcccagaatctggcaatgagcacagccctgcctgtctgccctgtgaaggccactttggcctcctgagtcccccctgccacaggttcactccctccagacctgcgcacccacaggcccgtctggccgcgggggtgtcaggcaggatgcgtggccagcttggtggcggacagctcacgggacgaagcccgagtgaggctgaaggcaggggcggggcgcctgactccctctgctcttcctcccgaagctttaatgcgcccaaatgtgggcggggcaaaccggctcttgtgcgacggcacacgctggaggaccgcagtgagctgatctcctgcatcgagaatgggaactacgccaaggcggccaggatcgcagccggtgagtcgcccggacctgcctccatggctctccacacctcctggttagcgtcttagggctcgactgctggggactggactccggctcagggagcatggtgccctgtgtggagccccaccctggccaacctcccggggaagggttcatcacacaccgaggggctctgggctgtg

SEQ ID NO: 104261 - DNA, 1974 bp, Homo sapiens
ctgccggccgtggggctggggtttgaggcggcctcccgtcgacactcagcaggatgctcacgtggtggtttccaccaggtggccccacctgaccgggccctgccccagctgtgggctcccactgtggacagttttgccggctggcggccacgtcctcagcaacctctcaggctcgttcatcagatgtcccttgtagaagagcacgtgtcccctccgggccactgtcttacattggagtggagtgttttgcgggcttcccgtggtgacggtggtgtagagcagtcttactgcagaccttcagtgagcgtggcccatggtggcttttgagaatcatggtgccctctgatcctgactgaagtggagatttctgctctctcatttccgagtgacagtggatttccgtggaggtgcggtgagttcctgagctctctcctgagcagccgggagcctcagcagcattaagaccaggccctcgggagtgggaggcattccactgctgtggccgaggcgcccggggaagggctgggcgtgctctgaatggtgccagtcccgccatccgccctcgctttggtttcaccggaaccttctggtgctctgcacatgggggatttcttgcccagagctgcagttcttcgcagtcttaggacaggaattatccggaaccttctgatgttttccatacatgcatctgtgtgctctgaactttagggagttatctggcattttccagcacacgcacaattctgagttaggctgaacagggtcgctggtcctgaggcgacgcactcactgtgggcctcctgcccgtgtcgcccgcgggccggctgtgctgtgcgccaggcttctgttcctgcgatggcccagccccagagtctggccctgactcgtggcttccttcctccgtgactgcacgctcaccagcagtgaaccgtcacctgaagcggccttccactcgccgccgttgcggagacccctgctgcgagtctctgtgtgcacgtgctggggcgtgtgagagcgtgggggtgtctttgtctactcgccgccgttgcggagacccctgccgcgagtctccctgtgcacgtgctggggcgtgagagcgcgggggtgtctttgtccactcaccgccgttgcggagacccctgctgcgagtctctgtgtgcatgtgctggggcttgagagtgtggggatgtctttgtccactcgctgccgttgcggagacccctgttgcgagtctccatgtgcacgtgctggggcgtgagagcgcgggggtgtcttcagtgtccttcggctgttcagggaggaggctgagctgtcctgccctttcattcagactaaatggctttttcactgttttccaggttctcactttaaccactaatgtgctgggtagttcactctttggaccctaatcattttctcttacctcaacttggactggagttctgctaagcggccgttttggaatgcacaaagatcactgcatcttgcctttcacttaattcttgcggatcacattggaatcatcagctcaaacatcctctagacaaaatcacaaacagcagccctggaggagctctcccccaccccagcccaccccctctgtaagtcagagcccggcagtgggaatggtgctggcgcccggtgcacgcctggagctggcgggatgtcgtggcacctcagccttccctctggacagtcacgaaggacgcagaggagagcccggcaccgactgggagcctgctgcagctgacgacacagtggacagcattctgaggctgtcctgagcatgtgcggagccgtcccatagtgactggtggtttgggtgtgacggccatgcccaggcgcgttgtgctgtgtctgtgccatggggtatggaggaacttggctcggcactgtctgaggatgtggcatggacagtgcgtgctcactcactcgctagcatcttctgtatttctgggttttctacctgatttc

SEQ ID NO: 104262 - DNA, 1098 bp, Homo sapiens
tttgacttaagaccttgaccagagatcagatttaatgttgccttccttttatttgctaacttcgtggcccagtagagctctgtgggaatgcccgtttaaggcccctttagttatgtgagataccttttcttcctcaaggtaagtgaattattcattgcagaaactgtcatgaactcgagtgacgtgtttaatattggcgcatgtgaaataatctttcacagtttttttcagagagtaactgtgtgcctgggcactgcacccagggccgcagcctttggcgttagggaagcacacacagtgtggcccgagcccacggggcccacactgccgagcagacagtacatgcgatgccttgtttccttaactgaattagtattttggtggacttcacatttatagtaagttttataatagattttataatcttcagttttcaaaaatcactttatttataattttttcaggagataaatctccccctaaacttgaaccatcagatgcattacctcttccttcaaactcggagactaattcagaaccaccaaccctcaaaccagtagaactcaacccagagcagagtaaacttttcaaaagagtcacatttgataatgaatcacatagcgcttgcactcagagcgcactggtaagcggacgccctccagagcccacccgcgccagtagtggcgatgtgccggcggcggcggcctccgcggtggcggagccagcaagcgatgtaaacagacgcacttctgttctcttctgcaaatcgaaaagtgtaagccccccaaagtctgccaagaacactgaaacccagccaacttctcctcagctagggaccaaaacctttttgtctgtagtccttccgaggttggagactcttctgcagccaaggaaaaggtcgcggagcacatgcggagactccgaggtggaggaggagtccccaggaaagcgcctggacgcaggtaaatgccgcgggcggccctgagaggcgcccttgccgaccagtgcctggagcgtccttcaggatcattggtgtgacgggggggggggggtgtccagcttctgtttttgcagcattctcttaatttccagagaaga

SEQ ID NO: 104263 - DNA, 1009 bp, Homo sapiens
aggacctcgcatggttggagctgcttggccctccgctgtggtgagcgtggctcctcataacacccaacgcttagcaggagcctttggagaccatttttgttgctttgtagctctggaatcattttatttttattttttttctggggccattgtaaggaaaacacaatgtgactgagacacaggtggcctcgaatcacctgttacacccaatgttcacaatgactcaattgatgaaaagggcgtttcctgtgagctgatgggaaggtgggtggagaagcaagtggcctgaaagtccactccgaggtgaggcgggtggggtcctgcccctcagagaagttgggggtctctggagaggtggggcgggcggggtcctgcccctcagagaagatgggggtctgtggagaggcgagtgccagactggaatggggaagtcattagggaagacagccacaagcaagcttgttggttggtatagaaatgtgacttacgatacttataataggatgaaaaccaagaatcagacatttaaaaacccagcatgaacgttctcatcagtaaagcctctccatcatttttcttaaatataaccacaatattttcacacctgaaaagagtaattcctcaatggcaaatacacagtctcacttaaactgtaatttaacagtctgtgtgttgtgtttatattttgcttccacttgaagcagcttgaacaaggctgtagccgttgagtgccaggcccctgagactttagtgtctgaaggaaggagatgcctcctgggctgcactgttggccccggtctgccccttgtacaggccctcccgcaggctctgccgtagccgcgactcagtctgccgagtgcagaggttcgggctgttgctgtgagctggccctgccagggctgacttccccggggctgcgtgtcagctgggtgggggccacgccacagctgggattccagcctgtctgatgagcctgtgggacggatctgcagctggcagagggcttgtc

SEQ ID NO: 104264 - DNA, 1051 bp, Homo sapiens
tgatgtgttcccagaaggtgcgtgggacctgatgactgacagcatgtgtcctttggttcagtggacaggttgctggaccccgccaacagagcccacctgggcctggaggagcagctgagagagctgctggacatgctcgacctcacctgcgctatgaagtccagcggctcccggagcaagcgggcaaagctgctcaaaaaggaaattgcccttctccgaaacaagctgagccagcagcacagccagcccctgcccacggggccaggcttggaaggcttcgaagaggacggagctgcgctggggccggaggcgggcgaggaaggtaagccacggtgagggctgccccgctttcttgccgtcacggctcaggctcaggcacaggcacaggcacagacccagacacgggcagcagcgttggtgtgcacggaggctcaggttagcgccagttccgtaaaattcacaaatcccggaacacttgattttcccactgggctgttgtttccttttaaggagacgttatcatttgtgctgtctgtgttttctcacataatcagttgataaaatttaaggcacagaataaaatttttctctttaacttgggcctgagaaactatttgaaaagaatggtttagatcttacactgtgttgaagagtaaaggtagcctgaatgatgagagtgagaaatgtttttgttgcattttgtaaattggcggggagccatttaattgtgcgctaggccatcaaatgcagcattttgaaagggctgttttagattattggcacttaaacactcctccctgatgttgtgaagggagggacggtacctgcagaggccttgtctgccccgagggtccccggccagctcctctgcagagttggtaggtagcagccgtgatcgttgccaaagaatgtctggggaaaggtccaggcagcaaagatgtttttatgactaagaaataaatgtaggagaagaaatccgcctatctagaaggagaactagcaaaacccagggcaaatgcaggcttggcatggtgaggagggagtttacgag

SEQ ID NO: 104265 - DNA, 1027 bp, Homo sapiens
ggatgaaaacccccaactaagctgctttctgggtctgcatcgtcgagaccggccaccccatagggagccacagccacacagtcctcttggtgggcacccaaaacgcagccagtctgaagtgacaggtgctgagcgtaaaatacacatcagatggcaaagaaggtgaaaagcttatatatcctcagtaacgtttaccgatcccatgttgaaatcaactcttccatacactgagtaaaataagacatattattaaagtaaattccacctgcttcttttccatttttcagtgaggctactagaaaatgtaaatgatgtatgcggttgcatgctagtggctcccggaccatgctgatagggagctggcaacacagagcaggacagagtctgctagaaagagcgtcttccacctcctccggacacggcgccagttcttaccgtcttcccaggagaaaggccgccgcggtgccgcagcaggccgctcaggcaggtgcatccccgaggcctcttccaagccgatgctgtccacctcgcgccgggcctgcctcagaacaacacctccctgatcgcgcagcctcaccgcggctctatagaacacggtgtccctggcattgtacttcatgcagttatctataatgagatcaaaatcctcctcaaactcatggaggtttttatacccttgagcttctaaccgtttcctcattgtggcaaagtccatgggatgtttaatgtgatccaaataatctggtacctaattttagggaggaaaaagaatcatttacaaactaaaacaggatattagttgactctatatttattattccatataacccacaagcccatcctatctgagagccacacacagacacgcagacggtacagacataagacccaagtactgcagggaccttcccgaccccagctccttcagctaaagcacgctggagggtgccgggcggatgctgccacagcccagggtactgtctgcacagggcctcttgcccactgcactttcagtattttacaatga

SEQ ID NO: 104266 - DNA, 1591 bp, Homo sapiens
cgctcaagctcaaaggatggtagagatagaaattgaagggcgcttgcacaggatcagtatttttgatcccctggagatcatattggaagatgacctcactgctcaagagatgagtgagtgcaacagcaacaaggaaaacagcgagcggcctcctgtctgcttaagaactaagcgtcacaaaaacaacagagtcaaaaagaaaaacgaggccctccccagcgcccacggcacgccggcctcggccagtgccctcccggagcccaaggtgcgcatcgtggagtacagccctccgtccgcccccaggaggcctcctgtgtactacaagttcatcgagaagtcggccgaggaactggacaacgaggtggagtatgacatggacgaggaggactatgcctggctggagatcgtcaatgagaagcgcaagggcgactgcgtccccgccgtgtcgcagagcatgtttgagttcctgatggaccgcttcgagaaggagtcgcactgcgagaaccagaagcagggcgagcagcagtctctgatcgacgaggacgccgtgtgctgcatctgcatggacggggagtgtcagaacagcaacgtgatcctcttctgcgacatgtgcaacctggccgtgcaccaggagtgctacggggtgccctacatccccgagggccagtggctctgccgccactgcctgcagtcgcgggcccggcccgccgactgtgtgctgtgccccaacaagggtggtgccttcaaaaagacagatgacgaccgctggggtcacgtggtgtgtgccctgtggatcccagaggtcggctttgccaacacggtgttcatcgagcccatcgatggggtgaggaacatccctccagcccggtggaaactgacatgctacctctgtaagcagaagggcgtgggtgcctgcatccagtgccacaaagcaaactgctacacagcattccatgtgacgtgtgcccagaaggctggcctgtacatgaaaatggagcccgtgaaggaactgactggcggtggcaccaccttctccgtcagaaagaccgcttactgtgatgtccacacgcctccaggctgcacccggaggcctctgaatatttacggggatgtcgaaatgaaaaatggcgtctgtcgaaaagagagctcggttaaaacggtcaggtccacatccaaggtcaggaagaaggcaaaaaaggctaagaaagctctggctgagccctgcgcggtcctgccgaccgtgtgcgctccttatattcccccgcagaggtaagcgtgtccaagcattgagtccacaaggagcctgcagtgtgggaccctgggaggacgtgggcacagcctgcagggcccgtgctgtgtggtcattgcgtttctagttggcgcagcttcctaatattcccctgaagtgtggttctgcttgtttaccacgtctttttggggaatagatgttgtaaaagattttagtctgtaggcttggaataatctgtagttttctatgtttttttttttggagacggagttttactctgtcgcccaggctggagtatagtggcgcaatctcagctcactgcaacccccgcctcctgggttc

SEQ ID NO: 104267 - DNA, 1390 bp, Homo sapiens
aggtcgggccgggcggccggggagacgggcgggaagacggggaggccgggcggggagaccgggtaggtcaggccggggagtcgagggaggccgagtcgggctgtgggtctcggcggcctgggccgcgggcgcctgcccggagtccgcgctcgagtcgggtcgggcctcgggcagccgccgagccggccgggccgccccttatgtaacagacaggcccgccgagctctgccaagacgggaactccctgtgagcagggacgcgccccgagatcgcccaggagccgcgcggcctgcggcggccgggcttgggaaccggcaccgcggcctccccgggcgtttgcagggagacgcctcgcgacgaacgcgaggcttccccgggccttttaaaacgagtgacacgattgaggcgcagttcacgggaaacgcggctcttgtgagcggacgcgggagttctgagaatccgtagcagcgggaccccctgccccgcggggtgcggccccgtctccccagaaagcgcggccgcccgtgtctgtttttgagggtctgtcgccaggtggttgtgtagttagtggaatcggcggatgtttttgtttggccggcccagcgccgtcccgagtgctgtgtgctgcacacaacttcgcacagctcagcggccgcggcccctgtggccttgaccgagaggcccggcgcgtggccggcttctccctgggcgggcggtgggaagatggaagcggccgtcttgtgggcagccttccccgcctgtggcccgcagggctcttcgatgtacttaagggaattattccttgagaagctacgtgtgtgcccccgcggatccctcccagtggaaatgcttgtcccagtggaagggccagggacagaaccggcccaggggggaagcggtgaagcagaggaggtcgtgggtcgccctgccctgctgagggcctactttccccgggtcccagttgcatgttgagggtatggagctgctgtggccgtgaagccttcggttcagttctccccttgtagaaagtgttgcgatgaagagcttcacggctccctgggagagagtgggtttccaggggctgcttgtcgttagggcgactcaggactttgctgtcgaggggaaaatgacaggttcgtttctgatctggtgagtaaccaactgttgcttctgccccacctcagtaatgacgcgtgtcggcgtcccgggtgcactagggtcgctctctgcaggctgtggtgtcacctctgcagggctcacggggccggctggggggtggctgtgctgacagctccccaggaatccagggttgagtgggtacctggaggccctggagatgcagggggtctgaggtttggccgaccacattttctctcctattcctttctgt

SEQ ID NO: 104268 - DNA, 1028 bp, Homo sapiens
tgttggccaggctggtctcaaactcctgaccttaggtgatccacccgcctttgcctcccaaagggctgggattacaggcgtgagccaccgtgcccggcccccttctcagtttagcccagacctggatgttggcttctgtgtgggcagctgttgtgagccatggctcctgctggaatttgtggcagttgatgctgctgtgcacccccagaataggtgaaggctactcaggtgtagccccgatggtagtttatgtcctcaggaggagaaactgccatgtccccgtctgaaccaggcccggagtcttgatgcatagctctttgcctccctgggtatactcgacagcttgttgagagtgcgtgtgctctgagttgaacacgaatatatttctgttgtttgaaggttattataaagtttctaacttacagagttggcactcctacgtcccttgcccccagctggagctaccgtgactgccaccagctgccacctggcacgtgctgaactgtcttgaaggaaactgcagatatctggacacttctctaagtgttctttctcctaagaaagggaaagggacattctactgtctaatgacagtcgcgtcatcgatggcgtctacaaaacgtgactgtgtcccttggcgtcatccagtagccagtccacggtctgaagttgtcccccaacgtctttactagctgtttttcccaaccagaatcgagtacagggccacgtgtcacagtggctgtgaggtctctttgcgttccggtgcccccggagcaccccctgtgatctggcggtgggaggcctgatttgatacaggggcacgtttggggcgcaggtgatgctgtgtgctgcactgtgggcggaggctgtcccatgaggacggatgcgactttgctcactggccctttaaattgtgtccctgccccccacagttggcgagttagatgagggggtgtctcggggtgtgtggacgctctgctcccatcagacctccacatgctgtttgctggtctccccagaacctgtgg

SEQ ID NO: 104269 - DNA, 1047 bp, Homo sapiens
agctcctctgaaatgtgatccctttgtaactgtgctcatcacttcgccagtgcgttcaatgacacgctgatggcaggtggtccctgctgaaacccccacgcctccgcttcagcatctccacgctctgaagctgtctttcaaaatgtgtgcactgacccccttgtttgatcaaatttgtgtaaaatttttttagaagagatggcttattaacagggaagaagcttgttatattccagttgtaagaatagccttagtgtttagatttttttatgatagggaagatgcggccatcactgggatattttcaaatcccaaggacatcagagtgaagtgtcagttgtcagatgattttaaaagttatgtcttcagagaaaaaaagattcattttctcattttaaaccaattaaatattctgagtgagactaatcactcatttgcctacgaccttttagaaaagttgttttgttgaaatactgtacgtacgcttaatctaaatttgcattgactatgttttagtgtatttataaatggtgaactcagtttctgaaattaaacttcttatttgcaattttctagtgctggcagacactggctttttatttttaggataagaaaacaggcatattctttgtggtccattatctagagcccatacttgggcagcatttgaaatttcaccttaaccccagacagggctccagggaagtggagatgtaattcttacaacaacagttctgatcatggccatggtgatgactttccaggtctcgtgttcaagtggtgccagaatgcaggagccggtgggcagccctgaggggttgccttggccgcagcctctgtgcacgctcttcctggtgtcctcttacccggtagctgtgcgcttgttcccgtgagaacagcctgcttccagagtgcccaggagtgctggtcagggacagtgcccgtgaggctgcagaggaggtggggtccatggcccacccatctctccctcgccagcagccctggccagtgtcatcctggtgtagaaagggttgcgcacaggatagg

SEQ ID NO: 104270 - DNA, 1111 bp, Homo sapiens
ggggatggtggacaccgcaaagaagaactttggcggcgggaacacggcttgggaggaaaagacgctgtccaagtacgagtccaggtgggtgccctggagcacccctgtgggtcttggcctggcgctgtcctgggaagtcgtgtcctgcctttggtgcctgtgttaatgacagggagacagaacagcccccgaggcaccagtcacccgtccgagtcacctcggcttctccctgaggactaatggctggcccctctctggccttccagcttctgctctggtccctaccccctcaacagacagtggcttttcaaaatgtaaactggaacaccagccccacttgtgggaaccgctcctggcttcccctgacagtggggtccccttattctctgtgcccggagtcctggctccccggcccctgcacccaggttggcgtattggttcggatttttcttcactgccttggaggcgctgacggtgggccggtgtgggcctgtgtttcagcgagattcgcctgctggagatcctggaggggctgtgcgagagcagcgacttcgaatgcaatcagatgctagaggcgcaggaggagcacctggaggcctggtggctgcagctgtgagtgccttaaaacctcttagaagatactttttattttccaacttagaatttgaaataacctcagacttagaaaggtacaggaacagtagggagctcccacctgcctcgcacccaccttacccctgcattaccgttttttatcaccagagtcagcgatcaaaaccaggaaattaaggagaagattctgtccacacctagactcttgtttcctggaccttacaatactccagagcatatgttacgttcagctgcatgtttgttttaaagaaccgtgtctgctgggattcagtgaatgttttcctccatcctcaggaagagcgaatatcctgacttattcgagtggttttgtgtgaagacactgaaagtgtgctgctctccaggaacctacggtcccgactgtctcggtgcgtttctcctcagggaaatcccatctcctacgtcacttcccctcttcttctcatgattcttgggaggtaaaagcacagaggggacctgg

SEQ ID NO: 104271 - DNA, 1684 bp, Homo sapiens
aaggacgttttctccctggttgtcactgatatgtaggaaaactctgagtgtctcggacgtgagtgtgtggttggccggcagcccctaggctattctgggcagacagacccgtggatcgatagtcaggaccggcctctccgattcttacgcccctcagcagtcaggaccggcctctccgattcttacccgccttgctgtctgtctcttggatgttggcgtggcgtgggccacgcatggatccgtggccggaacacgcacacccagccaggctacagctccagagtatggatagctgccttctctccaggttattaaaaattccttggagtcctggtttgctgagaattttaaattcatgggcactgaaaatcccgtgttgcttttccctcttaaattcctcacttttaaacgagccttgtccccaagctggtacctgagagtggggtttgtacccaggcccgcctttgccttccagcctgtgacgagtcctgcaagacgtgctcgggcctgaccaacagagactgcggcgagtgtgaagtgggctgggtgctggacgagggcgcctgtgtgggtgaggagcggcccgggggtggaggagggcgcctgcgtgaggcgtggggggtgtgagatgggggcgtaaggcgtggggggtgtgaggcatgggggcgggaggcaggggggcgtgaagtgtgggggcgtgaggtgggggcgtgaggtgtggggcttggggtgtggggggcgtgaggtgtgggggagcatgaggtggggcgtgaggtgtgggggcgtgaggtgggggcgtgaggtgtgggggcactcactgtctcactctcacacaatgtgtcgccatcctcatggggcgcctgccccggttggcactgagtgtctaaggacagggcctggccatcgcctcatcccctcccctgccgcgtggggcctccgaggatggcatttgagatgattcctcctcaggggctgccctcctccctgcccttccccagccggccctggccacgggctgtgtcaggccatgatcggtccttccccgctccctggccgggctgtcctgggccgctcacagctgtgccgctctgttccagatgtggacgagtgtgcggccgagccgcctccctgcagcgctgcgcagttctgtaagaacgccaacggctcctacacgtgcgaaggtgggccaggcgggcgggtctgcactccggggcctgccgggtttcgttgctgcctttgtcaacattcatttatggcttcttagtgtcacttccatacatcctgcctgccctgagaacacttagtgtggcaaagtaagtcataggtatttgctgcaggaaaatcagaaaattcaagtcagatgaaaagaaaacagttaaaaacccaggaactccctggagagcgcaccctgctggtgcctccactgctcgtgcccccccagcgcccccgcaacgtgccctgcgtgactttccgcagcgcctgtcgggtgttttccactcagcagcttgttgcgaacgtctctgcgtcctgtggtttctctgtcacgctaatgattttggagccattatttcatacttttacaacaatgtctgttgctggacgtttacgtcataacagtttttcaacttataaactgtgaacacttgaaggtaaacttttcacattccttatgattttctgtgga

SEQ ID NO: 104272 - DNA, 1065 bp, Homo sapiens
gtgccccagaaaagttgtgctgatccccagtcccagcagcagggaggaggccgcctctgccccgtgtgtgtgacagccccaggcagttttcactgttgggagtgcagacagtgggtccctcagtgagccactaatactggaagccatgcgagaggctctggttattcttaggaagctcctggcaggctggcaaaccaatggtcaccgagctggaggtgggtttgtttctagaatctctgtagcacccagtttctcccaaagagttccaagccaggtggtctgcaccatggctctccgggagcacctgctgcacagcaggacgcgagtctgtgcttttgccgggagacagagacagatcgttataaagtcacttggtgatgaatgaggagaaaacccaaatcctggcggcaccggtgccttgtgcatgtcggggtctgacgggcactggtgccttgtgcatgtcggggtctgacgctggctccctgttgcagagtgtgactccagctgtgtgggctgcacaggggaaggcccaggaaactgtaaagagtgtatctctggctacgcgagggagcacggacagtgtgcaggtcagtgacggggtctgtgctggacgctggtggacccttcccaagtgaccatgatgtgaatggccccagcaggtactgccagggatgggaagcagttgagacccgtcctgcagacgtggctcccccagggtcactgtgcactcgccctgaggtccacgtgagacacagaagcagtgggggtgggggacgggctctgcatggccgaccctggtgtggatggcgctgctgcaccagcctctcgccggtggcctcgttccccaggtccaccgcctctgctctccctccagctcctgggtggcgattgccccgaggcttaagtccaggcctgccatggttgtgggctgcctgggtgagcctgggcgtggatggaacccggtggagaaagtgggtttcctgggcaggcgccatggttcatgcctgtaatccagcactttgggaggctgaggcggggggatcacgaggtcaggagatcgagacc

SEQ ID NO: 104273 - DNA, 1050 bp, Homo sapiens
aaatacaaaaaattagtcgggcgtggtggcgggcgcctgtagtcccagctactcggggggctgaggcagcagaatggcgtgaacccgggaggcggagcttgcagtgagaggagatcgcgccaccgcactccagcctgggcgacagagcgagactccgcctcaaaaaaaaaaaaaaaaggaaaagaaagtgggcttcctgggcgcatgctggccttccggccccacctggaggtctcttctctgcattttctaccagttgagggcccaacttggagacgtgaaattcttccctctcgaagcctttcctgatctttgctcctttctgtaacgtgacgtttgtcatcgttgtgctttctttatgtgaatgaatctgaatgaatgaatttcataatccgctgcgcgtctgctgagcaaagtaattattaaaacggagtcttttcattttagatgtggacgagtgctcactagcagaaaaaacctgtgtgaggaaaaacgaaaactgctacaatactccagggagctacgtctgtgtgtgtcctgacggcttcgaagaaacggaagatgcctgtgtgccgccggcagaggctggtgagtggcacggctgccctccacacaggctgccctcccctgggccgcagggcttgcacgtagactggctgcttggtctgaaatccacacagatggtggccttgagatggtgagagggggattcccggaagacaggtgcatgacatctctgtgtgggcacgcttgcgcgagaggtactggcttcctgaggatgaagccccaggttcacagctcaaacggaagttcaggcgatgaagggggaagtctctgaagctcagacctcagcgggcgatgagcagaggagcagacgcaggagaagaggcagctaaagagctggaaaagtcatccggggaagctgcccagggtgccgcagagacagggacaggcaggaagtggtggagggcaagcgggtcccccacacctgtttcctggggctaccttaccaagaaccaggaacttagggctccagcaacagaaatgtgc

SEQ ID NO: 104274 - DNA, 1006 bp, Homo sapiens
acggagctcccagagcctgcagcctctcacccgcagccagctttcttcttgcagtgtcttcattcccagatgaggaacgggcaggccctgcggtttgtgagtggctgtttcctccagcgaagcccccaaagatgcttttcccctgcctgagggtccctgcttgtacatcctttgaatcactgaagagggcccataggttggacccctgaaacccacctggtcacgtcttcaggttctcgcccaaggcagggccctcccctcctcccccaagcggcacgtgagccctgttcagggacagcagagccaccagcccaggaccggacctgctgcctctgcggacctcggcagccctggtcactcccggctctggcaggacaggtgcaaactcagtggtaaaggtccgtcctgattaatgagacaaacccacgcccgttctcctcctgattacctacaatggtcaattttattacaaagaactgtatcaaaatatacaagtctgtttaagaacaaccaagaaatgcagctgtttaagggacaaatgagaatcaaccgttagagagcaggcagcctctccccgccgctgtccactgcaggagacggcatcctcagggccacattttccacgggacatccttctgaataatttaaagggtaagtccggcacattacaggtcttcgcgggagggcagctgtgtcgggctttctccttctgtggcttctgtcagaaaacaagcataggtcgtcaaggctgagcacaaagggccctggggatgaggcctttcccaggacagcagcgcatgtgcagggcctgcccgtccagtcctggctcaaagccccggacgcagccatccaagggcagctcggagacccccgtttcccacaaagcagatgagagatgaggcagacggcatttcagagcccccacgctgccgtgggtgtggaggatgcagagttgggagcggcaaggggttccttgcggcctggcagaatgggagcctgaacaatg

SEQ ID NO: 104275 - DNA, 1071 bp, Homo sapiens
ggccagtcccgagagccacagcctcagaagagctgaacaggggagtggtgtgtgagtggtcagcgcagggacagcgatggtgactgtatagagatgagaggtcagacttaggggaggctggaagctccgaggcaagtgtgtgtgcgcgctgacggtcacaccagaccgcccggggatgtctgccacaatatttagacccctgagggccactgagaacgcctggcagtgccaagaggaccagcccctgggccctctggcccccaactctcaacccactagccctggggctggcgggtggccactcacgtcctggaaccctgagctgctctcaggccggtgactttggaccaatgttggcaatctgtgggtttgcaccaaaccacacaggtgagtcagacttctgtacagagagcagggaaggggcacgacagggtgaagtccagaccagggcaatgtgtaccccggctgttcagcctttgagtgcggctgtcgcagcaatcaaggtgggctccctggtggaggtggacagcagctgctggagagcccggagggcagccaggaccgtgtcagacggcaggagtcgggcggggccactccaggcaccggccagcagggcagaggtaccagggagggccctcgggctgcgggcgtgaggtcagagcccagggtgaggaggaagcatctccagccaggtgcgctctcggcccccgccggggctgcgaggctgggggcgctgccgctgcgagggcttccagaggagccggcgctacctccccgcgcgcccggccacgtgcgcgacgggatgcgcagacagccggggacgcagactggcggcgtgtgtcacctcgaggccgcgggacaagcgcaggtcgcctcccgcactcccacacccccaggaaccctgctcggggccggcgggtgaccttcctaggcactgctgggggcggagccaggaaacggctcgccccgccattggctggggcgccggatttctttaaaaactccggcttccattggctcgtgcagtccctcctcgttctgcccgaggcgccacggccgccacccgcgcgg

SEQ ID NO: 104276 - DNA, 1490 bp, Homo sapiens
cgggccttccgggcccactgcgccgcgcggaccgcctcgggctcggacggccggtgtccccggcgcgccgctcgcccggatcggccgcggcttcggcgcctggggctcggggctccggggaggccgtcgcccgcgatgctgctctccaagttcggctccctggcgcacctctgcgggcccggcggcgtggaccacctcccggtgaagatcctgcagccaggtacgcgcggggccggcggggccggggccggggccagggcggggaccgggggcgccccgggccgcaccaaccccgcccgcgcctccctgcagccaaggcggacaaggagagcttcgagaaggcgtaccaggtgggcgccgtgctgggtagcggcggcttcggcacggtctacgcgggtagccgcatcgccgacgggctcccggtgagtcggaccgccgggcgggcccgggtttctcgcgcgccttgcgcctcgcttggcccggcctgacccccgcgtctccgcaggtggctgtgaagcacgtggtgaaggagcgggtgaccgagtggggcagcctggtaagttggggcacgggcggcggcggcggcggggggcgggcgcggggcttttgctgaccgccgtgtcccccagggcggcgcgaccgtgcccctggaggtggtgctgctgcgcaaggtgggcgcggcgggcggcgcgcgcggcgtcatccgcctgctggactggttcgagcggcccgacggcttcctgctggtgctggagcggcccgagccggcgcaggacctcttcgactttatcacggagcgcggcgccctggacgagccgctggcgcgccgcttcttcgcgcaggtgctggccgccgtgcgccactgccacagctgcggggtcgtgcaccgcgacattaaggacgaaaatctgcttgtggacctgcgctccggagagctcaagctcatcgacttcggttcgggtgcgctgctcaaggacacggtctacaccgacttcgacggtgagcgcgggcgcggggcagggaacgttccgggggccttgccggcgggttaacgcctgcaggggcggcacatggaggggctgatgactgttgggcggccgcgcgccctgggtctgctctcgtggggagcagaggcccacgcgctaccctggggagggctgagcgagggatcaagagcgggatcgtgctgggtgggggctaggggcgcgctcaatattgcttcctccatcgcgttggggggtacggggcctcttgccccggtgtgggaggcgcgtgacatccttccggcccgagagacccccggctgggggcggtagcggaggagtctccgtgcgtgacgcagggcgcagccgggctgggtctgcgccgggagcctggaggcccccgcggcgcggttggagtggcggggcctcccctgcgtgggggcgggagctgcgtgcgtgcggagcgcgggggcgcggcggcagaaatccccgcattgcggagcttgg

SEQ ID NO: 104277 - DNA, 1069 bp, Homo sapiens
gcccacctcccgccctcagtcctgcggtgtgcgtctgggcacgtcctgcacacacaatgcaagtcctggcctccgcgcccgcccgcccacgcgagccgtacccgccgccaactctgttatttatggtgtgaccccctggaggtgccctcggcccaccggggctatttattgtttaatttatttgttgaggttatttcctctgagcagtctgcctctcccaagccccaggggacagtggggaggcaggggagggggtggctgtggtccagggaccccaggccctgattcctgtgcctggcgtctgtcccggccccgcctgtcagaagatgaacatgtatagtggctaacttaaggggagtgggtgaccctgacacttccaggcactgtgcccagggtttgggttttaaattattgactttgtacagtctgcttgtgggctctgaaagctggggtggggccagagcctgagcgtttaatttattcagtacctgtgtttgtgtgaatgcggtgtgtgcaggcatcgcagatgggggttctttcagttcaaaagtgagatgtctggagatcatatttttttatacaggtatttcaattaaaatgtttttgtacatagtggataatcctgtatttatggggctgggcatcctgggggaagagaggggctctgaggaagggctttggctgctgggtgacctgacaagtttcccgtggggctggtagttttgcccacgggggaaacgggggaggcccagctgggtgccagcctccccagtgccacaggctacttcatgtggcttgtggcccaccgcactaccccgtgctgcacccagggagaagagcagctgcctcctggggtgcctctgggaggtggaggcagggagccaggccctgaggatgcagcaacccacactagtcaggaggtcattcctcggtggtcccaggaggatctctgcagcccccacccagggaggccttgccagtggaaatggccatacttgcatcctggcttggtggaaacagagacgtgcgggggggtgggggagggagtccatgctgcctcagagggtgg

SEQ ID NO: 104278 - DNA, 1032 bp, Homo sapiens
cccaataacccatcgtaatgggatttgggaagcctgtttcaggttcatcaaggcatgatcccttgtcaggtgaggagcagactgactggggatggtcttcacaccatcataaagtcaaaaaagcgttaagtcaaaccatcataagccgaagaccatctacatttagcgtcattcaggattcaaattagcaaacaggtattgagcgcacaattgtaccacacgccagatgtgtgcagatgaatctgactctgtttctgccctgaaaggtggtttagaatcttagagagtgcggagaaccttcccacctaacccatgctttggcagcagtgtgatgaggcagagtcgtggcccaggtctcagtgtgttgggggctggcatctgagcccatgcagctgagtccctgcacccgaatgtgtgtgttgaggttagactcctggtttccaccttgcggtgtggatgttgagccttggtctcttgtgtgtctttgatgaaggtacactttgccttgccggacagtcggattttagtctgtgcgccctccaacagtgctgctgacctcgtgtgtctgcggctgcacgagagcaaggtgctacagccggccaccatggtccgggtgaacgccacctgcaggttcgaggaggtgagcccttggtgcaagcagtggggggcaccagaacccctccctggaacataggaaatgccaagtggacaggggagggcaggggtaggagggtgggcacagaggcgccacagaaagctgtgtttgagaaatggctctgccatgggccctccctcaccgctaaatggtggagcttgattgctgactatttcatcacattctcactctgtgtgagttatcacacctattgtgggcattcgtagcattgtaaaattatcacattcctcttttatttaatccccaaacgtcttgttactttttaagtagttttgttttgttggtttggtgttttttgttttgttttgttttttttttttgagacggagtctcgctgtgtcgcccaggctgaagtg

SEQ ID NO: 104279 - DNA, 1050 bp, Homo sapiens
ggtcacatgctcaggggtcaccccctgcagggacctgatgccctcgggtgggagggaccgaggtccaccctcgggtcaaaggtcaacgtgcactttctccttgtcgcctgacagacattttattttactaagactgctgtaccgaacaagcatatttatcatcaggagacaggatgggtttaaagcaggatggtgtgtgtgtgaacgggcatgagcagaggtgagcgtgagcgagcgggtgtgtatgtacgagtgtgcacgtgtgtgcgtgtgcacagagggtgtggtgccagcttgagtgggagtgtgtgagtgtgagcaggcgggcgagtgcgtgagtgcacgccagcgcgtggcccatgtatgaggagtgaaggggcccaacgcaataaccacgtcccccacccgggccccccgccgcggctgaggccacatggcttcctgtgggagccccggccggcacccggctggtcccaccccaaatacctcagccatggagaccatgtcatgcagaattaacaaggtagcaccgagcatatcaataaatattattctgataatcacctgtgctccgccggggacttcgcctccctccacgcccgtcccctgactcggcaccatgcgtgggggtgctgcaggacgtggggcaggggctgccttcagaagcgtgacaaggggcccctctgcacccacagtgagtgtcatacttggagcaggacatgccctggactcaggctgtgggcacggaggcgattcagctgtggcctgaagccctggggcacacaggcttgggagacgaatgcacgacccccttagtcttcctgctcctgcaggggagcgaggagggggagtgtgaggcaccctctaggagaacagagagctggcgggatccaggaaggcttcctggaggaggcgccctcagtgtggtctgggatgctcaaaacaacacagagatcctgagcaggtgcctttgctgggcccaggactccatggaacaaggctggtcccgtgggtgcaccatggaaccacatgccctgtagaccccggcag

SEQ ID NO: 104280 - DNA, 1050 bp, Homo sapiens
cgtgcgagcattgtccccatttcacagcttgggagctgcgaccagagaacgtgggcgcgcctcgcaaggccgtgaccgcggcgggactcgaaccctccctcctgagtgcgcgccgatgttccttaggacccgggagcgccgggggggggggggggggcgggggccccgcgcgctaccccctgggaagtgtagtccgaagttgcgggccggggccaagcaggaggcgcgtgggactacacttcccggcatgccacgcggccgccggcgccctcggcccgtccgccccgccccgccccgcggccccagcccgccccgtccgttgagggcccgcgccgcatggaggccggctgaggagcgccgctgcctcgcctcggtacgccgcgcggcgcggacggcgcgtgcgtgaggacggggcccagcaccgagcggggggcgggcccgggtcagggccgcggggtgactgtggggggcggggggagcgagcccgagtcggggggtgggggccgggggcggggggggtcaggcccgggtcaggttttggggccggggtagcaggtcgtgggggtcaggcccggatcaggttcaggttttggggccgggggagcaggtcgtgggggtcaggccagggtcagattcagggtttggggctggtagaccagggtcgttgggggccgggcccgggtcaggtttgggggccggggtggcaggtcgttgggggggccaggcccgggtcaggttttggagccgggggagcaggtcgtgggggtcaggcccgggtcaggtttggggcgggagcaggccccgcgcgtcccctgccaccgctgccgggagcggcgctgccgaggagcggagccccccagggctggggcggggagggtcagcggcggcctcgcgggaaggcgcgggtcggacctcgagtcccagggtcctcgcgggtcgggagggccccagccacccccgcctgccgcctgcggtggagccggccgaggtgagagtggaggaaggcggcccaggcctgcgggtctctgggggtgctgggggaggccgagc

SEQ ID NO: 104281 - DNA, 1007 bp, Homo sapiens
acacctgtaaccccagcactttgggaggccgaggcaggtggatcacaaggtcaggagttcaacaccagcctggccaagatggtgaaaccccatctctactaaaaatacaaaaattagctgggggtggtggcgcacgcctgtaatcccagctactcgggaggctgaggcaggagaatcgcttggacctcagggtgggggaggttgcagtgagccaagatcacgccaccgcactccagcctgggcgacagagtgacactccgtctcaaataaaaaaaaaatgaggtctcgctaagttgcccagactggtcttaaactccagacctcagacaattctcctacctcagcctctcctgagtagctggggctgtgagcgagtaggctcctcccaccatgcctcactggtgctgggaaaaaacttaacagaaatttattttctcagagttctaggggccggacatcccagatcaaaggtgctggtccctggttgccatgcagcctcctggcttgtagacgggcccccgcggcgtccttacccgggggagcaagagctgcgtggcgtctcttccaggagtactaaccccgtcatgggggctatgcactcatgacctcatccgaacctgatcacctcctggaggccctgccttctaataccttcatagtgggagttagggctctaacctgtgggttttgggggacacagttcagtctgtagcagtgggacctgagcaggcaggtgggatgcgctgtctgaggctcccactggatgtcaggtcctgggacagaagccctgcgggacatttcggatgcagacagccgtctctgacgccaaaggactgtagatgccgctctgattttgtgtcctagggccgcacacctcaggcagagccctaacggatgggcttttgcgcacaacagatgtcctcctggggctgttgggaattctcagaggcttcgtctgcacagaggatcatggtttccaaagccagatatccctttttacagatgag

SEQ ID NO: 104282 - DNA, 1041 bp, Homo sapiens
tggctgaggacgggagcagggtgtacgtggtggggacagcccacttcagcgacgacagcaagagggacgttgtgaaggtgagcgccgccacccgccacatcccggacacgggttggtgtaagctcctgtgtcctgcactcagggacctcccggcagggcccgtgtgcccgtgtgtgcgcaccgcaggcctcctgcttcaacactgtggtccctgggagtggcaaggtgggcttcctgcctgggagccgtgacggccttgtgcgttttcccacttaacaagtgaacaagcctcacagcttcctctctcgtcgcttagagaattgagctgtcactgcagcagcggggttagctagccctggggtgacgccaaggctggctgctcctgggatggggcccctggtgctggcgtcagctgtgctgaggggcagggagcggctgtgttctcgaggtgtgacctgtggctgttgcagaccatccgggaggtgcagcctgacgtggtggtcgtggagctctgccaatatcgtgtgtccatgctgaagatggacgagagcacgctgctgcgggaggcccaggagctcagcctggagaagctgcagcaggccgtgaggcaggtgcgcagccgcgggcaagggtcagggtcagggtcggggtcaaagccacctgtttgcctgttgcccaggttcctctcacagcccatgcccccagtcagtgtggctgtgcctggcctgccctggggattgccgggttagggacctcccctgggccaggagaaatgaaagaggctccattacccggtttcaggcaagggaggaggaaatgggtggctctccaagctgaggcaggggctggtcacccgaggactgggttgctgagcagttgctggggatgggtcaggtctcagtgcaaggttggcccccccggtaccacacccaggcccaaagtgggtggggctcagggctcctcctgtccccacttctccagccttgcagtgaccggagaggcaggactttctcattgctctttgtgttttcggtttttgtt

SEQ ID NO: 104283 - DNA, 1078 bp, Homo sapiens
aggccagcaaggtgcctttctgcaagttccacctgggtgaccgacccatccccgtcaccttcaagagggccatcgcagcgctctccttctggcagaaggtcaggctggcttggggcctgtgcttcctgtcagaccccatcaggtagggctgcccccgggaccctggccggcctgcagggtggtctgtgggaggctccaggccctcctgtgcaggtccaagcgcagccaatcctcactcaaggccttccctgccctttccttccgccacaaatcccaaacaaacgtgctgtggtccctgcccggtgtccacagtgccagccccacccccccagcccgttgcccatccctgcggggctgcagccatccctctccacagcaaggatgacgtggaacgctgcaagcagaaggacctactggagcagatgatggccgagatgattggcgagttcccagacctgcaccgcaccatcgtctcggagcgcgacgtctacctaacctacatgctgcgccaggccgcgcggcgcctcgagctgcctcgggcctctgacggtgacggccgcccgcaggcgtgggaccccctgtgaggctgaggcccgagcaggtactgaccccttgtccttccccacagccgagcccaggaagtgcgtcccctccgtggtcgtgggcgtcgtgggcatgggccacgtgcctggcatcgagaagaactggagcaccgacctcaacatccaggagatcatgacgtgagtgcccgcccctccctgcaagccccaccccacaagcccccaggtggaggctgagcgccctggaggccaaccacatgcggcagtgacccaggcatgggggctggggtatggggagcccacccccagccaggcccagcgccccctccctcccacagcgtgcccccgccgtccgtctccggcagagtgtctcggttggccgtgaaggccgccttcttcggcctgctgggctacagcctgtactggatgggccgccgcaccgcgagcctggtcctgtcgctgcccgccgcgcagtactgcctgcagagggtgaccgaggcccggcacaagtaggagac

SEQ ID NO: 104284 - DNA, 1058 bp, Homo sapiens
aggtgctcctagggctgtgtcctgccccagctccatccctgcagtccaccccagccatgttccatgtgggtgggcgatggggctgcagaaggccgggaggagccgctggggcagcctggtgctccggcatagacatgcgtgggtggtcaaggcaggtcactctgcccctctgagcctcagtcttctgccagtgacgcagggagacggcactgactgcctcccaggagcgtcggtggccttgaaggagagaggtggtgtcaggcctgtgttcagcagggccggtggggccctcagtgcaccctgcaccttgggggctcctggcccccctgttgattggcccctattctcaaggttaccggtgctgggctgggtggggactgctgtctggttggggggggccaggccagcagggtggtggtggcaccaggatggacagtggcctggccctggggcaggtgtggcccctcagtgaactgacccttctctgcttctttggggtctctactgggcctgagtctggggttccctgatttttctagtttgggtaaaagccaaattttgtgagcatattaaagagtggatgctgtgagtgcaacgcactcttcatcgccaccttgtggttgaggcggtgacaggacatcaggaagatcgcccagaaactgcagagtgagagccactcagcgaagcacagccggtttcagggaggggaaggatggacacgagtggggaggtctgggcaggaccccgaggagggagcaagcacactgtcccaccccaggtgacgcggcgcacggcgcggatggtggccgagtggcagtgtgtgggcttctgccacggcgtgctcaacaccgacaacatgagcatcctggggctcaccatcgactacgggccctttggcttcctggacaggtaagtggccctggggcccagcaaagtgcaggccccagggctggggggtgcgggctgcatgaaacctgctgcccccaggcactggcccgtgatgcttgagggggagccgagggggctgggggctgatgtaggaagtagagagtccaggg

SEQ ID NO: 104285 - DNA, 1054 bp, Homo sapiens
ggccacggtggaacacccacggacatgtgtctgacaccagcatcagggttggggagaacgtatcggacgtggctcccatccggtcacggtgcaacacccatggacacgtgtccgacgccagcatcagcttgggggagcctgtgtcggatgtggtttccacccggccacggtggaacacccatgtacccatccctccgccccacatggtgctgggggctctctcaccagaagctgagcccaacacacccaggccccaacagagcccccctggccacacgtcccagtcagcgctcagcctgggagcacagagcactgtgctggactgtgggccacggctgcctgtagaagtggggccatctctgtcctcccccagctcgggctgcggggaggggagcatcagcgtgggggagaacgtgtcagacgtggctcccacccaaccatggtggcccaacaccccgggagacagtgtctctgaagaactaggtcagagtagggtggctggtggtcaggagtgggactgtgggacgcacagagcctgggaggtaggcgggcagtggggttggtggcatgtgaagttcccctcaggcctccttgtcagccaggacctgggctgctgtgggggacatgggaggggctgcttgagccagggccggctcggctctgtacccgccacaggcactcggccctgatgccctcgtgtccacttgtgtccacacaggccctgggaggagcggggacactgaggacctctctccaaattggcctctcaactcacaggttaggtggatgcagcctgggggtcccacagcaggcagggagggctctgtccctctaggttgtcacgcgggtgggtcccacatgcgattttcctttttttggcacaagctggttgtggggacagcgtgcagtggggaggtggttctgaggctggtgttttgttaggaagacacagctgcccagagcagcccaggccgtggtgaggaggcggaggcatcggcggcggaggctcagggtggggagcaggcctacctggcaggcctggcagggcagtacc

SEQ ID NO: 104286 - DNA, 3725 bp, Homo sapiens
tcagatgagaggaagggttggtggtgggcgcccctggggcagctgggctcagatgagaggaagggttggtggtgggccacagcttctggcttcttgtggatgggccgcatttccacctggcccggtggcggggtgtggctcacagaggcccattgcttggaaatggagcccagagctgaggcaagaaacaaagcgctgttcccagcactggtgcccctcaggccctgggcacggctgcgtccatgtgcctggccgccctcctcccagcctctttgcccacaggccttcaccagtggcctgaggaggtacctgcagtattaccgggcctgcgtcctttccactccgcccaccctgagcctcctcaccattggttttctcttcaagaaacttggccggcagctcaggtgagcctcagcatggcggctgagcaggggactttgcgggagcggtgtggggcttgctgggtggtggagggtttgccctgctccctggcaaggagggcctgtgagaacagccctcagcaggcgaccggatggcccttggccggccgagttcaccaggtgcccggtgctgagcgggtgtgtctgccgtgggcccaccacagctggccccatccaggccctccaggtccggtggctcctgcctaattggcacacagggtccctggagatgtggcgtccggtacacacaagctggttagtgagcaaccaggctcgggggctattggcaggtgccatcagagaaggaagagtgaggagctgggcattgggagcagtgggagaggcgaccttccaggctgaggagcagagtgtggcagcgctgaggagacccaagggctgagacactgtggggcaggggagctgggctgtgaagggtgcgagttgtggcagatgcttggtaccactgtgtggatgggaggggctctcaggtgcagcccccagaagtgggaggatcagggtgattcgtgtgttggccagatcctgggagggagggcctgctgggtgtgggtacttcagtggggtgtgtgtggacagcgcaggggcacagggctgcacacgagtcctgcagggagcccgtttctgggtggttggggtgcctgtggtttttaaagcctgcatctaaagttagttgccccagggagcataaagatacgtggagactttgctcacgatctgatccaggcctgggaaccctgagcccggtcacctggtctcatcctgcctctgggtctaggtacctggccgagctctgtggcgttggcgctgtgctcccgggcacctgtggaggaggccccagggccgcgtttcccaccgtgagttgtgcgtccctgccgagtgtgtcagcctggtgggctccaggaaacgggggtggctgagcgtgtccctggagggctgctgccggcagggctgcgcctcactcccagcgctgggtgcgctgagctgccccccaccccctttgcggtctgcagggcgtgaagctgctgtcctacctctaccaggaggctctgcacaactgcagcaacgagcactaccctgtactgctgtccctgctgaagaccagctgcgagccctacacccggtgggcagtgggctgggcaggcgcggcgggcgcgcactcccaccaggcagacacttgagagcggtcccttgtcagacacctgctgaatgtgggggtcacacaggaaggggagggcaggataggtggactgggcaggagcccccaaccccccaccctgcccccactccacaccccccaccctgcccccactccatcccgcccctcatggatggccacaccccactccacctctcacagctacgcccccacttgcccctcactgacagccacgcccctgtcccacccctcactgacagccacgccccacccacctctccgttgaccacatctacccctgcttttcccccactgcaggttcatccacgactgggtgtacagcggggtgttcagagacgcttatggcgagttcatgattcaggtgaaccacgagtacctcagcttccgaggtaggtggcagctgattgcggggcaggggtccgtgcctgtgggcctgggttcagggccatggccatgccggccaccgtggtgttcaccctaccttagataagttgtactggacacatggctacgtgctcatctccaaagaggtggaggactgtgttcccgtgtttctgaagcacattgcccacgacatatacgtctgcggaaagaccattaacctgctgaagctctgctgcccccgggtgaggaggggctcatgtgtggggaagagaggggccggtcttccctggggctgagtatgaggctggggctgagtgctggtggctgtgcttgcatcccctttggcagcattacctctgttggtccgacgtccctgtcccccggatctcggtgattttctcccttgaggagttgaaggagattgagaaggactgtgccgtctacgttgggcgcatggagagggtggcccgccacagctctgtcagcaaggaggagaaggtgcgtggcaccacaggtctcgggggctttcttcgcccctgcctctgcttcctggggtctcaggttggtggggcggacatgagggctgtgcaagatgggggcctcccttctggcattttctgtcctggcggtggcctgggtgggtgccaagggggagttgagatgaagggtgggtgtcaacggggagttgagatgaagggtgggtgccaagggggagctgagatgaatgtccggagccagatgccaggcaggggctctgacttctcctcctgggtctgggtggctcagcctgaagcccaggctttgctggcgtgggaaactccgttggggcctccccgggcccgccagctgtggacagacagtcctggctgcactccagatggccttcgccctttgcaagcccccttcctgctgggaagggacagtgtgtcagggacgggccacgcctctcctgtgtcttctgggaggggctcggtggtacaatcagtgccattcccaggaacaccctttctggcctggtgcctggtgggcagcagggatacttgggcaggggcaggcctaagaggctgagcggggaagccccctcttgaggcctcttggtttccttccagggtgggcacacacagccttggggtcctcagccccagatgtctctgtgagagccggtcagctcccgtccatggcctggaaccagccttgccactgctgagagcctgggggtgggggagggtgggcgggggggcggtgtcctgccatcacctggtccctcctcgaacccttggaccatgtgtctcccctgccggccctgagtccacaggtgtcctgggcatcctaggtgaggggtcagaggattaggttgctttttttttctttgagacagggtctcactgtgtcagccaggaggctggagtgcagcggctcgaacatggctcactgcagcctccacctcccaggctcaagggatcctcctgcctaagctcccctgacccccgccaaatagttgatactacaggcacctgccactacacctggctaatttttgtatttttagtagggatgggtttttgctatgttgtccaggctggtcttgaactcttaagctcatgtgatctacccacctcggcctcccaaagtgccaggattacaggcgtgagccactgcgcccggccaggatgctttgattaccagttgtctttctcaggaattac

SEQ ID NO: 104287 - DNA, 1011 bp, Homo sapiens
tgcctcatggttgtcacacacctttgtgagaacggtgcacacgacctggaagagagaatctcagaggtccttctgcaggaccagagagtctaaaccttttctttccttgctaacatctgaaacccgatagtggctcttgagggatgggtcagtgaggatgttttacctcactagaaacttggggcagatgtgtgtgggccctgggctgtgtgggccctggggtgtgtaggaggcaggtgcagccagcataaggggtgcgcagggcaggaaaggcgtgagtggggctcttgctgcctgctccccagtgggcccggcacattgtggatgactgacagcgcagggccctcctgttgggtgaatttacattgctgggagttctgagccaagtctggctccggaagctgctgtttggtgagtcttgaagctggctcatgtgctgggaagaggcccatgggacaggggctgcaccttgagtgggagagaataggcaggtggatgatggggcatttgggtttgggggattgagaggagggtgttggggaaggtgggcagagagccctggaggagccaggcagcgcagcctcctttgactgttgctgctgcagcaggggctgtcgggtggggtgatgtggtgaggtgtaggttttagatgggctgtggaggtgggcatggtgggagctgcacggggcggggagagcttctaggcagaggctcagccccgggggacttgagagctagagatggtggagaaggggtcagagcaggggacgctgagaagggctggactgtggttcttgttcatctggcaggcatagccaggcggctcctggggtgggtggactgagattggtccagggtgcccctgtcttagtgtgacctgcagggcctgctgctgtggcgttgcccaggatgctggtgccactgagacagctgtggtcggagcagctgcagccctcacagcactagtgtctgtgcacagagcacggccgccatttcccccccagccccttt

SEQ ID NO: 104288 - DNA, 1034 bp, Homo sapiens
tggggtgctcttccagggctgggccagtcggatacccccggccatgcccaggaccccaggaaggtgccctggaacactttccacatgagttgtcctgatagaatcgatcgtgctggtattcacagcagcagcatccacaaaaggctgggtggtgagctgacattcatacctggctatgtttcttagagtttattgttttgaatcacttccattcttctgttcatgcccattcccgagagaaagcaccctggtgctgaggtgcaggtcaccacgtctgctcatggcctctcttctgcacccctcgcagcccccctggccacagagaggagccttacctgacggaggcgggaagggacgctttcgacaagttctgcaggctccaccaaggggagctccagctgcttgctgggggcgtcctacaggccccgcagcccgtgctggtgaaggagtgcgagctggtgaaagacgtgctgaacgtcttgattggggtcgtgtctgccacgttttcgctctgccaggtgagaactgctcactccccgccacagtggtgtggggctggcctgccctccaccacgcagtgcccagccctttatggggcagaacaagccccagtgcagggagtggggagtggcagggaaggccagctcccagggccaccagtgatgacagccagcatcatcccatttcggttctaaaaagtgttaatttattaatgtccttttaaaaaactgcagagaaataacatgtttattgctgtcagcaaagcgatagaaaatgttcctccccgcatttccatttccgtcctgaagtgccaggcgccttccgagccttcccaccgctcgggaggagcatctgcctgccgagagcgtcccgagactggggcctgcgctgctcttctcactggatgcggtgtcatccgggatggggccgggccttactggttctggcaccagctgcagtttagccagccctcttgctgggcactggagaagtgaatggatatattcagaaaaatgaagtcttgctctgcagct

SEQ ID NO: 104289 - DNA, 1220 bp, Homo sapiens
cctggctgcaatgcttcgggggctggcagggggccgagtcctggccctcctggaggaggtaagctgggcagggtggaggtgctgcggggtgggacgagggaaaggaccagtgactgcttccgtcttcgcccctggtccagaactccacaccccagctagcagggatcctggcccgggtgctgaatggagaggcacctcctagcctaggcccttcctctgtggcctccccagaggacgtccaggccctgatgtacctgagagggcagctggagcctcagtggaagatgttgcaggtgaggctgactgcggaggcatggccctgccctggggcctggctctgccgcacagatcggtggggagggcagggcaggggagtgccctgaaccagctccagcgccggaggccaactgcgcgcctcttctcggctcctcctgtagtgccatcctcacctggtggcttgaaatcggccaaggtgggagcatttacaccgcagaaatgacaccgcacgccagcgccccgcggccgcgatccggaccccaagcccacggctccctcgactctggggcacggaaccccgcccactcccaatccccgcgccccgccctctcccacccgtgcttcccccgctccacccctcacctcacctcgcccccgccccacccatcgcgccccggcccgtcccatcgaggcccatgcaacccacgctcggtcccgttccggcccctgcgccccgctgcgcttcgctccccgcccttgcgccgttagtaaacatcgctcaaacgaaacgctggctctgcctcctttactgagcacgctcggcctcggtctctcacccgcggtgccggactcaggccggaagtatgccgcggcccaggcctcaccaacttcacgcgctgccggcgttcccgtgacgtatttccggcgcgcccgccctagtgctcttcacactggcgcggctgtgacgcgacggaggcggcgagagcggcagccgtgggcactttccacgggtgaggcctggagaacgggtggacgtgcaggccagaacccgggacccacccggctgagcccccagactctccgctgcccacgaccctcggagtggcaccctctcctggccgtctcctctcgtgggtcccgaagaacgggtgcaaagccgagttcgtccgctgtactgcgcgggcgcgcgtttcgttcttcggttttgccacggttctgtgact

SEQ ID NO: 104290 - DNA, 1050 bp, Homo sapiens
gtatctctttgaggatgaccccaggtgagcaggggtgcggaaaccacccttccctgcagccccagtttttgggtgcacagcctggcctgggaaaatccaggggtgagatacagacatgtgctcaggggtcagcgttctacagggagctgtagagctgttgagggtcctgacctttgacctctggccctggctggctgttggcagcgtcctttacttctcctggcaccgctatgagcatgggcgcttctggcctttcctgcgagagtcagatgcagacgcagtggggcggggacagggcctcggcttcactgtcaacctgccctggaaccaggtgcccaccctcaagccccaggtccccacccagccccctccccctgggcccctcccctcccccacagttcaccctcaagccccaggtccccacccaccccctcccccgggcccctcccctgccccacagttcaggatgtagcctgggatgtcctgccaggttgggatgggaaacgctgactacgtggctgccttcctgcacctgctgctcccactggcctttgaggtgactgcacggagggctcccccagggcagccgggtgggagggggaccttgtgcctggagtgcgccagtgaaggcaggaggagggttatgagctgtcccactcctgtgtggctggggaaggtgctcaggaggggatgggatgggcctggctcgccctcacctgggctccagcccctctctgtcgaccctccccactccggcctggcctgtagtttgaccctgagctggtgctggtctcggcaggatttgactcagccatcggggaccctgaggtgagggccttgccttgccagggagggcttctggggtcctggggcccaggtcccccatcacacatggctctggttccaggggcaaatgcaggccacgccagagtgcttcgcccacctcacacagctgctgcaggtgctggccggcggccgggtctgtgccgtgctggaggtgactggggagggcacacagggagggtctctgggccagaggcctgggggtca

SEQ ID NO: 104291 - DNA, 1050 bp, Homo sapiens
tctctcagtggttcagaccacattaggattagagaagggccccacgaggcaccgccaggcgtgtctgtgagcgactcccaggatggaaggcaaaggctgacccccctctctgttgtgcccgcccccccacccccgccaggtgttacttacaaagaggtgctcagcttcaagcctccccggcagctgggggccagggtctccaaggagacgcctctgtgaagatctctgggctccggggtggcagtgaggaccaccttcaccttccacctgagaggggactctcgttgccaccttgaccttggctggggcttgcatcccaaggcatccatcagagcagacgcccgggttccatggaccctcctccccacggccatgcctctgctcttgggcgcccatcatggaggagcacctgaactttctggacaagacctctggccgacctggggatggcctctgatccctggagcagtggcccacttgcccggtgctctcagaaacctcagagctggtggggctccagatcaggccttggcctctgagccctgcctgctctgggccatgcagaggaaggacagagggtgggcgcagggcaccaactcagggacatcccctctcctgggcgacgtcagtggaccttcctgcacccccagcctggaatgtaaatcagctgtgtggtgcccgcgtggctggaaggaaatagacccttttgtagctccctgttctggctgtgcgtcctcatgccgggtcccaccttaagacctccgggcccttggcctgcatgtagaggaggctggcctgatagctcagacccttagagccaggaggggggcctgagcatcccatctctcccaggccacaaagctggtgcccacttcccccaggcctgtgccagtgatcttcgaacccccacgttagggcttggcccctccccttttacggggtgacctgctaatggcttagactctaagccactgtgtgtggatcctgaagccagacccaggggcagggcctgatggggaggagtgttaggatctaccctagctctctgca

SEQ ID NO: 104292 - DNA, 1049 bp, Homo sapiens
tctgggtgctgagccacgccctatgcacagcccctggtgggaacctgcctgggtgcccaggtaccttggtctgcccttgaagggctgcagagagcaagggggccaggtccggtggccccatctttaggtgccacccaggctcttggctgtgcccatgcttgggagggtggggcacagtggccacctttcctctgcccccaggacctgaagcccggcaacctggctgtgaacgaagactgtgagctgaaggtgtgtgctgcctggcagggggccctgaggtggggcaggggccccctctggatctgcccatctatccacctgtcaggcctgggcagggggccaaggtcccaggctctgggcagtggctgaggagctggtgggtgggtgagcccaagaggcagtggtacacaacatgccgtacccagggcacctgctccgtcccgagggctgctgggcttggtgcactggccagagggaggagctcggggcagtttggggtccgagggcgtggcctcaagtccttgaaggttgtcaggaggccccagcttgggagcttcaagtccaaccccccggggtctcctggaccgtgggtggcctgtccgctccttgggagtcccctagaacccacctccccaattcttcccacagatcctggacttcggcctggccaggcaggcagacagtgagatgactgggtacgtggtgacccggtggtaccgggctcccgaggtcatcttgaattggatgcgctacacgcagacgggtgagaagctgcccagagatctgggcctctcaggctgcaccatctgcttctccacttcttcacggacagccctgtggtggctgctcccagggaggctgttgagctggggtgggagccgggcaggtgggctgtgttggtgtctcctccctccccgtctcatcctgtccccctgcccacggagctgaccagggcttctatctcagtggacatctggtctgtgggctgcatcatggcggagatgatcacaggcaagacgctgttcaagggcagcgaccgtatcctccag

SEQ ID NO: 104293 - DNA, 2452 bp, Homo sapiens
tcctgagtagctgggactacaggcatgtgccacaacgcacggctagtatttttagtagagacggggtttcaccatgttgggcaggctggtctcgaacccctgacctcaggtgatctgcctgcctcagcctcccaaagtgctaggattacaggcctgagccactgcgcccggcccatagttttcttgatgaaagtgtcaggagttcggggcaggggaagctacccaggggtactctgagcagccccagcctggcccccttggccaggcatcactgggttttgtccccaacaggattctcccagcaacaagctgctgtacgccaaggagatctccacctacaagaagatggtggaggagtaagtctgcctgccctccaggccaggcccccatgcccaccctcgaccccctgcggggaggttcaggccttggtttcccccaccaccccctttgtggtccctgccgcccacactgtatgatgctcccacccctgcagttactacaaggggatccggcagatggtgcaggtcagcgaccaggacatgaacacacacctggcagagatttcccgggtaaggagaccaccagggacgcacccacagccctccccgctcccactaccccatgctgagcctggccctgagctgcagggcaggggtaatgtggtgctgagggggagagagggtggggcgggacctcgaggtgggctcggccatgtgaagtgagccacagctgcgtgtggggagtatgagctgctcctgcttggagccaggccctgcccacagcgccccctccctgcggctgcacccacggccgtgcccacagcgccccctccctgcggctgcaccctcggccgtgcccacagcgccccctccctgcggctccatccacggccgtgtccacagcgccccctccctgcggctgcacccacggccgtgcccacagcgccccctccctgcggctccacccacagccctgctcacagcacccgtccctgtgggtccatccacagccgtgcgtcacacagggagacactgagatggttggatgtgcacaactctgcctgcgtgggtgtctgtctgaggctgtgccacatggggggccccaagtgccagctgtgcccaaggccccagctgcttccccggggaggcctcgtcctgggcgtcccgtactactcctgccagccctggggctcccacagccccttttccaccctgactgtcccgtcaccccccaggcgcacacggactccttgaacaccctcgtggcactccaccagctctaccaatacacgcagaagtactatgacgaggtagggtcaggcccccgggggcgggggcaggtggggtgctgggcggtcccccggtgtgctctgatgcgaccctccctcagatcatcaatgccttggaggaggatcctgccgcccagaagatgcagctggccttccgcctgcagcagattgccgctgcactggagaacaaggtcactgacctctgacctacaatctccagtgctgccttgggacataggtacctgaggtacctgagagcccctcaggggaggaggccgagtggctgtggctgaggcccccaccctcccctggaacgcgccccaagccggagtgggtgcagccggaacccgcccagcgtctagactgtagcatcttcctctgagcaataccgccgggcaccgcaccagcaccagccccagccccagctccctccggccgcagaaccagcatcgggtgttcactgtcgagtctccagtgatttgaaaatgtgccttacgctgccacgctgggggcagctggcctccgcctccgcccacgcaccagcagccgcctccatgccctaggttgggcccctgggggatctgagggcctgtggcccccagggcaagttcccagatcctatgtctgtctgtccaccacgagatgggaggaggagaaaaagcggtacgatgccttcctgacctcaccggcctccccaagggtgccggcactctgggtggactcacggctgctgggccccacgtcaaaggtcaagtgagacgtaggtcaagtcctacgtcggggcccagacatcctggggtcctggtctgtcagacaggctgccctagagccccacccagtccggggggactgggagcagttccaagaccaccccacccctttttgtaaatcttgttcattgtaaatcaaatacagcgtctttttcactctgcgggttggctgagtgttcctcctggggctgcagtgcccctgtccaccaccccttccctgggctctgtgggtcctgctgggaggggagctgtggggaggtggagggggctgggaggggtgctgggggaggtggaaggggctgggaggggtactgggggaggtggagggggctgggaggggtgctggggggaggtggagggggctgggaggggtgctggggggaagtggaggggg

SEQ ID NO: 104294 - DNA, 3922 bp, Homo sapiens
ctgagctccacccgtgccccccgactcggggcccccacatgaggtagagggcacaggatttatcggggacagaggccaggaggcagcactcgggggcctttggatgggcctgaagagaggcagtggaggaggcaggcgtgtggagattgaggggccagtgccacctcctgaggagggagctgtgggggccacgatgtcaggtgggccgggcgatgttctcaggtgtggatgagtggtggaggtggccgtgggaaacccacagaggacgttcagaggcttctgcagacacaggtgtttgggctcaggagtggccgaggggtcagctggcatggtaatctgaggggcgggcatgtgtggggtgaggagagggctcccacactgtaggcacagaggaggggctgcaggggttctgggaggagggccagggtgccacagccgcctgtccagggtcctgacggcatggtctgcagggttcctccctgcacgtgggcagtgacttgctcaagttcatggagccggtgaccatgcaggaatctgggaccttcgcctttcggaccccaaaggtacggctccagggcaggccggctcggctgctggaccccagggccccgggtggggtggggggtcaccttcaggactgtgaggggaggggcagcagggagaccccagggaccagagcccagccaggggctcgccatgccctgtgctgctggggaagccccctctgccctctgcctccctggggacagagtggcacagagcagcgtccatggggttcccgaacttccgacacctgaaggcctcccctgctgcccttggctgggaagggacccggtggccacagggaggctgcccttgtgacccccgccccacgcccctctgtgggggcaggaagtgcagtgtgcccctgcgtgtcccccagctgtcccacgatgccaacgagacgctgcccctgcacctctacgtcaagtcttacggcaagaatatcgacagcaagctccatggtgggggccacgggcgcagtggggggcgggcaggggacgggtgggcacaaggcggtgggtggggggacaggtgggcgcagtggggagcaggtcgggggcgggcaggcacggggtgaccactgacggcagctctccccgcagtgaccctctacaactgctcctttggccgcagcgactgcagcctgtgccgggccgctaaccccgactacaggtgtgcgtggtgcgggggccagagcaggtgcgtgtatgaggccctgtgcaacaccacctccgagtgcccgccgcccgtcatcaccagggtgagcccctcgaagcctggcctacaccttccctcgtccctggcatgagcccctccctgctcacccggctctgtggtttcagatccagcctgagacgggccccctgggtgggggcatccgcatcaccatcctggggtccaatttgggcgtccaagcaggggacatccagaggatctctgtggccggccggaactgctcctttcagccggaacgttactccgtgtccacccggtgagtggacggccctggtctgggccctgtcagctgggtcagtacccacgctggggttccgggtgactgggtgggtggggaggctgagggggtgagggtgtcagggtgtggggtgggtcggggagtgcctgggccacactgcctgtcgcccgccaggatcgtgtgtgtgatcgaggctgcggagacgcctttcacggggggtgtcgaggtggacgtcttcgggaaactgggccgttcgcctcccaatgtccagttcaccttccaagtaagcacccggcctcggggacctgccgaacccgggaggaccgggaggaggggctctgcccgccgcctccccacgacagttaccatccagcccaggaccgagggcgtcctgtgccccgtcctcacccgagtgcccctgcggctctttcagcagcccaagcctctcagtgtggagccgcagcagggaccgcaggcgggcggcaccacactgaccatccacggcacccacctggacacgggctcccaggaggacgtgcgggtgaccctcaacggcgtcccgtgtaaagtgtgggtgtcaccgccagctgctgagtctggttggccctggccctgggtatggaggggggcacttactgagacctgagtggccctgaggggatggcggggccagcctggtcgggctggggctggtcccgggggaggggttgatgcagaccagcaccctccctcccccaggacgaagtttggggcgcagctccagtgtgtcactggcccccaggcgacacggggccagatgcttctggaggtctcctacggggggtcccccgtgcccaaccccggcatcttcttcacctaccgcgaaaaccccgtactgcgagccttcgagccgctacgaagctttgccaggtgaggctggtgtccccccgcccccctctgctccccacacccagctgcctcctcagtgcccttggctgactgtgctgaaaggaatgtggtggggctggtctgtgcagcgggaggcggcctccggaaaaccccactgcactccagatccacttcctcctagaaacccagatgggcacaccagaggctccacgctcaccaggccccgtgtgccccccgcccacttgcggcacagtctcgtgctcagcacgtcccaccgcgttgcccctttgcccaccgagacccacacatgcacctggaagccccgtgtggtcagggccagggtgggcggggacgggagggcggaggctgcagggaccacccctgccagccgagcccacgaaggcactgccctccgcagtggtggccgcagcatcaacgtcacgggtcagggcttcagcctgatccagaggtttgccatggtggtcatcgcggagcccctgcagtcctggcagccgccgcgggaggctgaatccctgcagcccatgacggtcagtcctggcgtgggctcagctctggcaccggcccatgggatcgtgcccaggaagggcggggtctgcgcccgggggctgacagctgggacttgcctgcaggtggtgggtacagactacgtgttccacaatgacaccaaggtcgtcttcctgtccccggctgtgcctgaggagccagaggcctacaacctcacggtgctgatcgagatggacgggcaccgtgccctgctcagaacagaggccggggccttcgagtacgtgcctgaccccacctttgagaacttcacaggtggcgtcaagaagcaggtcaacaagctcatccacgcccgggtgaggacggtgcagccccgggtgtctgggtcctgctcgggtctgggctgagagctggtccacctgtccctggttccctcctcctcaccccgaccactgccgcctccccagggcaccaatctgaacaaggcgatgacgctgcaggaggccgaggccttcgtgggtgccgagcgctgcaccatgaagacgctgacggagaccgacctgtactgtgagcccccggaggtgcagcccccgcccaagcggcggcagaaacgagacaccacacacaacctgcccgagttcattgtgcgtgagcggggactggcggggggtgcccccacgggaccgcgctgaacccggccccccacacaggtgaagttcggctctcgcgagtgggtgctgggccgcgtggagtacgacacacgggtgagcgacgtgccgctcagcctcatcttgccgctggtcatcgtgcccatggtggtcgtcatcgcggtgtctgtctactgctactggtgagcccgccccccggctgtgccaacaccctgagccctcggccctcccgcctcggcccctctggcctcatccgccgccctgcacaggcaggcgtgtagatccacctcctcatccgggcagctgagcggccagccccggcagaacc

SEQ ID NO: 104295 - DNA, 1050 bp, Homo sapiens
cccaggagtcagccccaggggaggcccagcctggccctcggccctgcggccgccaccttgacacctccccctctgctgtctgcagaccacgtggccgtgaccatccagctcctccttagacgaggcaacatcttcctcacgtcctaccagtaccccttctacgactgccgccaggccatgagcctggaggagaacctgccgtgagtgtcttgtgcccatcgaccccaccctgcccgtccaccccagccctgctcacgatcccctctggatgcaggtgcatctcctgcgtgagcaaccgctggacctgccagtgggacctgcgctaccacgagtgccgggaggcttcgcccaaccctgaggacggcatcgtccgtgcccacatggtgaggggcctcggggcctcaggggactgttcagggcatggctgctccgctgtgcccaggcagcacctgaccagccttactctcccaggaggacagctgtccccagttcctgggacccagccccctggtgatccccatgaaccacgagacagatgtgaacttccagggcaagaacctggacaccgtgaaggtgcggagggaggggtgccggctggtgacaggcaggctcaggtgcggagggaggggtgccggccggtgacaggcaggctcaggtacggagggaggggtgccggccggtgacaggcaggctcaggtgcggagggaggggtgccggctgtgacaggcaggctcaggtgcggagggaggggtgccggccggtgacaggcaggctcaggtgcggagggaggggtgccggctgtgacaggcaggctcaggtgcggagggaggggtgccggccggtgacaggcaggctcaggtgcggagggaggggtgccggccggtgacaggcaggctcaggtacggagggagggggtgccggttggtgacaggcaggctcaggtgcggagggagggggtgccggccggtgacaggcaggctcaggtgcggagggaggggtgccggccggtgacaggcaggctcaggtgcggagggaggggtgccggccggt

SEQ ID NO: 104296 - DNA, 1878 bp, Homo sapiens
ccgtgtccttcacctctgccccatgggtgagccacctgttccaacgtccaggggtctgtctgtcagcctgagcctgtgcgctggggccggtgcgtcccgaccacctggagctccttggggtcacaggtcagggggcatgaatgtgagcacttgagagcctttctgggggcgtcaactccttgcctcggggataggcctgccggtgttttcagcacctccgggagggatcctgtagcaggcgatggcagtgccttggccccagtggtcagtcagggtggacttgaggagggctgagaagtggtctccggcgagacctcgaggatggcgggggtgtgaagcaggaaggggcggagctccaggttcctcagttcgtggagtggcgtgaccctctctcccatgttctgacgtttggggcagggactggagagggatttgatcgggggtcctctgggtcggggctcccctgacccttctctcttcccacagggtgcggggggcaatggcactgcagctctgggccctgaccctgctgggcctgctgggcgcaggtgccagcctgaggccccgcaagctggacttcttccgcagcgagaaagagctgaaccacctggctgtggatgaggcctcaggcgtggtgtacctgggggcggtgaatgccctctaccagctggatgcgaagctgcagctggagcagcaggtggccacgggcccggccctggacaacaagaagtgcacgccgcccatcgaggccagccagtgccatgaggctgagatgactgacaatgtcaaccagctgctgctgctcgaccctcccaggaagcgcctggtggagtgcggcagcctcttcaagggcatctgcgctctgcgcgccctgagcaacatctccctccgcctgttctacgaggacggcagcggggagaagtctttcgtggccagcaatgatgagggcgtggccacagtggggctggtgagctccacgggtcctggtggtgaccgcgtgctgtttgtgggcaaaggcaatgggccacacgacaacggcatcatcgtgagcactcggctgttggaccggactgacagcagggaggcctttgaagcctacacggaccacgccacctacaaggccggctacctgtccaccaacacacagcagttcgtggcggccttcgaggacggcccctacgtcttctttgtcttcaaccagcaggacaagcacccggcccggaaccgcacgctgctggcacgcatgtgcagagaagaccccaactactactcctacctggagatggacctgcagtgccgggaccccgacatccacgccgctgcctttggcacctgcctggccgcctccgtggctgcgcctggctctggcagggtgctatatgctgtcttcagcagagacagccggagcagtggggggcccggtgcgggcctctgcctgttcccgctggacaaggtgcacgccaagatggaggccaaccgcaacgcctgttacacaggcacccgggaggcccgtgacatcttctacaagcccttccacggcgatatccagtgcggcggccacgcgccggtatgggcctcagtgtgttctcgcagggcccggactgcaggcgtccgttcgtgggtttgcgtgtcccagcctgctggggagggtgcacgtgagcagtgtggccgtggctctcgccagcctgggcgcttgcgtgggtgggtgccgcatctctcaatgccattcacgctggcgccagtcccaggcctgtgtcgggcactggggaacacaacagtgagcacggtggggctccctgccatgtgggttctgttctcggggacgtgtgtaggacgtgtgccggagggaagggaagggcctgtcccgagtcttggagc

SEQ ID NO: 104297 - DNA, 1097 bp, Homo sapiens
tggaggtgggagaagccagaggccgggcagaggaggtagacttgggccaggaagggccccagactgagggtggagggatcatggtgttattctctgggaggggaaatccatggccgttctccacggtgagggccagggaagaggacggcagaaagcctcctccaggagagtggagtatgggtcttgcctctggcttcctgagtggatcgatcactcaggggaggttgttcgagggcgtgcgggatgggcgggacagaagccagcctcccctgaccttggctgcccccgcccacgcctggggcctgggcccgtggaggctggagcctgggggtgtgctgcagggagtgggcatggggcacacaggccggtgtggcgtcccttcaagatggcaggtctgggggtaccgtgccaccgccatggctgccacctccgtcgggagctgcagtctccagtccccgcgggtcccagctttctcaggagacccggtgctgccctgtgctttggctcctgagtttgccagaggagcagccttttgcccttttcacaaaggtgctgttgagtctcaggtcgaaaggatgccctctgccccccgaaacctcatcctctccccagccctttggccgggttaacccttacctgtgcagcagggtagcacagtccatgcacagctgtggagctcacctcccttcccgccgcccccctgctggtgtcactgcatgtccaaccccgggtcccgctgcacagggcacatgaggatcccggtggggtgggaggagagtggggcctggccctgcgggaggaggtgctttgctggcacacaacctggccaggctgcagtggactctggggcctgagcaggattcagtagctgaaccttggttgtaggggtggctattgagggcctggagagtcacatcttgaggcagagtggagcctaccttcttttctttctttcttttcttttcctttttttttttttttttttttttgagacagagtcttgctctttccccaggctggagtgcaatggtgtgatctcagctctctgcagcctcaggtgatccgcccgcctcagcctcccaaagtgctgggattac

SEQ ID NO: 104298 - DNA, 1064 bp, Homo sapiens
cagattgggccccctgtcagattggcgtctgggggcactgtctgctccttccaggcagctttgaggacttctcagaggaggaacccccctgccctgctggtccaaagtggggtgctgaaggccgaggcagtttccagggggctatgcctcaggctgcgtgggtggctgtggtaggagcgtgctctgtgattgtcactgcatttgcctggggtccatgctctgtcctcagctggggtctggctttgaacctaggtgagttctggggctctgaggacaggccagaagcaggagtgtgggggggtctctcctgggggaagcaagggaggcctgggcctgtgtgactcagacgtggtagggtggcatgggagccacagcttggggggatggcggggggcttgagggtaatccaagtatttcagggacccagccatggagagtggggtttgaggaccagcaggaggtgaggactctgtggatcccagccctgtcaggtgtgttttcagagctggggcctgctttggaggagatggagggcacagaacactgctgagcccaggccctgtgcccagccttgctccagccttaccggcttgacaccagggcctccctcccaccagcgagggggagaagctattttaagtggagccagcagttgacaggggcaaggggcaggtggtgggagggaggtgctccagcatggcccccccgactccctctcagcctcagagattggccaggggagctgaggggcttggcctccccactcctatgttggcaccgagcctgatctggtgaccaccctgagggacttcaggagaaaaggatgttagggaggagggcgtgaaggtggggcgccccaggcaggccgcccaggcccagcaaagctcgctggagggtcccccagttccacatctagacctggggcccagtggctctcgaccaggccctgtggggtttgaagtcctcagctccaccatgagcagagcaagcctccgcgtggagcaaggggctggacctggcctccaggggcacccacctccccacacagctccagccacgggcat

SEQ ID NO: 104299 - DNA, 1015 bp, Homo sapiens
gcgccgagcggagatggtctcgcggtgcgggcgctccgggccggccccaggctcagcggcacaggagcctggatttgcccgagctcccgggggccgtccccgcaccccctggggcctgcttggcgcggggggaccagggcggagagcacccgcacctggcgagaccccactgcctgggcctcctcgcggttcccagagtggcgtctgggtggacaccccgagacacagaaagtctcagaagcgggggcgcgagccctgcctgtcccctgctgaccctgcccctccgcaccctgctcctgcaggaagcccctgccctgccagcgcccctggtcgggctattcggcagatctggggagcccgcctccccctgtcatctgggggtctcagagcccggacgccctggggcttcctgccaggcccttgatttctcttcccgaagctccctgggaaaggaagaaaggggtccgtctgcccactgtgggctgtggcagagtcaggacagggggtgagggtgagggtgagggtgagggtgagggtgagggtgagggtgagggtgggccccaaacccggcagatcccggcggcctggagggctccctgtgccccaccttccctggacccccccgccctccccacttaatgtctgacttcggcccttgcttggaggttcggcgcagcctgtgaggctttaaagttgagcttcctcaggagccctttgcgggtgggagagcgaggctgccgggaagtgggggctctcagcctgccccatgcccagatgaccctggcacggaacagctgaacagctggtgggaggagccctccctttcctgtccagaggtgagggtctcccggagggcagggccagcaggcataggtttgtggcgagtcagctttttgcatgttgcatagaaatccccagagccgactgagaagcaagcaggtgggcctggcacatctgagtcctcccacggtacctatggggggcccacctctgtcccggggggtctgggaggcct

SEQ ID NO: 104300 - DNA, 1067 bp, Homo sapiens
ggtagggttgccgtgatgtggattgtggttcaaggcccaagggaagattttggacaggaacaaggcctggctgcttgagggtgggagaaggcagagactgaaagaactaagtcaggctgggggagtttgtcaggatgtggcggggcggatcccgggtgggggaagcagaggaggaggggatgcctggctggggacaggaggaagctgaccagctgcaaggacggggcaggtctgggtggaaggcgggccccagggaggggtgacccagggtgggggcaagagcttggggaatgcttctgtctcctgctcagcacatccagttccgggagggcagtggaggcgtgctccaaggtctggccctgcagacggttcaccacctcttctcaagcccaggggacactaggagcactgaggccaggacttgggacctgggatgccagaagtggggccagctctgtcccagaaaccagaacccccagaaagaggtctcggcccgcccacctcctggccctgaaggaccaggtggggtcccgggtgcagcatcccaaggtgctgctggaggccagggatgtgctgggaggccatctccaggtcccagtttaccctgggaggttgagggcctgagacccctgggaaagggccaaagcccagcagcccccacccctgaaggccgcaggggagcgactggtatgcttccagtctgggagtgagagtctggtgcccacacatctcaagactggcagggaccctcacgttcctctggccaggcgagagtgcactcataatgccctcccctggtaccaagccatggcctcccctcagacctgcggggttcctgtgggggtgctcaggccatggggcctctgtgggcgctcgtgcttcctggacggcggcatggtgggcagggtgctgccctggctgaacctgggtctgaactggggtgcctgaacctaccagacaatgctgtggccgctgggcaggggagaagtggggggcgcggggagcgcaggcccagcccctcccctcccgtcccctcccctcctctccggttctcttctgccctctcc

SEQ ID NO: 104301 - DNA, 1306 bp, Homo sapiens
ctgggtgaacggtgggagagcggggccagagccaggagtctcagcccctgcctgacctccccgaccttcctgcccggccccaggtgcttccggcctgtgctgactcatatgcagacactgtgggagctcatgctcctcggggagcccctgctagtcctggcaccctcgcccgacgtgtcctcggagatggtgctggccttgaccaggtatcgccttggcccggtcccggctggggaagctggaccatcgcggctgtgcctgggctgcccctgcctcacctgctccctgctgcctctgcccacagctgcctgcagcccctcaggttctgctgcgacttccgtccctacttcaccatccatgacagcgagttcaaggagttcaccacacgcacgcaggccccgtaagtgccgcctctgccccgcctcttgcccttgctccgccctgcctctcgcccttcctgcacctccctggacctctgtctctgcctcttctctctctctgtctgtctagaccaaacgtggtcctgggagtcacaaaccctttctttatcaaaacactccagcactggccccacatcctccgagtcggggagcccaagatgtcaggtcaggctcccggtgaggtgcagggggtgctgctcagaagcctcgttgagtgtggggccgcctcagagcccgtggggatggccagagctgcgggcactgaggcctggccaccgggcgtgtctcgtaggagacctgcctaagcaagtcaagctgaaaaagccttcaaggttgaagaccctggacaccaagccaggtctgtgctcccctcgacctggagcccctccaccgtggagaggcctgtcttgtacctggcgggtctctcgggtggggcagccaggcccccagacccctgatcctcttccaggactcagcagcagagctcagaacccttggggaggggtcgctctcttctcttcagtgggtctcggtgtctggggggtgggtgggtgagattttcaggtgcagccaagggcatggggctgcaggcagatgagacccccaccctggctcctctgtggggctgcaggagtgtgggagggaggcccttgaagggtggggcgccagctgtgccctcccgccaggcctctacaccgcttacacggcccacctccaccgcgacaaggcgctgctcaaacggctgctcaaggtatatggtttgtggggcaggggctggggacgcagggagcctggtgtggtgtgaagcgcagcaagggcctggccctctctcccctgcagggcgtgcagaagaagcggccgtcaga

SEQ ID NO: 104302 - DNA, 1064 bp, Homo sapiens
taagtttccctcataagtgtctccctcatcctgcctgttgtggcccttccgctctttgctatcggcctctgtgttagtgcctgtcagatcctccccatcagttctcccctgttgtcagttcctgtcccctttcatgctacctccttcatcccttatctgttagggacccattagtaccctgccctgctgttagtgaccccacctgtcagtgtctccccactgcttctctcctgcctgtcagtgggagaactttcagtgcccgctgtcatcacccctcttgtccaatcactgattcccctttccattatttcctaaccctttccaacactactcgtcttttcctgtcgcgctccccatcacggcttgagatatcaccagtcatctaacctcaccttaccccgcactgccctgttgcttccatccccatcatctcttccttcagcctgtcaccttcccccatgcaccgtactgtcccccgacctgccactctgtgtactcgcagcttccctacctgctttgtccactctcttgttactgactcctcccaatttgctgctcattccctgacctgtcagcaccagctcccccaagtctgtcacttccatttagtccctgcctttcactgcagccccctctttgtcactgtacccactgattttgttctagacccttctcctgtgtcttgttctttcatccacccttccctcatggcctctctctgccctgctcttggcttctccttgcccctgcagttgccgacactgttcactgttcactgaaagaggctcttcacctctttttgatgtccctttttctggtttatcttccctttgtttttattttttactttaaaatgttgtgggtacacaataggtgtatatatctctcccctttgacttttctaactcacttcagttaatctttggaatgtgagaggcagctagctttgagacaaattgggggacagagtctcccatgctgagaggacagcacatgcaaaggccctgaagtgggaaattttgggtgtgatatcctccaggaacctagataagactgatgtgctt

SEQ ID NO: 104303 - DNA, 1044 bp, Homo sapiens
tctgtggtcagccttttgtttttctaagtaaaaaattagataagataaattccatctactattactataatttttaaaatgtttcatgtaacattgaaaagatttgtaatctcacagtaaagttttaactttgtgaaagatgtaggctttatgttttcactttctatcagaatagtgaaaactttgttgctaaccagccctggcctgcagaatgacatgtgagacactaggaaggactgtccagacaaagacagcaagagctgggatgtttgggaagcagaggaggggctggatcagtggtgattcctcaggtgcctatggcaagacctagtgcccagttggtgtatgtgtgaggaggtgcctgcttcagagagaaccctgggtgtgattcagcaagatggggacgatgagtggatgggccgggtggctgggggaggcagaggagtgagcgcagggtcaggcagcatcagctgtcttgattttgacttgctgagtttgctcacaaatgtgagactttcagaggggagatgtccagtgttcactcaggacagaagacatccctgacacatgggagagacacctgggcgcattcgcctaacagaactacagagcaagcaagagcattgaggggcatgtcgagcacgctggtgggtgggggacagtgtggggaaggagggcaaaggagggggttagcccagaggagaacctggggaggcaggtcctggagctgggggtgcagcctcagagctgttgagcagctgggaagtctgctaactttgtgagcccaacctggagaggtctgatgggaatggttactggggagggcccccaccatcctgagctctgggaatcttgtgtgttcatgctgcagatggacttccaggacttgggtctagtgttgctgagggtggatctgcagaggtgagagaaatgacccctttggacttgggtctagtgttgctgaaggtggatttgcaagggtgagagacgtgacccctttgccctcgtttgcagctctgcggccgtcacgatgttctggaagtt

SEQ ID NO: 104304 - DNA, 1664 bp, Homo sapiens
cttggatccgccgtctgagcagcccactgcgtctgtgatgggtgctgtgcccccccatggcctcacgcttagctgtctacaccttgttggcactggtcatcagccagctgcaggatgcctctttttcttttctaaaacctcagtcttctttccccttcaaccgctcatgggttttggtcagcagctggcgtcttgtgcactctgtgctccctggatgtgtgttctaggcctggggctgccagtgatggccatcagctcagctcagctctgtctataccattcgtttctgttggaaaaacccgaaccagtaggtattggatggcagctgctcacggcagcctgtgctgccccacctgggacagctgtgtcctgtcggtgcagagccacaggggtccctgtgcagtggcccccccccccccccccccgcccagaccctcacatacaccactgcctggtaggactctgcctgtcccttgagggggctttcttacaatcttgtctgggtctttccgttatttctgcttaatataattactagttcaactttcccatgagagtttttggaggaggtgtctcagggttgtcagggtcggccccgcctgcctctcaggtgtgtgtgatttcaggtgattacgtttttgaagaagaaggacaagttcatcagcctggtgttgaagcacatcggcacctcagcgcttatggacctgctgctgcgcctggtcagctgtgtggagccagccgggctccggcaggacgtcctgcacgtgagtgcgggagtccccccccgttcccgagggcaggggtgctgcaggaagccagctggttaagtgcaggagctcagagcaccagggcgcccggcccccatctctccacctagcgtgcatttctccgtggggctgttaggggttcttgtcaaggattgtggcctgtaccttttccactgtcccgacttaactcgctcagaagcacagagcagagaggtcccttctccccgcagtctccagcctccggctctgtgaagaggccgaaatggactttcctcgcctgcctccttttcccctgccagcgcccacccctgtggcttagagcaggaggtcagtgaggtgctagccctgcgtccaggcctgtgcctgccaggagagccccggtggacagcagttccctgcagagccccgttgtttaccctggagtgtggatgcgtctgttctgatggtgtttagtcagtgagaacaggtgctacagttcccgaaaagaggaggatgccccccagataagcccaggaaatccgtgctgacaaacttctgctcactgttcggccagctttgtttgtggtgaagtttaaaatagagtagagtaaaccctgaggcgctctgcctgtttcccagctcctggaatcaggactcatccgatgaccactctcactcttaggttagtaatgcttcctcagggaggagcttctcaccaggaatgactgaccgccaccaacctttacacagtggacacaggatcagtactagctgtggtcatagccgttagtgggaagcctgcagaactgtacgtcaggcagccttttagctgctttacttgattcacttcacgaagtagccacggggggacagctcatcccatttttggataaggaatttaggcacagggcgcagcag

SEQ ID NO: 104305 - DNA, 1049 bp, Homo sapiens
ggcaatggagagacggggagaaggcccaggggaagacaggggtcagggggcaattccaggagttggaggagaagggagagggtccttttctcgggcttcatctttagggcgctcagcagtatgagccccgaaccgcaccctcctctggtgtttggtgaggaccgcggaggctggggctgtgcgtgcgcagcagtcagggcctgcaaagtccacacagacgtggccgccagccagccctgcccagtccagggatgggtggaggggtgcgtgccgccttcagaccctgactcacgctgtccccctgccccgccccccagctgttccagaagtgctgcctggtgcagaggatcctggaggcctgggaagccaacgaccacacgcagtaagagccgctcggacgtggagggacccagcctggccagtcagggatgcagagacgcacctcacccaagccctggtgacgctgcgtgcaggactgcaggatcgggtggagtgtagggtgtgcgacgtggctccacgttctggggctgctgtgcaaggggcccttctactgggcggacagctgcaaatgctacttggggaggggacacagggagccgacaggaagcggtcccgtccccaccaggcacctgctctggcccccgcccagcctggctttgccctcttgtgggtccgctgtccgttcctgatcttccccaggaactcgggccctccgtcagcactcgcacacagggacgcgttattttggtctttccatcttctgcttaatgggtgctccctctggtcaggacacatgtcccgcttattgtcgtgggcccagagccatccccacccgtttgctgtcctgctgggaactgtctggctctgggcgatatgaggagggactccagggagctgggaggggtctgagtgcagctgtggggaagcagaggccgagctgggctgtacagcatggaggtcccgcccaaccctccccttggggtgctgagcctgagcttggtagctggcagcatgggctcacctcctgcgccactgctgccaccagcggg

SEQ ID NO: 104306 - DNA, 1044 bp, Homo sapiens
atgcggtcactgcagcaggcctcaaacagagctgcgctgggctgcagagtaaaacgccaaggtgagtttccagagggtctgggggagacaggagccgctctccccatagagctcccagaggggcttagttcgggatgtgggagccccgggctggaggggaggacggggaggggcaaggaaagcgactgttccgagctccacagaggggcctctcccagccccaccgcacaggcccatgacagaccgagccatgggcatggcctgagctgcctgggaaaagggtggcggcaccccacacagcccggcttgctcacactgtcctcgtcagcgtcgatgttgaagttgatctctgcgatcctgtcaaacggggcactgcaagagcaagggggatggcttcagcgttcctccaggcccactgctcatctggggcctcagtgctcctcccccggtgctcatcgggggcctcagcaccctcacacaactgggaacacctgctgtctcccggggacatcagacggcactcccggcaagacctcagggagctgcctccacgggagctcagcagcagggagagccgcgcctcgtgcagagtgcgctccaagtagactcacttgatgttgtcgtcctggtcggcaaactcctcatcattgaagccaaactgatccacgaagttggctgtcatctgctggatctggtagtcagagaaggcctgggagggagggagggagggagggacggacagacaccggtcatggaggaggcatcaggcctggaggctgctctttgggaaccacaatctctctagttgttcgggagcttctcctccagcacaagtgggcagtaaactctgttcagggctcacgattctaccaaaactcaggctgcgcgctcgctgcggtcacatctgagatacgccccatattctctgactttcgagtccatctgccgtgtcctcagtgctctcatcaaggtggagtgactttggggttctcccttcagacccaccccgccccatacgtgctcggagacgagcccccgctcccc

SEQ ID NO: 104307 - DNA, 1107 bp, Homo sapiens
tgaggtgcccctctgtcctccagcagggcacgagtgacctgagaggcccactcaggcagaagagacgcaagctgggccgtccaactggtttcaactgccagctttaccaatgcagcatttattttaaaattaaattaaattaaaaaaaaaaaagattgcatcaccaggtagttttctcgattaaggaggcagcctgaccagggtgggccgtggccgggcggcagcagcatcacactgggccatttaaggcagctccttctggcggggcatctgtcttcctgcaggaatggggtggggttggaaccgtgcgggctgcgggccctgtccacaccccctacccccacactcaacctgctcacccgtcctttgtcactgtccccagggtggccaccatggctggggctgctgtgactgccatgatgggccctagggggaccgccacggccagtgcagaagagactgctggggtgggtatggcggggccagccttgctcagtgctgtggtgatggccacagtagcctcggggggcacagccacggctggggcagcagtcacttcctttggcgcggggcaggcagggcttaacagccggctgtcagcacacccgaccctgtgtggcaaacatggactccggttacgggcacccccaccctcagtgccaccccgcctcatgcccaaggaccagctggacaaaaaggtccaggcggcctgggagcaccatctttggcccctctcactcctgccctttgtggggtggcccaggttgtgcccagctaggcagctctgctgccccaagttccaagtactgggacaagctgcctgtccattgatgacctcaaacctcctccaggcagcactcagatcctgctcatcatcaagcgcctcattcttcaaggaccccagagcctcctgtgctatgatctcaacttcagcctcacactggacacagtctggggaaacctcccaggggatgggagggtagagaggaccctgccgggcatctaaggggcttgctctggagggggtcgggcaccccaaggcccagcctggccacgagcagcagacgggccccctggcttcctgcagggcgacgacactgtgtctga

SEQ ID NO: 104308 - DNA, 1048 bp, Homo sapiens
tatgaggagaagggggaacgcaggggccaggtgccgtgcaggtctgtgtgggagtatgtggaccggctgagcaagaggacgcctgtgttccacaattacatgtatgcgcccgaggacgcagaggtaagctggggcctgggtcgggtaggcggctcctgcccgacccaggtcctcaaccacaggcccaccctcaggtcctgcggccctacagcaacgtgtccaacctgaaggtgtgggacttctacactgaggagacgctggccgagggccctccctatgactgggaactggcccaggggccccctgaacccccagaggaagaacggtctgatggaggcgctccccagagcaggcgccgcgtggtgtggccctgttacgacagctgcccgcgggcccagcctgacgccatctcacgcctgctggaggtgcgtgtgatcccagagcagggtctggcctggcacccccctcctctcgctcagacaccagggtcgtgcgtgtgtgtgtacactcgtacatgcacgtaagtccggttacccctgggggttggtgtggccctgccgtctccccaccatgtgaactgcctactggcctggggtggctgtggctccccagggccccgcaccactcagtgggtgcttccagacagtgacaggagggccgtcatcagagaccctcaggtctcagtacacagcctccactctgagcacgtgtgttttccctgacctggctttgagcagctcaggcacctgttgaggagtcagcccttagagacgacagtgttttactccctctgccagaccgcctgccccacctaacgtgagcagctctgggttcttgccctgagagcttggggttgacattgaggcctctcttacccctcactgtgccatccctggtgggcctggactgaacaaggcagagatgcctgggagggagaaaggagactgcgattgggtggtggctgggttggtgtgtaaggcctgaggcagtgtcctgcgcgtggtgctaccttttggggccatcccggagtctctgtgggactgagcag

SEQ ID NO: 104309 - DNA, 1031 bp, Homo sapiens
ccgccaccgcgcccggctgatttttttgtattgtatttttagtagagacagggttttaccgtgttagccaggatgatctcgatctcctgacctggtgatccgcccgcctcggcctcccaaagtgctgggattacaggcgtgagccactgcgcctggccagctctgacctttttacaaggatacactgggccctggttggcgtccaaagcaggctggtgctgcgtcctcactgtgagctgggcgcctgcagtgtggcagccgtcagaggacacagggcgtgttgggctggcattgtgcttggcctgtagtgaccacttggtggacgaggggacattgcctctctcagtcccaccctcgggccttgcagaagcaggtgagcctgggcagggccaggcgcccagagaccctctgtggaccccaggcatctcccagccctttgggctgccagtcctccctgtgccttcaggccacgtcgtctggaccgtaaacctcagcctgggactcagatctgcctgtgtcctggactgagctgctctccgtccttttggactgggctcaggctctgagcccaccctctcccctcttcgggaagcctccaggtcgcctcttctccaggccacacctcttgggcacctcctgttgctgtgccctggacagaggcgtctacatgctcatgtgtggagcgttctgagctgtgcccatcacaagccctggccccctgagtggaggacaaagggccaggatgtggagggagggactcagagacagacttgctctaagctggtttgagtgggaagaaaggaagtgttagaggagagcccgggatccccaccgcatagcccttctgctgccacggagtgctctgcggcctgccctgccctggcagagaggcccacaccaggatggctcttcccactttcctgcgatcagggacttggggctgacccctgctgtctccaggctccctgggggcttggtggaaccctctgacctgtaggcacccccaagctgggcacgcccaggcctggggc

SEQ ID NO: 104310 - DNA, 1785 bp, Homo sapiens
gctgactctcgtgggcctcagaaccctgtcccggaacctggtcaagaacgccaagaagaccatcgggcggcagcatgtcactcgcaagaagtacaacccccccagctgggagcaccggggccagccgccccctgaggaccaggaggacgagatctcaggtggaggggtgggggtggagtcctgggtggtctctggatgctgacattggccagggaggatcagggcaggcggagtggccccgtgatgaccacgtgtgcccggcctgtgcagtgtcggaggagctggagcccagcacgctgaccccgtcctcagccctgaagccctccgaccgcatgaccatgagcagcctggtggaaagggcttgctgtcgcgactaccagcgcctcggtctgggcaccctgagcagcagcctgagccgggccaagtctgagcccttccgcatttctccggtcaaccgcatgtatgccatctgccgcaggtgagggccggccagggctggcccgggtggtggacacgtgactgggtgtcttccctgcccgctgtgggcctgggccacggcttctggtcatgtaaggaatgtggagggggagactccgggcagagggacgggccacagggctggggggtggctggggggccccgtggctgagctggaagcgcctcctgctgggagccatgggctggctcctcttgccctgcttggggcgtgagcctggaggcgggtggggtcgccagccaccttcacgcctctgcctcctctcagctacccagggctgctgatcgtgccccagagtgtccaggacaacgccctgcagcgcgtgtcccgctgctaccgccagaaccgcttccccgtggtctgctggcgcagcgggcggtccaaggcggtgctgctgcgctctggaggcctgcatggcaaaggtgtcgtcggcctcttcaaggcccagaacgcaccttctccaggtacctcctgcgtcctgccctgtgcctgccctgccctatctcaccctcccctccctcagctccgtgtcctcccccaggccagtcccaggcggactcgagtagcctggagcaggagaagtacctgcaggctgtggtcagctccatgccccgctacgccgacgcgtcgggacgcaacacgcttagcggcttctcctcagcccacatgggcagtcacggtgagggtgcttgtgggcagacggtggggcaggggcactttggggggccgtggtggcatttatggtttggcaggcaggccagggaggagcagaaacggcgctggtcatggatgtttgggtgtgggatgaggagcatgccctccgggtgccgtggggcaggggcgggaagcctgtccagaccaagtgtgtgcccagaccaggtgtgtgccctgacctcctgcccgccctgacgtcctgcccgctctccacctctgcgtctgctgcagcttcctgtagggtcctccgggtgctgcctctacgcggctctgtcttaccatttcccacagcctggaaacatcccagatgctcctctgtcctgttccctcccagtgtcactgtttttcctcatcccccacactccaccctccctgcatcccccaatccagactgtctttggagcctctggcctggctctgcctgcagcttggcctctgtcctcgtgtgtcctggttccttgggccttgcccgagctggccttgctgtctctgtccccaccgccacgcacacttcacaggcgccctgcacacactgagctagactggccccaggacggggtggcagataggcccca

SEQ ID NO: 104311 - DNA, 2083 bp, Homo sapiens
gaaaggcatttgggtctcctggacacctgctgccctccctgccagggccccgagtgggtcttctctgtgccctcagcccgtgtctcctttccccacccccagctgctcccagccgtgttgagggccctgaaggggcgagctgcccgccgctgcctcgcccaggagctgcacctgcatgtgcagcagaaccgtgcggtcctggaccaccagcagtttgactttgtcgtccgtatgatgaactgctgcctgcaggtgaggcctcttatcctgctagtgacatggctcatggcgcatgagcgggaacaggcgggcagaccctggtctgtgagtgagagtggagagacggtgcaagagactcctgtgccagtgggcaggggtcctcggtctgcagggaacagggtggagagaaccattgttgggggcaggtgctggggcctggggtctcctgatattgagcctctgaggcagccttggggagctggagccaagggtgtcaggtgctggtctgtggtggttatggggtggtgggggcatggtgggaggtgagtgctgcctgggaggggagaggtcctgacggtctctcgctctacctgcaggactgcacttctctggacgagcatggcattgcggcggctctgctgcctctggtcacagccttctgccgggtgagtgctggcatggctgaggtctccttcccagcccccccttcctggtggctgaggtctccttcccagccccccttcctggtggccgaggtctccttcccagccgcccttcctggctgcatccagctgaccttctcccctggctcctgcagaagctgagcccgggggtgacgcagtttgcatacagctgtgtgcaggagcacgtggtgtggagcacgccacagttctgggaggccatgttctatggggatgtgcagactcacatccgggccctctacctggagcccacggaggacctggcccccgcccaggtgcgcagggactccctgggctgggggctgggggctaggggctggggcagcgtggccccggctcatgcgtgtggtgccgtggcaggaggttggggaggcaccttcccaggaggacgagcgctctgccctagacgtggcttctgagcagcggcgcttgtggccaactctgagtcgtgagaagcagcaggagctggtgcagaaggaggagagcacggtgttcagccaggccatccactatgccaaccgcatgagctacctcctcctgcccctggacagcagcaagagccgcctacttcgggagcgtgccgggctgggcgacctggagagcgccagcaacagcctggtcaccaacaggtgaggcagggactgggggttgggcccagtggaggcggggccgtggtgggcagggcccatgcccacagtttcttctctggcccagcatggctggcagtgtggccgagagctatgacacggagagcggcttcgaggatgcagagacctgcgacgtagctggggctgtggtccgcttcatcaaccgctttgtggacaaggtctgcacggagagtggggtcaccagcgaccacctcaaggggctgcatgtcatggtgccaggtacgggggtttgggctggtgattcccccttggatgggtggggctgggcacaaagtgtgagaactgtcttcccccagacattgtccagatgcacatcgagaccctggaggccgtgcagcgggagagccggaggctgccgcccatccagaaggtttgcgggggccgttggggctgcgggggcccaaggcccgggctgcatcctgagctcctgctcttgttttcgagcagcccaagctgctgcggccgcgcctgctgccgggtgaggagtgtgtgctggacggcctgcgcgtctacctgctgccggatgggcgtgaggagggcgcggggggcagtgctgggggaccagcattgctcccagctgagggcgccgtcttcctcaccacgtaccgggtcatcttcacggggatgcccacggaccccctgggtgagcctgcagactctctggccctgtcgccccctctcccccaggtctttgggatggatgggctttccctg

SEQ ID NO: 104312 - DNA, 1755 bp, Homo sapiens
tgcaggcgaggcggcaggggcccagcaaggggctggaacttggcgtctgatcacaggagcccttgagggtgctgagccaggagtgccttgtccagacagtttcagaggagctggtggccctgagtgcagaatggtgggaggggcagaaggatgggagcggggcagcttggggtgggttggggtgtggagaagctcctgggcagcctggggtggggattggcaggactggctctcacctgcactcagctcttctcccaggacaaggagctgcgcgcggtcttcctgcggctgttcgctcagctgctgcagggctatcgctggtgcctgcacgtcgtgcgcatccacccggagcctgtcatccgcttccataaggtggggtgcctggtggctgggcgtggggtaggagataagcgcatggtggagacccctgagggaccgacctccttctgtcatccaggcagccttcctgggccagcgtgggctggtagaggacgatttcctgatgaaggtgctggagggcatggcctttgctggctttgtgtcagagcgtggggtcccataccgccctacggacctgttcgatgaggtgcacctccaccctgccctcccagccccctgccctggctccgcctgaccatggcttacctaacctcctgcttaccccgctagctggtggcccacgaggtggcaaggatgcgggcggatgagaaccacccccagcgtgtcctgcgtcacgtccaggaactggcagagcagctctacaagaacgtacgagggtagcaggacgggagggcgtcgtaccgccttgatccctgggcccctgccccacacctgccgtctccccacaggagaacccgtacccagccgtggcgatgcacaaggtacagaggcccggtgagagcagccacctgcgacgggtgccccgacccttcccccggctggatgagggcaccgtgcagtggatcgtggaccaggctgcagccaagatgcagggtgcacccccagctgtgaaggccgagaggaggaccaccgtgccctcagggccccccatgagtgcgtaatgagggaggggaaggcaggccccgagcgtggcccaggatgggcgtggggtcaggggtccgagtgtgtgtattctgtccccgcagctgccatactggagcggtgcagtgggctgcatgtcaacagcgcccggcggctggaggttgtgcgcaactgcatctcctacgtgtttgaggggaaaatgcttgaggccaagaaggtgagggctgtgcaggctccagccgggccagggcagcgggtttcagaggagacccaggctgcacttcacccttgtgagtgctgacgctgccccagggcctcctctgcctaacagacagctagaggtggctgggctggccggagggtaggtgggctccaggtctcctctcttgacctcagtgaggggtgggtcgggcctgcgcgggagacccagccagggagatgtacttccatttttagaaatcagaaggtttcactattatgtttcgtctgtgtccttccccttaaattgggtaggcccatacacgacctgttctttgtacttgatggaaaacagagcttgctccctccatacgtgacctgttccttgcatcttatggaaacagagctttttgctcctgctgttttgctctctgtggtgctcacttaacgcctctggggtctttcatcatggccagttggagactcttgtttttcattggctgtatggtgtccctt

SEQ ID NO: 104313 - DNA, 2108 bp, Homo sapiens
agttgaaggtaggcagagagaagaggcagagtgggctccacaacaagctggctgtgacgtgtgtgctcactgctggagccacacgtagtgcaggcacctgtttgtgtgtgtcctttgcgcaggacagggtagaaggctggagcccaaggtgcccccccttcccctaagtgaccggaaggagtgataagtggtccactgcagtagggttggaggaccgtggagccctgtacccactaccttctggggttgagctggtcagctgcttgctggccttgcagccccaggcaccccttagaaggacttgttcattcttgaggggaacaaggctatagactgggaccctggtcatgggctgagggcagagccaggtaccagggccggtgggagctgggggaagaagcagaggagtgtggcgtgggggtcacttgtctctgctttgccccttgatagccttgtgacttcgagccagttgtttggctctctgtgcctcagtttcctcatctggggatggagtgagtcatgctaacctcccaggctgccgtgaggatgcagcgaatgcacaggtgtgaagcagtagcacacaggaggccctggaaatgatgagtttctttcattagtgactgagcagcaggtgtgtgaactctctaggcacagacacaacaggcacttctgagtgggtagaggatcctctctgttctgtcaggctaggacttcagggcgggatgcagggtctcttgggttggggattaggattggcggatagcttgtcttggcctggatctggacatcctgtctggagctgctgggtgcagcaccagggtgctgagggtgcatgagtcctgcctgaggcagcatcccagttgctagtggttaccagctggaaacctctcaggaaaggtggggaggggccctgagaaggtaaatgcctgtgctggccgtgaccctttcacctcagagagtgatggtggccagcgctggcccatctgcaggcccctcacctggtgagtcagggatcaccttctgtgctctggggcaggcatcaggactagacagactgcctctgcccggctcttggcctgatcacagcgtggccagtgctgaggtgtctttgagaacaggagacacatttgatctggccctgacctggccatcggccttccatctccagcagctgagtgtgcatctgcctgggaggaggggctggaccccttggatctgagaaaaagacctttcaccctatggcctcgcctctcctcctgactgtgatgtgctggctgcattcttgagccccatctactgtccccacccacgttcctgccctccctctggagcgggttggggctgtttgggatggcctcaactgcctcccagcctccaccctgggagccggaaggggtccaaggccttgggtcagaactgctcaggtctgatgggcaggggaggttgggggggatggctgtggaagctgcaggggccctgcgcatggcctgctgctgcggccgagggagccatgtgcacgttggggttgggtgggtggcgtagcaggaaggtgctgtccttccttcttttctcttttcctatagctgggttccccacaagcagcagagccggccagggctggtcttcgtgcactgtggggagtgtggtggggaaacaggagaggctgccatccttctttgcctccccacagcacacgctggcctgggccagccctccaggcgtcagagcctggcactgatgatggggtgctgccagcagatgacagaacgcgaggtctgtgttcgcctgcccgcccgcccgcctttcaggcctgccgtctgcgtggggctggccgcagggacattggtgcaggagggagtgctctttgaggggctttcaggacagaagccccagtgttgtccttaggtggccccctcagccccatgttcagaggtggaggtggcaaggaaaccttggtgcccagtgccacccagcacaccgtttggattcgtcctgttgccaaggggaggagtggggagggcaccctccctcctgtgtattctgaggtaaaggcagcactctgatgggcaaggagctcagctgctggaggtcactcctatggcaataga

SEQ ID NO: 104314 - DNA, 1573 bp, Homo sapiens
ctacaacttcttcaacctgatgacgctggtgcttaccactgcgctgctggacgaccagcacctggctgctgagcctggccacggcagccgcaagaagacggccacctgtgcgtgtcacttgtccagccccctgccctcccaggggttctcccctccaacacccccacaggactcccactctagctgcaccccagccccctggctggggaccctctgctgacccatgactgtcctgccccacagcctggcccaaggccctgctggccaccctgtcgctgctgctggaactagccgtctacgggcttctggcctatggcactgtgcactactttggcctggaggttgactggcagcagcgcaccatccactccagaaccagtgagtgccgacctgggggggccagagggcaggggcggaccagtcctcacacccccctcctccaccagctttcaccttccaccagttttctcagtggctgaagacactgacgctgcccactgtgtggctgggtgtggcctccctggtctgggagctgctgagtgccctgtggaggtacatggcccaggaagcagggagggggcacaggtgtgcagggccggcctgacgaccttgggtccttgcccacaggtggacccaggtgcggggctggctacggaagctcagtgctgtagtccaactgtcccttgtgggcactgcgaccgtggccttgttcctgattagcctggtgggtagcgctgcagggctgggggatgggctgggggcagggcagccctgagaacctcccacctgtctccaggtgccgtactcctacgtggagcccgggacccacgggcgcctctggaccggggcccaccgcctgtttggtgccgtggagcacctacagctggccaactcctacggcctcttccgccgcatgactgggcttggtggacggcctgaggtggtgctggagggcagttacgacggccaccactggacggtgagccctcccagggcgggcagggtggtggggcccaggtcagcgggcccagctgacctcggcctgcctggcaggagatcgagttcatgtacaagcctgggaacctgagccggccgcccccggttgtggtgccccaccagccacgcctggactggcagatgtggtttgcagccctgggcccacacacgcacagcccgtggttcacaagcctggtcttgcgcctgctgcagggcaaggagccaggtgcggagcgggcttggggggtgtggagtgggctggggtggagcggggtggggaggggaggggcagggcgggtactgtgggggccacgctgatgcctctcgctgcagtgatccgccttgtccagagccaagtggccaggtatcccttccacaagcagccgcccacctacgtccgagcccagcgctacaagtactggttctcccagcctggggagcaggggtaaggctgggcaccgggtggggtgtggagcccggggtgcaggggtaaggccgggcaccggggggtgtggagcccggggtgcaggggtaaggccgggcaccgggggggggtgtggagcccggggtgcagggg

SEQ ID NO: 104315 - DNA, 1457 bp, Homo sapiens
ccgcgactcttccggtgagctcccgctgcgcggcgccggggttcgcctctctggcttttgcccacgttacgtcatagacatgcgcgcgacgccgcgcctacgcattttcctgggcgggaacagcaaaatggcgccagaactagtggcgggctgaggacgccgtacccctcggaaggcagccctgcggtccctttgccgcccgttccctcccggacatggaggacgtggaggcgcgcttcgcccacctcttgcagcccatccgcgacctcaccaagaactgggaggtggacgtggcggcccagctgggcgagtatctggaggaggtaagggcggcgggggagtgacgcggggtgggccggcgggtggggctgcggggcgggggctccgggcccggggctgtgggcgccccaccgtctccacgcctatggctatctggcgctctggccgcgcaggtcctcgggctccctgcttcttttcaaactccatctctgcctccccaaatcatcccttgttggattagcgtggacctgtcattgcaggtttctacccgtcagcgagccgtgaatgattgagtgggtggtgaccagccgtttctctaacgtagtggaatagactagaaagcattattgcttttattgcagttattgcgagcatgcttgtgtgtttgagaggtctggatcacgatgtcagaggaattttttatcttggattttcaaaccaatttcaagctattgccatgctctatcctgttagcgattagtgtttcttccatgtttgacagccctgtctagacctgtgttaagctgtctgctccatatttgcgcttcatttttactcctcagcccagctcagtctggcgtccacgacacttaaatgtttcttgtcttgatcagcagtgatctccattctaccaaatccaagggacataagtcagcatttgttggactggccactcctttctttttgaaacatggtggtaggattttttttccctatttcattgcctgatttttcttttctatccagtctctaagtgttgagttcctcaggatggggcctaggtcatcttctgatgcatttaccctgaagtgtcatttatttctatgattttaaatattgcctgtattaggacaactaccagatctgcagctccatcctagatctttcctccaaatctactttacatatccagctgctctcttgacatctagtgggtgtcacgcaaacatctcatttaacatatttaaagtggaactcttcatttttctgcttaaaccccagcttttcccatctcggaaaatgacaccgctgttcaaccaaaagcaaaagctaaatgtggctatagtgaagccccatgcttaacactcagttcatccatgaattccatcagttataccaccggaatatcacttgaattcatctgttgtccattttatttggtctaggccaccattgtc

SEQ ID NO: 104316 - DNA, 1143 bp, Homo sapiens
tctcctacttcagcctcctcagtagctgggattacaggcgcccgccaccacgcctggctaatttttttgtatttttcagtagagacagggtttcaccatgttagccaggatggtcttggtctcctgacctcgtgatccacccgcctcggcctcccaaaatgctgggattacaggtgtgagccaccgtgcctggccccagctaatttttgtatttttagtagagatggggtttcaccatgttggccaggctggtcttgaactcttgacctcgtgatccgcccacctcatcctttgaaagtgctgggattgcaggtgtgagccactgcgactggccacaagccattcttcaactcatttacctgtttgtggcctgtctccaccctagaatgtgaattctgccagggcagggaccatacttatgccctcttttgtctgcttagtagagtgcctggcacataggtgtggacgttaaagtgtttgttaaatgcacatgtgatctgatgaccaaacttctctgctctcatgcatagttggctgagaaaatacggggaactgtgctgggcagagctcctgtggattcaggttttcacatcaagcagggtccatgaggacacctgttcacttggtaaatctccttcctggcttggtcagctcccttcctgctttcttatgtctgctcttccaaacctctgcagcttgaagtcctgatttcctggtttctagtattatctttttccttctgtcattttccacacactaccatgatgttctttttcttttttttgtcctttgtttttttttttttgttttttttttttagataggttcttgccctgttgcccaggctagagtgcagtggtgcaatcatggctcactgcagcctcgatctcccaggctcaagtgatcctcccatctcccaagtagctgggactgcaggcatgtgccaccgcacctggctaattttttgtatttttggtagagatggggtgtcactgtgttgcccaggctgttctcaaactcccaagctcaagtgatccacctgccttggcctcccagagtgctgggattataggtgtgagccattgcactggccagaatgttcttctagtactgtcatgatcctactctcttttatccatttat

SEQ ID NO: 104317 - DNA, 1077 bp, Homo sapiens
tttgagacggagtctcgctctgtcgcccaggctggagtgcagtggcgcgatctcggctcactgcaagctccgcctcccaggttcatgccattctcctgcctcagcctcccgagtagctgggactacaggcgcccgccaccacgcccagctaattttttgtatttttagtagagacgaggtttcaccgtgttagccaggatggtctcgatctcctgacctcatgatctgcccgcctcggcctcccaaagtgctgggattacaggtgtgagccaccgcacccggccttttttttttttttttttttaaagtgtcatttgctgagaaggaatacaggagatgagccagcgttggggaagatgttgggtaaagtatggaagtaaagtgtttggggacatttgaatgtactctgtggacagctatgaatgcagccccagagctaaggagagagagctggtcgggttgggtttggggctcattggcttatggttggcagcttgggcatgggatgaaggaatgtgcatggcggggggtggagcgcctggcgcactgacgtttaaggggtgacagaggagctggggctccgggaggctgaggggagcagaggaaggatggcgactcacctgtaactgtttcctgagttctctgctcagaggatggagacctcagcattttatctctgcctttcctacccctgaggttcccttttcttctctgtgtcggggatcttcctgctggagtctgtcagcctctggcgccttgtggagggagccgctgtgctgccctggttgtttgtagacagtgtgccctgggggccttccacttccaaaacaggtttttgttataggaagtagggggaaacacagagacctgtctctgccccgaaataccagggacaaccggtgagcccacagcatagctagagctgcccgtctcgggaggtgctgggcagagaccaaagatgggtggggctgccctggaagaagcgagtgcagactgggccttggattccccctgtctttgtgttgtttcttgcagctggatcagatctgcatttcttttgacgaaggcaagaccaca

SEQ ID NO: 104318 - DNA, 1836 bp, Homo sapiens
atgagattcctggtttgatttgagaattatttttggaaccaaaattggtggtttcttgtactggaggtttggtggtggtggccaggcctcgtgggggcaccgatggatagctgggaaggccttgggggtgggcccctcctttctgggtcctcactgcctgcatctggtcaccaggtggaatacctctactcactcgtctaccaggcccttgatttcatctctggaaagaggtgagttctgcagccactcactgtgctgccctgcatgtggccagggaggcccctgcagctcctgggatgcccacgggatgtgcttctctctcaggcgggccaagcagctctcttcggtgcaggaggacagggccaatggggttgccagctccggggtcccccaggaggcagagaatgaggtgagtttctttggcatgtggtccccgcccactgtgtgtttgcctgggctccgcccccacgagctctgtctccctccagttcctgtcgctggatgacttccctgactcccggactaacgtggatctcaagaatgatcagacgcccagtgtgagtcctggcctggcccctcttaggctggggtgaggtcagcactttccctggggctgtgttgagctgatggggtgtgggaaggtgtcattgccccatgtgggtcctgttctccactggagtggaagggtgcctggctcacccacccttggcctccatgcaggaggtcctcatcatccccctcctgcccatggccctggtggcccctgatgaaatggagaagaacaacaatcccctgtacaggtagggatctgagcccagcgacggggagggaggcctgcctgggaagggtctctacagcaggcgtgtttttgccagcacagccgtcagggtgaggtcctggccagccggaaggatttcaggatgaacacgtgcgttccccaccccagaggggccttcatgttggagccagagggcatgtcccccatggaaccagcgggcgtttcccccatgccagggacccagaagggtgagggcttggatgcggggggcttggtgggaaggaagggagggtcttctggttggactcttgtggggtgccctgtgcttgccacctctggtcttgggagctccctgtctctgggtgcctgctctagtctagacaggttggctggtgctcatcccacccatctgctgtgccttgattacaagttaacatggtctcagtgccagagacctggtgcctggctcagggccctgctgtctccccccagcccaaggcctggagtctgctggtctctgccctcctgctggccccttggagaggcttgttgaacaccgggcagggaccatcttggagaggggctgggctgaccttgtctgatccctgtctctcccagacaccgggaggactgaggagcagccaatggaagtttccgtgtgcaggagccctgtcccagcactcggcttctcccaggagccaggtgagaagagagctccccggtgggactggcagggcagccaaagaggggaccagggaggcagcacccagtggacagggctccaaggggctgctctcagctgccagcctcatgccccttctgtggcccatgggagtgaggcctcgccccggggaagcagccacagcccccggtgagcctcagcccatcttggttcactgactgccctctgactgccctcctgggtctcctctctgggcagatgtggatggctgcatttaaagaggaacatttgctaagaaataaaatgaaccaagcagagcacagagcacaggagcacgacgaggatggtgcaaggcacccgccaaatcctctgggct

SEQ ID NO: 104319 - DNA, 1620 bp, Homo sapiens
gggctcaagtgatctacccgccttggcctctcaaagcactgggattataggcgtgagccactgtgtccggtccctgtaggttttttttttttttttggacggagtcttgttcttttgcccaggctggagtgcagtggtgtgatatcggctcactgcaacctctgcctcctgggttcaagcgattctcctgcctcggcctcccgagtaggtgggattacaggtgtgcgccaccacacccggctaattttttttgcatttttagtagaggcgggggtttcaccatgttggccaggctggtctcaaactcttgacctcgggtgatctgcccgccttggcctcccaaagtgctgggattacaggcatgagccaccacgcccgacccttgtagggttcttgatgttaacccaaggtggagttcctggggtacccagagccttgaggggagaaagaggagaagtggggaccctgtgactgtctttgcagagtgctgccctgcccaggaggtacatgctgcgggagcgggagggggccccagagcctgcatcctgcgtgaaggtaggagtgttggggccctgacccccggcagggagggatgggcggattcgaggactggctgcctgcccatcatgctcttgctcctgctggcctgtggtgttcccagcctgtggccctttgcacttgctctcttaaagaccccctcatgcgactctgggctcccaccctctctctagtgttcccctctgtgatccaggatttgagtgtggtcggctctgccccaggctgtcactgcacttgttgcctgggctttgggaaggcggctgtgcaccccctactcctctgggagggtggctgtgtaccccctactcctttgggagggtggctgtgaaccccctactcctcctttgggagggtggctgtgcaccccctactcctcctttgggagcgcggctgtgtaccccctactcttcctttgggagggtggctgtgcatcccctactcctttgggagggacggctgtgcaccccctacttctccagcgccttcttgtgctctgtgcccaggagactccagacccctggcagagcctggacccctttgactccttggagtctaagcccttcaagaaaggtaattgggtggaaggtacctccactcaggtacccctggctgggtttcctggggcatgaggtgggggggtgggagtgggctttgcaccctgatcccccagcggctctaagacagtccctgtttgcccccaggtaggccttactctgtgcccccctgtgtggaggaggctctgggacagaagcgcaagaggaagggcgctgccaagctgcaggacttccaccagtggtacctggctgcctgtgagtgggtgtggtgtgcactccggaccactgggagctgggggctgggccagggccagtggaggaggatcagcacccttttcccaatgctgtgggcagctcttggcctggctggtgctgagcatgttctttcacagatgcagaccatgccgacagcaggcggcttcggcgaaagggtccgtcctttgcaggtgaggctgaagtcctcggggaagacagttttactctccttcccctacctcttcccccacct

SEQ ID NO: 104320 - DNA, 1028 bp, Homo sapiens
gggcctggctggccctgagggctgagaaggagaggctgcagcagcaaaagcgaacagaagccctgcgccaggcagctgtgggccagggcgacttccacctgctggatcacagaggccgggctcgctgcaaggctgacttccggggccagtgggtgctgatgtactttggcttcactcactgccctgacatctgcccagacgagctggagaagctggtgcaggtggtgcggcagctggaagcagagcctggtttgcctccagtgcagcctgtcttcatcactgtggaccccgagcgggacgacgttgaagccatggcccgctacgtccaggacttccacccaagactgttgggtctgaccggctccaccaaacaggttgcccaggctagtcacagttaccgcgtgtactacaatgcaggccccaaggatgaggaccaggactacatcgtggaccactccattgccatctacctgctcaaccctgacggcctcttcacggattactacggccggagcagatcggctgagcagatctcagacagtgtgcggcggcacatggcggctttccgcagtgtcctgtcttgagccactgcagtctgggccccatcattaaacgggctgcgtttaatctgtgtgtgtgtgtgatctgtaccagcggcccagggaggccaggcagccctcttctctgcgcaggtgtacataaaagggtttttagggggaagatgagatggcaacactgctttattaggccgggccagccaggagcagacacacggctcctcagtacacattcccccacccctgcctcggtgctccccactcagggctgggccatggagggggcagcgtaggtctggaagcgcttgtgcgctcgctggtgcgtgagcagtctcagggacatggtgtccacggccatctccagcccgggctgctgggttatctccactgtgtagtcattggcctgcaggggtggcacatcagcagggtctggggaccgtctccccctcccacgtatcccaggctactcac

SEQ ID NO: 104321 - DNA, 1026 bp, Homo sapiens
gctatggagtttcctacatgattgcaggcgagaacacgatcttcttccacatctccagcaagttctcaagctcagagacggtgagtctcctgccacagctcaggcctgaggaaggggtgccacctggggctgcccaggaacacaggtgtctttggctggggaggcatccttgcttgtgggaacagaggggtgggtacatatctgaaggtgcatctgaactcttggctcccacagaacgcccagcgctttggaaaccacatccgcaaagccctgctggacattgctgatcttttccaagttcccaaggcctacagctgaaggttggagaaatgccagctgccctttcgtccccacactgtggaggaagggacctgtggcagctcacaggcatgaggggtggccgtgcacaggtgcccaggctccaaggacagctccggcagcaggtcctcgctgggcagatgctgctccctgagggcccaggtggtggaggtggggttggagcaggaagggaattttgatttttttttttcttgatagatactaataaaaataaggctgtgtaattttctctcagcccttaggtacctgtgttttgtttgggaactcggaggccctccccctcccccagctcagaccacagaggtggcaagagaagggctgaagctggaagactgttcatgagggacttgtgtgacctgctttgaaatgtgtgactctgctgagtgacgtaggctctgagatagctgtccacgcccacgtgtttgcttggaataaatacttgcctcagaaccttcacctgttccctggggccatttctgtttgtctgtctgctggagagtgagcccacctcctcccatgcaggggcatgtgtgaggcacccctcttggctgaggcacaaccctgcacgggccccgcagcttcttgtcagcatggaaaggggctgcaggcccaggcctgaagtcttgaggcgccaggtggtcatgtctgcaagagggcacgcaggatgacctgtagcaacagacactc

SEQ ID NO: 104322 - DNA, 1050 bp, Homo sapiens
catgatggaggggtcccacacagtaagtgtcctctgcccatgtgggggtcacagtcgtcgggtgaggtgccccctctgcctcctgtctgcctggagggccagggctactcttcacccctttacttctgccccgcagaaagcagacctgcgagatctcttccagaaggctgctaagaagcaccagaatatgtaccgcctggccatgaccggggcagggatcgacaggcacctcttctgcctttacttggtctccaagtacctaggagtcagctctcctttccttgctgaggtcagcaccgttgttgggtgtgtcctttgtcccactgccctcctacacgcagggcttgggccatctcatgatggagcacggcctgttttcctggcttgctcccctgaagctccctggagtgctgggccagctttcccgcccacaccccacctgggcctgtggtcctgggactgagcaggagcaacatcctctttgtggtgttggtgtccttgtgacagggaacagacaaatatatgatctgtcaggtggtgacagcactactgagactagtgaggctatgtgggggagaggcagagcagagggagggctgggcagctcacacaagccttatgtggcatgatgcacaggggaccacggggtggtggccagggagctcctgcaccctcagcagaaccgtgtctggctcagagtaggtcgcagacaccacgtgttggacaggtgctttgggtatgtggcctctgaccagctgtggcctccattgcaggtgctctcggaaccctggcgtctctccaccagccagatcccccaatcccagatccgcatgttcgacccagagcagcaccccaatcacctgggcgctggaggtggctttggccctgtgagtgctcctgaagggggtgggtgggcagcaccagggccctgagggtttcagtggcgagtgcaggccctgaggtcagacgagaggcaggagcaccttgcttagaggagagcataaccccagacctgcatggaagcagaatgttagctatggactcaggcag

SEQ ID NO: 104323 - DNA, 1063 bp, Homo sapiens
ccacagtctccccaattcctgactcttggccattgatcgtagttgcattttattcgtcattacctggcagaggcaaagaaaggtgagaccctctcccaagaggagcagagaaaactggaagaagatttgctggtagaagtcagtcggtgaggaaggaggggcagggtggggtagggcagagcagaggaaagagggattggggaagaggcagatttatcaagctgcagggaaggtggctgtggagagtggagttaggacagtgggggagaagttaaaactgtagggattggccaacctgggtgaggggatccaagcagtgctagacatgctcttgaatgcccctccttttcctgccctccccccaggtatgctctggcatcccatttcttctggggtctgtggtccatcctccaggcatccatgtccaccatagaatttggttacttggtaagtgaccctggggatgggaatgctagctggggggctggggagcagcagcagccacactcttccaggaggcctggggagtcccgggtggctgtgggcagcctgaggtggatgtagaatgctggtcccacgtcttctcaccactgtgtggggtgggtttccttccctaggactatgcccagtctcggttccagttctacttccagcagaaggggcagctgaccagtgtccactcctcatcctgactccaccctcccactccttggatttctcctggagcctccagggcaggaccttggagggaggaacaacgagcagaaggccctggcgactgggctgagcccccaagtgaaactgaggttcaggagaccggcctgttcctgagtttgagtaggtccccatggctggcaggccagagccccgtgctgtgtatgtaacacaataaacaagcttcttcttcccaccctgtcctggccctgctgagcagcagcagaaagtaccaaaccgagcagtacacacaaagggactcttcagtgctctgggattgaaagtggttagcgttcatgctgccagttggggtcccccatccctccccagtcccctggctgcagcttag

SEQ ID NO: 104324 - DNA, 1033 bp, Homo sapiens
caaaacaccaaacaaaaaaagaaaaaagaaatgattgccaaggccaggcacggtggctcatgcctgtaatcctagcacttcgggaggctgaggtgagcagattgcctgagctcaggagttcaaaaccagcctggacaacacagtgaaaccctgtctctattaaaatacaaaaaaattagccaggcatggcagcatgcacctgtagtcccagctactcgggaggctgaggcaggagaattgcttgaacccgggaggcagaggttgcagtgagccaagatcgcgccactgcactccagcctgggtgacagagcaagactccatttcaaaagaaaaaaagaaatgattgccggacaagtcacacagtgataggagcaggggtgcagtagtctggcctgaggggtagataggcgaggggtgggaaagaatagcagagccagtgtatcctattctttgggcttcaggtacctaaaacagatccaggacctgcccccaactggcctccctgagatgaacctgctggagatgtacagcctgaaggatgagatgggcaacctcaggtgagggcaggcaggacaaggctaatggtaatggtgtccgcccttccagtagttgctgagggctggtgtcagggcctggcctgttagggtggctctgatcctcctctagtcactcctgctcaggacccatgctcccatacccctgtaggaagttactagagtctaccccatcgccagtcgtcttctgccacaatgacatccaggaaggtaggagaaggcatctgagtctcctaacccaagatggaagagccagagggctctggagtgagcagaacctcaccccattcccccagggaacatcttgctgctctcagagccagaaaatgctgacagcctcatgctggtggacttcgagtacagcagttataactataggtgaggctggaaagatggcttcccatagatctgttcccatagggctcttgaaaacaggccagctgcccagggcatttggggactgaatgtccaccttattc

SEQ ID NO: 104325 - DNA, 1079 bp, Homo sapiens
tctcgcccttgccctgtgcacagaattggccccctccccaggctctgcccacagtgataccactgcagaccctgcctgccacgcctccagctctctgactgctcatgagcccccgctgctctatgacctgtccaaggaccctggtgagaactacaacctgctggggggtgtggccggggccaccccagaggtgctgcaagccctgaaacagcttcagctgctcaaggcccagttagacgcagctgtgaccttcggccccagccaggtggcccggggcgaggaccccgccctgcagatctgctgtcatcctggctgcaccccccgcccagcttgctgccattgcccagatccccatgcctgagggcccctcggctggcctgggcatgtgatggctcctcactgggagcctgtgggggaggctcaggtgtctggagggggtttgtgcctgataacgtaataacaccagtggagacttgcagatgtgacaattcgtccaatcctggggtaatgctgtgtgctggtgccggtcccctgtggtacgaatgaggaaactgaggtgcagagaggttcaggacttgtacaagatcacccagccagaaagaggttgggctgggatttgaaccctggtgtcgtggctctggaagctgccctggcgccttggtgatctgcgtgggtcagtgcacacaggcacacgtcagcctcaaggacatgggcacatctgttcacaggagcagcgccacgtgcctttgagtgccaggaacggggtgggagggtgggagggtgtgagggccagaagactcagaagatgcaaagtgcctgagagagacgggatattcccccagaagaagcattcttagagacacaggcactggacctccttggttcttataagaaacctgtctgaagctgggtgatgagttgcacactccaggtggggctaaggggcctggagcccctgctggctcctaggaaggcacagcagcaggccctgagacggctcctctggggcccctccaccctcccaggcctctgcatttcacctgtgcccacacttctgtctcctgccttcaccttttgac

SEQ ID NO: 104326 - DNA, 1082 bp, Homo sapiens
gctttgcagagcgttcaggccgcgggccatttggggactccctgatggagctggatgcagctgtggggaccctgatgacagccataggggacctggggctgcttgaagagacgctggtcatcttcactgcagacaatgggtatgccagcagggcagctgggtgctccggccctgtcacgggccagggccctggaggccttgcagttcagctgcttgccaagaacatagtgggtgagggggtgccaggagatgctggccacgttgcaggggcccaaggtgtagtcaggagacacagtgcacagagagctggtcttggtaggcctgggaggtgccgggctcatgctgggcacctccgggcaagctttgtgacttagaggtgtggggccactggtcaccctcggtggctcagaggctgtggctccatggctcatgagcgcctcctgtgtcccagacctgagaccatgcgtatgtcccgaggcggctgctccggtctcttgcggtgtggaaagggaacgacctacgagggcggtgtccgagagcctgccttggccttctggccaggtcatatcgctcccggtcagtccgcaggccctctccttggaaccctggccccaccaccccaaccttgatggcgaactgagtgactgaccagcctcctgcccccaggcgtgacccacgagctggccagctccctggacctgctgcctaccctggcagccctggctggggccccactgcccaatgtcaccttggatggctttgacctcagccccctgctgctgggcacaggcaaggtagggccggtgacccctgatcccagatccttggcccctgtcctggccttcccctggggtgagtgtgggcagtgcctgagagtctgtgcctcagtgcctcctgcactgagtggcatccaagtggcgccacctctcaggttcctgggtgggcaagaagcggtgcacgtccagggcctcccaccagggctggcagccccaggtatgtgcagtgcttggggcctgccccgccccgtgacccctgactctgcccccagagccctcggcagtctctcttcttctacccgtcct

SEQ ID NO: 104327 - DNA, 1046 bp, Homo sapiens
cgcctcctgaagctccagagggccggggcccgacagtaccgggagaccgcgggctgggacggaactcctccaggaccagggcaccttcagattctcgagcggagatctgatcctcctcgcctagcggtccgggctcagggtcgggggcgtaagtcacttggcgctgaccagcggagtcgggccggggggaaggcgctagagggagcccaggaggagccggtaccgggctgcgggcgcttccgcctcggccccgccccgtgacctgtgacccttgcggggcggggccgggggcggggccgggggcggggccgggggcgggccggggcgaggggcgttgctgcgcgtgctcgctccgaggccgccgtgtgcgcctgaggctgttggctgcggtcttgaaacgggctctgggagcttcctctgcgcggtcggccctggctgaggcgtcccgggctgcgcgcggggctcggcgctgcgcagtgtccggtgtcctctcggtccggagcttctccagaggaggagcggctcgtgcgcccccagacctccggtactgggagactcgggccctcctgtaagagacctgagcgcggagcgttatgggcacccggtgaatgagcaaatggcagggaaaaccgtgcagccccatggactgcgggctcttccttcacgactagcaaaagctttgacaccctttctcctgcgtacgcgtgtctgtgtgcgtgtaagctgtggctgggtgcggggggctgtgtacgtgtctgtgtgtggtgtgtgtggagtgtttgaggcaggtgtgtggtgtttcaggtgtgtgtgcatgtgtggtgtttgaggtgtgtgtgtgtgtttttgtagtgtttgagggatatgtgtgtgtggtgtttgaggtgggtgtgtggtgtttgaggggtgtgtgtgtgtggttgaggggtgtgtttggtgtttgaggggtgtgtgtggttgaggtgtatggtggttgaggtgtgtgtagtgtttgaggcacgtatgtgtgtggtgttgggtgtgtgtggtgttagaggtgtggcgta

SEQ ID NO: 104328 - DNA, 1049 bp, Homo sapiens
ttggcagacattgttgagtggaagagttacataaacagtatgttgttgtcaggatggccgccggcctttacagttctgtcagtccaggcccgctgttgggctgaatggcatgtgtatactagctcctttaaccttgacgaacgtacatgttcatgctctattaataccatgttacagatgagcgtcctggtacgcaggtggggcctgtgacgggtccagagtcacagagctacggatcagcttcactgggccccaggtagacccaatccccaactttctaagcctgagtgttcagcagagggctcagggtgcagcagggcctatggaaggcgccccttcctgtgctgccgcccctgctctgcagcctggtctcagcgatgtctccgtgtctgtctttgcctgggcttgttggactcgcaaggctggctgtactgccccaaatctcaattctcccctgaagctttcttatagacccgcggattttctaagggctgggcggcccagtggctgaaagaacacattctgcattccggatgtttccatcccgcagaaaggctgctcctgagttggaggcacgcgttgccacaggctcctccctgcattcattttttgtacgtgttcattcatcctttcagcagacacaaaactaagacctgctgtgtgaggggctccagctcacctgctctgtggggatggcagaattctgttttttccttcctcgcaaacatttattgggtgcctggtgcgtcagaggtggtgggtctcaggaagttgacagccgagggcccgggctaagcagcagttaggtgggcagtgatccccttatggggctgccctggtgagtggacaagggtctgcagctctcgggaggggctgaggaagttcggtgccccgaggagagaagtcaccccctgggggaggcgaggctgggccctgcaccgcgcgggtcgctgcgccctctgtcggttgagccggaccgggacccgacccccatcagccccccagtatcacacggggcacggcgggggagtttgggctgagagcccgtc

SEQ ID NO: 104329 - DNA, 1079 bp, Homo sapiens
tcccttcgttgttttccactgtctttgctctagagtctaaccgagtgggggcttttctggcatgggcaaagggagttttgcagagggtcatgtctaggatccttgggccggctcgtccctgcgctgtggctccccgtggccctcccccagccccgggtcactgccccccgcagtcatctctttcctgtgctgagccactcggaggttgctgtgtggcagccgcccccacccgaacctagctggtgaagcgccttcctaattgccccccgcagcagagacccccatcgaggagttcacgcccacgccagccttcccggcgctgcagtatctcgagtcggtggacgtggagggtgtggcctggagggccgggctgcgcacgggagacttcctcatcgaggtgaggtcgttctggccggtgctgcccagtgggatgctgagccctgagccctgtggtggacgtgcctggggcgtccccacccagctgcctgtctatcccaggtgaacggggtgaacgtggtgaaggtcggacacaagcaggtggtggctctgattcgccagggtggcaaccgcctcgtcatgaaggttgtgtctgtgacaaggaagccagaagaggacggggctcggcgcagaggtgaggggtcacgcttcaggcctctgtgcccaaactttcccctgaccttagacctttgacttcaggcccacattcctcttcccatccctgacccccaactgctgacatcagattcctgaacctcaatgaaccacccacacgtgtgggctgggacccctcccgatccctggtgctagactgccagtcctgtcccctggcctgaggcctttgacccctgacccctgacctcaggctgcccctcctcagatccctgccccctccttcccggcgttcccccagcccctggcgtggcagagccctccttccctacaccgccagcagctgcctggaggccggggttgccatagcaactgtgaggttgacgctgccgcgctgcttattgtcggagggaagggggaggcggcacctgagggaagaggaaaagcgtcttctccccgcgacgacgcgg

SEQ ID NO: 104330 - DNA, 1102 bp, Homo sapiens
agtgccatctaccgggggagactcagagtggtccttggaggtgggtaataggtggtctccatgtttatggatcaaaatcctgatgtttcaagggctgcatcgtgtgcccagagcaacagagccagggcatggggcaggggcctggggagtctgacaacccaaccaatgtgcatgctggcagctgaggcccagcaggccaagaggagccaaaaaggagcacctgtccacccatccatcaaccgagtacaagagggtgcctgagggaccagtgcagaactggcagtcctaggagagtggctcaaggcctgcagggcaggtgcatggacctagacctgcagggtcgggcccaggaacagcaagagtcagaagacccaggtcaagggaggcagagacaaatgtttccagatgaagcaggagagcactggggccgatctccagggccctgaggcaatgaggagtgcacagagggtcaagctggacggatatggggtgatagcagctctgcggaaagcctgatttggccagagggatggaccagagggcagagccagggcaggcagtcatgagaacaaagccatggtccagctgcaaggtgatgagacctgtgcagggcagggctgtgaggccacccaccccgacacatcaggtgaggcagaggataagaaagaaaccatggaagacactcagtgtttaggccagggagagcaggggagagcgcttctcagctccaaagtagctgcagcctcaccagccttcttccccacaatcccacctacagaaataactcttggcagtctctgagggaccaggtcacacacccatatgccttttccacactgctctgtcagttcaccccattatcgcccagaaactcccatttatcttgcacatcttagctcaaaagtacccccaccccgacacacacagccttctgtgacaccaggtgtgcttggagccccccagtgggctccattggtccgtgagccctggcacccacaatgtgcccgctgagctctctgcacacgtcacattccctaaccaagccccagacttggcccaggatcggccttgtgtgaacacaaattggcagggtcctgaggca

SEQ ID NO: 104331 - DNA, 1026 bp, Homo sapiens
tgggctgatcccataggtctttccttgaggacccgactcccaaggctccttccaaagaggagcccttcgggcccgtgggctgcatggatgctggcggcagagctggtcatcccccacccgcccccttgtctgcctttttaaagctgcttttgccttctgtgcccctaggtctcccctctcctctttgggtctgggggggtggtatgtggatgccacctcttgactcctgcttcttgctgcctggaagaccaacctagtgggccccgtactgtcagccttggaggacagagttcacagcgtagcaacgtgttcagaacttaaggactttgcaggtcttacaaaggcctggccattctaccttctttagttcaggattcaaaagacaggtaggagcttgggaagctcatgaggcctctcctaaggtcccgggatgctgcctccagctcctgtcatcctggggaattgctctggggtcctctccccttttagccttttccaactctcagccaaactggaaagccctcttcccagcagtgcagtgttgaaggtgcccgtagaatgggtgttataatcagagtgagcagcctggtcctaggcctctgtacaggaccagacccctgaggctggggtctcctgacccacacctgaccagcccccatcttccctctctgcttctccctccgctcttctctgcctcttggtcttgatgaaaatcaaagccattttaaaaagtgcatagcacagtgcctggcctggttcgggccctcaataaacatttcttaaatggatgaaagaacaaagcaaaatgcaaatgctgtgttttgtgatttgagatctagggaggtggcttaggacaaaaacccacagaaggacttactcagcgttcagactcatcaggtgtcgatcccccatggtcgggctcaggtgggcccaggtctcgtcattggctctgtcctctcctgtgaggcagctgcagcagttgcagggcagggtcaggggattcctcagccggaacctctggcactt

SEQ ID NO: 104332 - DNA, 1039 bp, Homo sapiens
gtgtggttgcagctgtgggtcgcgtgggcctggccggctaactctctctctcattgctctctcctgcccatctgcatgtggctgctctgtcgagctgcgccgtggtcccgagcgccggctgtgtaagtgagcatgcccatcccatgcctcttgccgtccacacgctgtgcctgtctgcctgggtctctgctctgcgtggctgtgagaggctctggtgccactgacagccccttgaggcttcccctgacacagtggggatagggatgggaatgggaggacatgggagtgggttttctctggagctatcaccccaggtaggcctcccaccacggcagagccaaggaggggctagagctctagggtcctgtcaggtgaggctgggaagtgagctgccatcggttcttgtgtgtgtgcgtgcgtgcatgtgtgcgtgttgcgtgtctgcgtgtgtgtgctgctgccaccgcagcatgtctgtaacgcgtgtgggcaccgttgctgctgttgtgtgccgtctgtgcaggaggctgcctttgtgttgagggtgtgcacggcctcacacctgccctgcatgtgctgctgctccatacgggtacgagccctgcctagtgtctgtctcctgtgtcacggacctgttcaacctcgtgctgctgccagcctttatcgcgactcagctgtccctggaacctgcccaggatcccctgggtcttctcatgagagcagagctgtgtggggggtgggcggtgaagggtactgcccaagtctcagcgtcccgggtatctgtggatcccgccatgcccagagccggtgtcggaggctggcaggagggagaagcccgccctttgccatgagaggctgtcttttctttggttgggctgcacttggagcctggatggagtggagggggccaccagtcattcctcatattccagccagtcgctggctctggtcccaggggccaaagaaaagggccagggtaaccgtaggatcccaccctttatttcttcctctggccgggctactcccgccagccgcagcc

SEQ ID NO: 104333 - DNA, 1050 bp, Homo sapiens
tggtctccatgtcataatggttctttccgtcggaataggtcttccccttcaagacctctatgagctgctgtaggcgcttggcaaaagaaagtccttggggaagttttgtggtagatgagggtgtaggtgggggtgggggtgggggtgggggtaaaggtgaggctggaggtgggggtgggggcgggggtgaaggtgggggtcggggctgggctgccggtggtcggggtggaagtggtcgagggggcggttggaaataccaaggaaggtgagcagagatagggtgggagaaggggggtcgaatcgggggcggtcgagtggtgggaggtggaggggtggccgattgaatcatacgcaaagcgttagaaccaatcttggaggcgatccagttcagatagggccaggtggccgtgtagattccggggcgcttggcacgggcacagcctaccccccagcttgtgattcccacgaccacataggcgctttccttgctgtctttgcacatgagaggcccgccgctgtctccctgtccagaaggacacagaggtcactatctgcctgagccactcttcccctgcccagaggggtcggaaggctctgggaggacaatttccacagtgacatggtctcctgctgctgtaaacacaagtggttgtagtaaagtttgagggggtgtcaggggcttcatttgggatgtgaggagggtgtgaattgtcagggctttccttgcagtgagatgagcaaacccacgtgtccacaggggcacatggcaggggcagccggtggctgtcaccgctcatccccactgtgagagtaggtgctagaaaagggaccggggaagcagtcactagagaagggccctgggcagagcagtggagatagtggagcttggggatccaaaaggaggatgttctcaggggccgggagagtcctggagggacccaggggcccagaagccagaaggaaggttacctggcaggtgtcgatcttgcctacaggataccccgcgcacacattggttggctgaacgcgcccattgtaccactgggtcga

SEQ ID NO: 104334 - DNA, 1091 bp, Homo sapiens
cacatacacacaccccacacacatatacacatatatatctatccttggatatccaaaaaaagattctcaataaattcacaacactaattgaattgagatgatataaagttgttgattatttttaataaagtctagagatctaacattagttgtagcttatttcttcactactaaataagaaattccaagttaagtcttttcatcttttcattaataaatagccaatatgtaatatctgcccatccatatatattatgaactatctgaactactccttataattatggggtaaccagtcaaataaaagtgttgaataaacagcttattgtatatgttatgaattacctgacttaaaattaggagtcaattagtcaaaatgccatgggctatatgactcattgtaacattaataaagtaaaatatgtcttcctataatccagttattggtattaaataatattgaagctattttccaagcaaaacttccgcataagtttgtttttgtcttggttgagaactggttcttttgagataaagccaccaactcagcacaggtttttttttttttctcctgaatggttttgttcaacttaaaatgactgttcctaacagcaggtgctctcttctttgtttcagattatattgaacatgcttttggtcttcacaaatactgaaaatcaactataaaaatgctggatgaaaagaactatatccatatggtaggaagataaaattttagctctaactcatatcttctctgaagaagattcttcagtaagttcaataactaacattatacattcagtcttttaggaaatccttggatctattttcaaaatatatccagaaacagaaagcagctataacatttgactggatctctcattatgagtaaaataaaatctttaacagctattaatcttatacatgatatgacagccgtgattttacctttcttttttaaaattaattttaacagctttggagatccttcactgagatatccagtgggttcaactgacaaagcaaggcacaatttatcatgtaggaatgtacttcacgggaaattttcttctacatatgttttctct

SEQ ID NO: 104335 - DNA, 1867 bp, Homo sapiens
acccaggaggcaggggttgcagtgagctgagatcgcgccactgcactcccgcctgagcgacagagcgagactccatctcaaaaaaaaaaaaaaaaaaaaaaagaattcctttgttattttatcatgcttcaaggtccaggaaaggcctaggcaaaactcttggggggcttttgttacattctagccttgtttaagggcactggctggctctttcagcttttaatatgtaactcaaccagtcagtcagtactgaaacagttatggaggcctgcgctagtgagaccccgcctgccacagtaagtgcttctggagaacaaaaccaggtagatacatagacctagtcgtaatccctcaaactgacaccgttttcagttttttcatctgaacaagagatgaatttctgagttgataaacttgaaatgtgtccccctttgttttccttcacttaccttcacttttaatttcattggtatgcctgtgtatttgccttgtagatgtgtagttggtgactgcctctccagatgctgaggtgcctgtatcattggcacaggccagtgctgaaccgtaggtggagtaggctgtgccttccgaagcagtatctattcacaatgaagttgcagtctcccgaattccagtcacttttcacagaaggactgaagagtctgacaggtgagagattaggataccttttcttgattggaaacctatataaatggagaagtagagggttaactttttaagccagcattcggatattttcattgttgttttaattatttttattaaaaaacgtaagtagagggtctctttgtgttgcccaggctggtctcaaaactcctgggctcactccttggcctcccaaaatgctgggattacaggtgtgagccacggtgcccaatgtgcacgttttcattgttggaagaaaggcttggctgggtgtacccagcctgtaatctcttggggaggccaaggtaggaggattgtttgagcccaggagtttgaggctgcagtgagctatgatcatgccactctagcctgggcaacagagtgagaccctgtctcaaaaaaagagaaaggaatattaaaagagaaaggcttacatatggctgatccaaaaatatagctaaatcactggaaaaggcaagaagttgactgcagtaaaaagcatggcttttctgtatgctgtgctaagtacttgccattcattacaggactggtgctactaacttaatgagtacgcacattttgacctgttacgtgaaaaaggaaacagattgttaggcatgtgaagtgctttgcctgtgtttctgtaactactaactagagagctaggtttcgaacttacgcagattgatttcagagcccagcttgcaaccgctaagctctgtttccttcctaggtataaatgctttccatgagaactgaaggaagaaggaaataggagttgcctccattgtgcacgttgcaaaacctgtctggaaggagcataggaaatggctttagctaagtgccagtagcttcttgctgttgccacagtttcattagtgttgattctcaatgttgtctgctgatgttgctaaagcagccacacagtagcattacaaagcctgtgggaattttaatagcaccttcataaatatatttagtagtatatgtagaaatatgacctatacagcactggctatctattagattcacctggggagcttttaaagcacacatgctcgggttctacctgcagcctactgaattagaatctctgggtgggatgaccatctatatttttaataaaagctccacaagttaattctgatgcacagaagatagacgaaccattactttaacatgactcaccttgtattagctt

SEQ ID NO: 104336 - DNA, 1001 bp, Homo sapiens
gcgcctgacctgctttagtctttagtaatacttcaaatttatattgatcactttgaggcattgtggaattctgaattatcttctgaataagcaaagaattctgcaagttctctgtttcctgttggtcctcagaggcactctcctgtagacaagtctttttacttctttgggccttgttctcatttttcatatgaaaagcctcagttaaatgaatctctgctgttccaactagatggaaaagccttgtacttttgtggttaaaataaacacattgaaataaagaacttgggaataaaaatcttattttctctcatctcagaattatttgtcaaagagaatcacgaattaagaatagcaggaggagcagtgagggatttattaaatggagtaaagcctcaggatatagattttgccaccactgctacccctactcaaatgaaggagatgtttcagtcggctgggattcggatgataaacaacagaggagaaaagcacggaacaattactgccagggtgagtcaaaagtttgacaggtaattacattgcttttttggtaatttttaaaaacttaattttctctagttaaaagcaaataacgaaaagtctaataaaaaagtcagtctcttctatgcccgtcataaaccctgcagtcctctgttcttgcagccatgtttactttttatgttacctctccatttctaaaaagacctttgtatgctacgggtatttacttttcagtttttactatcccagttttaagatgtgttacgtattgactttccataagggaagatgatttagctttcttaccacacccttctcaacaacaagcacgtataattctccttcttctgtcttcctagtatatttatatcataatttttggttaagtcaatattcagggttcacgtttatgactctgtattgtttacagccagattgtggagtatattgtgatgacatttcttctattggcatgtttttaaattttcctgcagtta

SEQ ID NO: 104337 - DNA, 1136 bp, Homo sapiens
ggcatgagccaccacccccagcctttattttaatttcactggggattatcagtaagggagttgcaagatctgttaactgtacttattctttatcagtctttcgctcaatggcaaatgttccataaattgacattcacctctttgcaaactggagctattaaaaatatttctgataatagcttgatttgaaattgaagaacagttttgagtttgatgtggagtttctccacatcacttggcagaggtgacatgtttgtgtgttaaactcatcttttttaatcatgatggattttttttaaaaaaatcagtcttttgatctgtttttgaataatgtggatatctttctgtttcaatgtttaggtatggtagttgacgttaaaaagactataactgtcagggcttatagtaccatccctttataaagacaaaaacttatttttttcaattcagtagtatgaaaacctaatttaaatgacaacaaaaaccccatgtatttaattgcagcttcatgaagaaaattttgagattactacactacggattgatgtcaccactgatggaagacatgctgaggtagaatttacaactgactggcagaaagatgcggaacgcagagatctcactataaattctatgtttttaggtaatatttgcagataaaaccatattgtgagtctatcagaatgccttcttttcaagtaaaacctacattctggaaatgttcttcaacttgagaagttgcattaatttcttctaagagatggtttagcagattgcttcaaagaatagtccctcagccgggcacggtgggtcacgcctgtaatcccagcactttgggaggccaaggcaggcggatcatggggtcaggagatcgagaccatcctggctaacacggtgaaaccccatctctactaaaaatataaaaaattagccgggcgtggtggcggctgcctgtagtcccagctgttaggcaggagaatggtgtgaacccgggaggcggagcttgcagtgagctgagattgtgccactgcactccagtctgggcaacagagcgagactccatctcaaaaaaaaagaatagactctggagccaaaatccctgggttcaaattctgactccgtcactcactagccac

SEQ ID NO: 104338 - DNA, 1048 bp, Homo sapiens
ctaacaaattggttatattctaagatctgctttggaaattattgcctctgatacatacctaagtaaacataacattaatacctaagtaaacataacattacttggagggttgcagtttctaagtgaaactgtatttgaaacttttaagtatactttaggaaacaagcatgaacggcagtctagaataccagaaacatctacttgggtagcttggtgccattatcctgtggaatctgatatgtctggtagcatgtcattgatgggacatgaagacatctttggaaatgatgagattatttcctgtgttaaaaaaaaaaaaaatcttaaattcctacaatgtgaaactgaaactaataatttgatcctgatgtatgggacagcgtatctgtaccagtgctctaaataacaaaagctagggtgacaagtacatgttccttttggaaagaagcaaggcaatgtatattaattattctaaaagggctttgttcctttccattttctttaacttctctgagatactgatttgtaaattttgaaaattagttaaaatatgcagttttttgagcccacgaatagttgtcatttcctttatgtgcctgttagtaaaaagtagtattgtgtatttgctcagtatctgaactataagcccatttatactgttccatacaaaagctatttttcaaaaattaatttgaaccaaaactactactatagggaaaagatgccaaaacatgtcccctcacccagactaaacttgatactgtattattttgttcaatgtaaattgaagaaaatctgtaagtaagtaaaccttaagtgtgaaactaaacatgttctttgttcaaataatgtaaaatatctactcataattttaaagttctaaaaaggctgctttgccacctacctctttgcttatattcaagggtttagtgggtccttccttccacatttgtatgataactttcgttttattggtagtcctttgctactttaaaactaatcaggttaaatgtttactcaaatgtagtaatagtatgaggccaaaata

SEQ ID NO: 104339 - DNA, 1056 bp, Homo sapiens
ttaatttttgaaaaatagcttttgtatggaacagtataaatgggcttatagttcagatactgagcaaatacacaatactactttttactaacaggcacataaaggaaatgacaactattcgtgggctcaaaaaactgcatattttaactaattttcaaaatttacaaatcagtatctcagagaagttaaagaaaatggaaaggaacaaagcccttttagaataattaatatacattgccttgcttctttccaaaaggaacatgtacttgtcaccctagcttttgttatttagagcactggtacagatacgctgtcccatacatcaggatcaaattattagtttcagtttcacattgtaggaatttaagattttttttttttttaacacaggaaataatctcatcatttccaaagatgtcttcatgtcccatcaatgacatgctaccagacatatcagattccacaggataatggcaccaagctacccaagtagatgtttctggtattctagactgccgttcatgcttgtttcctaaagtatacttaaaagtttcaaatacagtttcacttagaaactgcaaccctccaagtaatgttatgtttacttaggtattaatgttatgtttacttaggtatgtatcagaggcaataatttccaaagcagatcttagaatataaccaatttgttagataactttatctctatcacatctgtttacaagcaaagtattactttgtctggacttatttcatcttcagtgtctgggatcgtgggcaacagagcagatcgcgttaagccccaaaatttttgaggtgacatgtcttttttggtggccgtaaacttccatccaatatggcttgcacagatcttacactgggcaacagtccaggcatacctaagaaattaaggaaagatatcagctaaggaaacatttctgtactccaagcctatcatataaacctatcatgaagacagactttagaggcaaattctaaggattagagattctaagttgagatttgatccatacagttccctgaaacctaaaaacattt

SEQ ID NO: 104340 - DNA, 1050 bp, Homo sapiens
cataaaaagttcaaattgcaggaagtggctgtcatccaaaaacacttcctgtgtaaggactcctttccctgttcttcaaggtgcctttaaaagaagtgagtctagttccaggacttgccttaattatagatactctctttatctgtttataaggtatagtttagttatttttctagtctcttggcaaataacttctaacatggatttgagttcatgtttaacataaaaggattttaccaaaaaaagtataagaaaagcaattaaatttagagcttctgaaaagtgtatctttgacagctggtatatttttgtattgtttatacttgtataaaatgtgtaaccttaaagagaagggtttatttcaaaaggatattatccgatttgtaagttctctgatgcttatctgactcctaagtttaaaacttgaaaaaccatgtcttgaagatttttcttacagagtagctgcttgtcttcctattgatgatgtattgagaattcagctccttaaaattggcagtgctatccagcgacttcgctgtgaattagacattatgaataaagtgagtaaagtgaatatgtttttgatgcccatgttttattcaggctggagaactaggatgctctgttggggccaatggagctctgtatagagtccagtaatgtagtcatgcaattcagatttcaattgggatcttacaaacaaactcattgttttgtgtttgtcaaatatgaatacatttatcaacttagtgaaaaataacttgatttctgcatggaaatatccaaggttatatatcactattcctttactctagagaaggtcatttagttttatgtaaatatgtggcagatctcagtttcagtgactttcgtgctccatctttaaaagtgtttttgaatgcttggaaggaaaatgtgatattcagagagagcaatatctttataagtaagtttcttgatgatctatgtgattacatgataaagtgaatgccagtttttcctaccaataatttttctctcaaatcttttagtgtacttccctttgctgta

SEQ ID NO: 104341 - DNA, 1071 bp, Homo sapiens
tttagacagatacaaggttcagttcattcctgtcttcatagagcttgcttgtatctgatttgtccatcccaccataatctgaagtactgcatatgtgtcttctgtctctgtgtctgagtagtagttaaaatggtcagagttgggagatgcttacataactaagctaactcaagctaataaggttgccgcgcacttttcctgcagaaaaggaacttaaagtatcgaggattgtagtcttcctgagatatattcaattaactttgaaactgcacacagcatttgccgtggaaacctaaacaactcaaatgacatgaaataaaattatttaagcttctggaagtgttctgtgttatctaccattctgacaaggaagcattagagaagattcagcacgtgtctctcatgattaaggagttaggccagtgtaattaggaaacactttcaaaacccactccatctagagacatttcttgttctggaatttgagctctgaaactgtttacttcttctcccatcacagtgcctttctctattcactggtttactgtagggggatttgagaatccccctacagtaaaaatcctcctcaaaaaaaaagaggaaattttgtttaaacctgtttggagtatgacttaaatgtttctaagtatattccctgcttgcccagaccatctgcttattcatatatcaaggcttactatgttaatcagaaaagagttgagtatgaaatgtaaagataagtcaaatgggaaacagatactaagaaagtaatgagtctcatctttctggcctctgttgaacttagccatggttgttcctgtttattgcgtagagcagggaggaactgagcatgaatttggaagggcaggggtctcatacgtaatctcccagattagtgtttaaatctcctcctaattttatctagatacaaatgttcttatttctttcttatacagaaggatacgtacctttttcttaacggtgtatcttataggagattcttttgtattagtttatagagcattgctcattcttaaagctgcttggaattcttttgtatggatacactgt

SEQ ID NO: 104342 - DNA, 1027 bp, Homo sapiens
tttatctgaaatgtgtagatctccctttccattccacagtgacattgaagatccgtaccttaggttatctttggttttaactttggtatgatttatgaaataaaattattttctgaaagtttctgtatcttaacatcagtatttgatgaatatgtttaaaagataaaacttggaaaatcttggtatttaaaattatcactgtttagaaacttatagttttgagttagtcaatcttagaaatgaataccatgcttggttctctttattttagaatccagcaagctaaagtgcaaattcttcccgaatgtgtgttgccttcaaccatgtctgcagttcaattagaatccctcaataagtgccagatatttccttcaaaacctgtctcaagagaagaccaatgttcatataaatggtggcagaaataccagaaggtgagaaactaattttttatgcatcttcaaaaaatgaagacaggttgttttttttcctgttttaagaaagaaacacaactttcatgattcattacccagccaccttgtatggcaatattccagctacatttgatcctctaaaaattgcacaggcagctactttatgtaaaagcagtttacaaaagcaataaaatgtcacacagctgtaaggtatccttgttattatgcttatcagctatattaatcgcttttgatttttaattccatgggaaatgcttattaaactatgatcaaattagatgttcggctcttgagttataaacatccattatcttaaagaagggaggattcttttggggtagagtagtagtagagaagtagagtctgttttccttcttccaaaccagagagaaaggtttcttttgctatgtgttttaatgaaatacagttgacatcgcagaaattgacttgagactaggtgctctttaaaaatgttgcttgtttgggcactaattcctatgttatatcctttgactaaatcataattgtcataggaaaaaaaaattgagggagcctgtttctactcgtttgtgaga

SEQ ID NO: 104343 - DNA, 1055 bp, Homo sapiens
ccccatctctactaaaaatacaaagttagccgggcatggtggcgcatgactgtaatcccagctactagggaggctgaggcaggagaatcgcttgaacccgggaggcagaggttgtggtgagccaagatggcaccactgcactccagcctgggcaacaagaggaaaactccatctcaaaggaaaaaaaagattaacatcaaactgatacaggtggacaagacttggaaagggcacattctctctagtattctgtagacccattattaaggcctctcataagggtatgtctgtcttcatttaaaaggcctctgtggaatgagatttctcttggctccactacttctctggccctgtaaccaccttcactggaaatggtgaaatgaaagaaattctggagttgatttagttcagtctcgtctttttctgtatcagaatgccaggtactagagaggttaagtaatttgcttaaacagcaaataagcgacagacctgattggttctaggtcccatgacttccaaactggtactccttccattataccagaatttctctataacacatttgaaactcaagccagcttccctttctccagtaaaatatttaatattcatttgtttttcttagagaaataagcatatagaaaaataaaaattaaaaaatataaatatccatcttttacctaaatgacacttcatttattaaaagtacactacagaggccaggtgtggtgactcatacctgtaatttcagccctctggaaggccaaggtatgtgaatcatttaaggccagcagttcaagaccagcttggccaacatggtgaagctgcatcactactaaaaatacaagaaattagctgggcatggtggcctgtgcctgtaattccagctgttcgggaggctgaggcatgagaaccacttgaacctgggaggcagaggttgcactgagcagagattataccgctgcactccagcttcgccaacagtgagactccatctcaaaaaagaaaaaaagtatacaacccccaaagtcatgagtgtgtgtgggttggggagg

SEQ ID NO: 104344 - DNA, 1031 bp, Homo sapiens
ggtaaaaataatactttgtactaaaaaaattcttgaatttctgtgtttgtgatatattcataaaagattagaaattcttctaagagttaaagttagattaaaaattatattttaacatgggatgcttatataccacgtttattaagtgtttgtaaccccatttgtatttttttctttttttttgagacagagtgttgctctgtcgcccaagctcgagtgagtgcagtggcacaatctcagctcactgcagcctccaccttccaggttcaagtgattcccctgcctcagcctcccgattagctgggattacaggtgtccaccaccacacctggctaatttttgtatttttagtagcaacagggttccaccatgttggccaggttggtcttgaactcctgacctcaggtgatccgcctacctcggcctcccaaagtgctggaattacaggtgtgagccactgtgcccggcctgtatttcttttaatgtgatttgctctttagtctgttgagcttacatttttattacatatcgatcatgacactatacctatatatgtttttatatagtacctaggtgctgatatggaagaatttcatggcaggactttgcacgatgacgacagctgtcaggtgattccagttcttccacaagtgatgatgatcctgattcccggacagacattacctcttcagctttttcaccctcaagaagtcagtatggtgcggaatttaattcagaaagatagaacctttgctgttcttgcatacaggtaaaatattagagtccatttgcttaatacattccctctcatgggtaattgcagtggtcagtgttgaagccaaagcaggctgttatttcgcatgtacaggagaggttgggtaagaatgtgaggttaggaatttggttaagtagaagtttgatagtgcaagttggagtatttttgttcatttcattaccatctaactcagctcttcaccttcatacacaatttaactttctggtatttgaaaaatttttaatcatttatattt

SEQ ID NO: 104345 - DNA, 1120 bp, Homo sapiens
acctccacctcctgggttcaagcgattctcctgcctcagcctccccagtagctgggattacaggcacctacaaccacacccggctaacttttgtgtttttagtagagatggggttgcaacatgttggccaggctggtcttgaactcctgacctcaagtgatctgcctgcctcgtcctcccaaagtgctgggattacaggtgtgagccaccacacctggccttcattttaagataatgtagcgactgccagggaaatgttgtcactagaaaaatgctgtgaaattcttcctgctaggttatctttctctcagttttaattaacagatcttgcctgctttgtttcttttcttacttatgtaggaactgattgaagttgagagtttgagagaacgttagaggttgacttgttgaagcctatcattttgcagatgaggaaactaaaatttaattgggcagaatgagttgtctaaggtgttaaaattagttactggtgagggagaagagaaaaatctcccatatagaagaattttaaataacttacatttcctcttcaagggagtggagcataactcatcacccctgaagtggaggctacacctagtgatttgcttccgaagggtacaatgtgaaaaggaggggggaaaggaactttacagcggaaaaacctgacacacactgctgtagccaggtgatcaaggttaacagcaggaatagttcataatatataggctggatatgtaataaaaacagcacattggcaacagaccccatttctaaaaaggaaaagaataacaacacttcacttctgtggtcttcctccctaaaacacgtatcctcagtctaatcatgggaattacatcaaacaaaacccagttgagggatactctacaaaaggcctgaccagtactcctcaaaactcagaaacaagcaaagtctgaaaacccccctagcccagaggagggtagggggacctgataactaaatgtaaagtgggatcctggaacgcaaaaagactagataaaaactaagggaatccatttaaaatatgaagcttagttagagtaatgtaccaagactgattccttcgttgtggcaaatgtaccatactaatataaattaa

SEQ ID NO: 104346 - DNA, 1050 bp, Homo sapiens
aattaaacctcttttctttataaattacctagcctcaggtatttatttatagcagtgcaagaacagactaatacagatgggcacatgacccaagctaggctaatgaaagtccttcctcagttctcttctaaaaggaattgtcaggaaagagtcttttcttctctgggcagaactttattaggatacccctttatgtaaggcgaaggagggtgtttatggactgaggcaataaagctgccacgcggaagaaggaggaaaagagatggagagaagtgtaccaatggtgtctgagtccttgtttccaacctttgtccttctggaagtctgggaatccggaccaacatattactgtattttacactatttgacattgagtttttgtcatttgactgtatattagagtgctaatacaagaagatactgaaataaaaactagtttttattctgattaaagacatcattaataattttaaataattttcaagcagaggaaaagctgtttattagttaaacttaagagatttggtattctaacaagagagatggttaaacaggttttaggactttttgtgaaaaataaatgaaacacatgaaaaatgaaaaaaagccaaatataatcttttccttattaataaaagacaaaacaaaaacactaatgtcaaataactttttataatctcatccatgccattttatatgtttttggtgaaagtcctaacattgcataaaacgtaagaaaaactgttaagagaaattctctttgccagaggtgaaaataaaaatgaaatgaagagccatagaatgtcaaagctctaaaagagaagaaacaagctctctgtgcagttgaagttcacatctgtaagatgctgaagcagttttcagggttgcacttccgaatttcattccttccttccttgcatggctctgcagtcctaccagacccatctattcccactacaagtctcagcttggatggagcctttcctgggcctttatgattgctttccctaactcctaggcatcattgatgctgatttgatacttatgatt

SEQ ID NO: 104347 - DNA, 1070 bp, Homo sapiens
catgcatgtatctttgtaatagaattatttctatttctttgggtatatacccagtaacaggattgctgggtcaaatggtatttctccttctagatctttgaggaatcaccacgctgtgttccatagtggttgaactaattcaccttcccactgatcatcagagaaatgcaaatagaaaccagaatgagataccatctcatgccagtgagaatggtgattattaaaaaggcaagaaacaacagatgctggtgaggttgcagagaaaaaggtgctcttttctgtagagaggttagggaaagcatcttggggaatgggtatctgaggaatcacctgggcgcaaggtcaggttttggaccatgtgaacatctgggaaagaatattctaggacaagagatgtaaaaagcagagatcctgagacaaaggtcctacttgaagcacatcatgggtaacagggagaccagtgtggctgagcagagagggttgggggagtggttagaggtgaaagagggatagccagggactagatcttgtaggacccttatgggtcatggtaagagctttcggtgttcttgatgtggttgtttctttaactaaatgtgacctcatatgatgtatgttttaaaacagtagttgtcaatcctgcctgcacaatgaaattacacggggatttttttttaaatgactagtgttcagctttatttccaggaagttaaatttaaatggtctggggtgaggctaagcatctgtgtgttatggaagcagtcctcgaaattctaatgggtagatagaagaagcactgttacagaaggtatcagtggctaataggataagaaatgtatatgatgagctaatgagttccatcgtatgccgaggtaagtgcagccccaatgctggggtgatgtcagtgccgtcagatagccggtagggatgaatgagccaagagagctttcaagtcttgatcaagaattaggaaaatcttaacaaagaaaagggattttcttattccctggcctggccctgcagactttttttctgaggtgtaataaggaaaatggtaaaaatgaccagaa

SEQ ID NO: 104348 - DNA, 1045 bp, Homo sapiens
gaactatgagattgtaaatttgtattgttttaagccactaagtatatggtggtctgttacagcagcacaggaaaactaatacatccagaggaggaaaagtcaaaatacttgcttaatggttcagaaaggaaatgatagcaatataagtgtggcaagacatcatgtgacatgcgactaaatttcctctctttattagagttatggaaagtaatagagaaggcagattgaagaactgatgcatggatgagatttttgatactaagccccaacctgtgctctgaattccacagacaaaactgtgctgatgtactctttccttctgtccctttggagctgggtaaacattcccttcctttgtgtctacttaaccgtgctgagccaaacccaagtagtatttcttaaatagtgtcagcagcaattttgcctttgggaaataattctttgaagctgtagtttgcttctaacagcatttctggagaacagaagacatcatcatttaaatgtcaccactttcgagtagactcgaagaggttataaaccctagcccaaagaataacaattcaaggcaaaattagagcataagttttatatatatatatatatggtccatttcatgctgattcgaaagaaaagtattcagggtttctgcagtttgttttagatttaacagaaaagcttcatctgttagttcacagtgcaggctgttatctgatcactggtgccattgacatcactctgtaggcattttggttatttctggaaatagcagcagcaggaaagactgttaagccctaaagagaattaagtcttggaatggaaaatttagttcagtccttagtgacaggcttcctctcaaagctgtttgaagatgaagctctcacttataaataaacaacttggaatcttctcccaccttgacttattttccatgagagacttcaactgcacactctctctaaggggataatcaaaccaactgctgggatccaagctgtcagtttgttcttcagagtatctgaatgctgaatggctgccctctcctcat

SEQ ID NO: 104349 - DNA, 1076 bp, Homo sapiens
ctctatccctttttgtaggttctcactcacttccccgtgagggtgatgaatatgttcactttcctgatcatggtgatgacttcatgggtgaatacatattttaaaatacatcaaatgatacacattgcctctgtgcggtctagtgtatgtcaattagacttcaatcaagctgttaaaataaccttggtttttaaaggaagaagtcatgtgggctgaaaaggggaaaaaggcagtctttctatgtgggagagaaggggaccccaggtgggagggggtattaacaaaacctttttaaacatttcagtgattcttcattctcttatagtgaatcatatctgtatggtccattttctatataatatttcttgtgagatgtgaagcatgtgattaatttgaggtttgttttgggggtagagtgtaaaatggaactcttacaggaaatactttgtgtaaacaattcttacgctgctgcaatgcagagcaaaatgacagtaaaagcacaactaagtaaaatgtatgttaacacttttatatgttcattactgtagatgtttttatcagttttaagactgaatcacacagttactgaccaattgcatgctataatcctcaggaatgcaatgcatgagtgaatttattaaggtactcctaggggtttaagcgatttaatgaaaaatgaacttttaaggaaaaagatggcaggtaataaatatgagatacttcccacctgcttctgatatataacgcagtggatgttccattcacttatgctaaagatggatcactataaccacgccagcaggaaactttagctgaattctgtaaacggcaatcaaagtaggccgaggtcacctgaaattactctcaaagatgatcttgtctcaagtgaaattttaaagtggggagggatttggaattttaaagaggagaggcttgtaaatacaatgaggttaggctacaagaaagttctgggggactaatctacttgtttattcaaataaagtgaaaattaagaattttgtctttgtttacaatgctactgctcaaaaggtggatttggtgcattccttttttta

SEQ ID NO: 104350 - DNA, 1592 bp, Homo sapiens
aagacatctttgtttttaaagaaaagacatctgcaggctttttcttagtgttcctattaagtatgtatgagtgtgtgcatttgtgtgtgtgtgtgtgcatgtttagtgactttacatgtgtatacatacaaatgtacacagtcatatatgactagtggtacatggaatctcaatttaattgtaaaagtgaaggagttctaaaactagttttagtatagtaagtgggatatagtaagaatgtcctacaatttaaaagcttatttggttatcttcaatggattttgaatgtattcaatactagatttgcgagtgactatgcctttttagtaaacaaaagaaaggctataatgtagaaagtatatggaataagcataacatctgtcctaatctaattttcaggcacatctccagacttcaatttggctgaaataattcatgccacggacctgtgcacatgcctggaattgagagacacagttaaaagactccaagttgctttctgccttttgaaaactcctgaaaaccatccctttggactctggaattctacacagctcaaccaagactttgcttgaatgtttacattttctgctcgctgtcctacatatcacaatatagtgttcacgttttgttaaaactttggggtgtcaggagttgagcttgctcagcaagccagcatggctaggatgagctttgttatagcagcttgccaattggtgctgggcctactaatgacttcattaaccgagtcttccatacagaatagtgagtgtccacaactttgcgtatgtgaaattcgtccctggtttaccccacagtcaacttacagagaagccaccactgttgattgcaatgacctccgcttaacaaggattcccagtaacctctctagtgacacacaagtgcttctcttacagagcaataacatcgcaaagactgtggatgagctgcagcagcttttcaacttgactgaactagatttctcccaaaacaactttactaacattaaggaggtcgggctggcaaacctaacccagctcacaacgctgcatttggaggaaaatcagattaccgagatgactgattactgtctacaagacctcagcaaccttcaagaactctacatcaaccacaaccaaattagcactatttctgctcatgcttttgcaggcttaaaaaatctattaaggctccacctgaactccaacaaattgaaagttattgatagtcgctggtttgattctacacccaacctggaaattctcatgatcggagaaaaccctgtgattggaattctggatatgaacttcaaacccctcgcaaatttgagaagcttagttttggcaggaatgtatctcactgatattcctggaaatgctttggtgggtctggatagccttgagagcctgtctttttatgataacaaactggttaaagtccctcaacttgccctgcaaaaagttccaaatttgaaattcttagacctcaacaaaaaccccattcacaaaatccaagaaggggacttcaaaaatatgcttcggttaaaagaactgggaatcaacaatatgggcgagctcgtttctgtcgaccgc

SEQ ID NO: 104351 - DNA, 1080 bp, Homo sapiens
ctttttggagtggtgttgatggatttgataagtgtacagcaccattatttcactggcccctattgtaaccaagaatggacatttgcaagaaagcaagcccaggtggggagtgcatgcctggtccacaaaaaaagctgagctaagtgtgtctggctggggattcaacccttaaccttagattccttagcacgagattctaacagctgagctgtaagcattcttctcaagtgttacagttaaacacccacatgccccatcacacaatgctgaatccctacagatcagttaaacagacactgttcctaccagagacaatgagagatcaaactgcccaaaacaaccaggcaaacaagcacactgttttgcatctttctactttcaaagaaccttggacagcaagtaagcactttctaacttacccaaattcagggtcattaaaacatggcatttatacctcttctattaaacttacctaaatgacttgatagagatcttggagaataaggatgtgtcctccagagcattagagccctataaaaatataatgtaattcaaacatgtgaactacatttgtaattttaaattttctagtacatatattatttagggtgaaaagaaacaggtgaaattatttttaaaaatatatattttgtcctgaatggtaatgcctaggttttcttctagggtttttatggttttaggtttaacgtttaaatctttaatccatcttgaattgatttttgtataaggtgtaaggaagggatccagtttcagctttctacatatggctagccagttttcccagcaccatttattaaatagggaatcctttccccattgcttgtttttctcaggtttgtcaaagatcagatagttgtagatatgcggcattatttctgagggctctgttctgttccattgatctatatctctgttttggtaccagtaccatgctgttttggttactgtagccttgtagtatagtttgaagtcaggtagtgtgatgcctccagctttgttcttttggcttaggattgacttggcaatgcgggctcttttttggttccatatgaactttaa

SEQ ID NO: 104352 - DNA, 1026 bp, Homo sapiens
tcgcaccactgcattccagcctgggctacagagtgagattctgtctcaaaaaaacaaaagcaaaaacaaaaaagaatggttgcattgattgaatctgaatatcccaggaggaaggcactctttgggaactgccataaacttcagaccccaagggcacccaacctgaggttactcctgaaaactgaataaatgagtctactaacatagttctggctttgcttgaacacttttggttatggggaactcagtgccctctgagttagcccactcagtccataaagagttcaataaaaatgtttcacaccccaaactgaaattggaatggattgcctctctggttctagttactctgcatctagtaatacacaattagcccatttcggcatcaacattgcacactgttgaactgtattaagctcactgtctactaaaaccagattacaatttgttagttttacgtgacatactgctgctaaatcaaatctcagacattcttcacttctttaggttttatacccaatcttgtatttatatgtctgttaaacttccttctatttagactggcttgattgttacgagtattttggaagttgattttgttcatatagttgctattgtttcaattgcatgttcaataaatatatcccgtatatcttcatctaaatcattgattaaaatgctaaacagggctggaggaagggttattagacgcctgctgggttcctggtcactatagtagggagacatggggaagaataaattatgaagagtgaccatagtatgttgtaaaattaatgagttagtagcaataggcctagaaaagtaggttataaggagcctagggaagaacttttccccattctgaggtacataatttgacctgttgttttatttattttcccaagctttattgaagtataattgacaaattaaaattgtatatatttaaggagtacaaaatgatgttttgatatatttccagattgtgaaatgtgaccaaaattaagctaatcaacatatctatca

SEQ ID NO: 104353 - DNA, 1030 bp, Homo sapiens
attgtaatcattaatgtccataaaatcatgaggttttctatttctcaaagtgtatattaaaataaatacgtctatttttaaaaggggagaaaggagtgacaagaggaagctttgtgattgattgttacatctacagttggtgggcataaatgaaaattgggagattaaaacccagtcccacagtgttctaactatctctgtatatgcacagctcccaataaagttagagttacaaaaataagacaggatgccttcctaagagagcttattgtctttcttaccaagaagatcaaacatgcttgaaacatttaagtgacaagcctaaaagtgcattcaactcgttttcttccatgtattcatggaacacaaaaccagtcttataaaaggtcaaaacagcttgcttgctccaaaccctgccttcacaggcatatgcacacataagaattaaggcatgaaaaactttcaagataaaaataactttgtgtctgttttgcctttggctactgtgtgaaaaggcaaaaagaaattcaaatgttcatattggaaacaagcatatcataatgtcatcagtgttgaaagccaagtagaaaataaactaattgattttattgagctaacagttggatctaaccatttttcaggtctctgaaaccagcttcaaacattatttttagatctcaacaggccttgacaagaattatctggctcacagtcttctaatagctgcttggaggaaaaacaaacttatgaggctagaggccaagtacaaagattcttgtagctggggtttcaacacaaccaaaaaaggaatgaagattttcacaacacttctttataattcagaggcccaggttttaagcctagaatgttacagtatcatacttcagtttctgggtcttcagtacggaatgtgattcagaaaagtcaaacttctcgttaacaagtatcaagagctgcaatctggcaatcgaaaaatgcttcttgagcacctgctgtgtgccttgtcctatggataggaaccccaccccca

SEQ ID NO: 104354 - DNA, 1035 bp, Homo sapiens
tccctggccccttcacagacagatggccctgccatggggttgtcaccctttttttttttttttttttttttacacgcagcaataatggacctacatcctttggaacataattctatgcatggactaccctcaacaatcctgtagttggaatcactttgtataaaatgtctcccaaaaagggctttgcaagtattcggtgcaagtcatggaagattccctgactattgcagcctccactcaaggtgacattgtggtgggaccctgccatgtccccagccatctttccccagatggtggctgtattataaagccattgaggaaggtgaaagtgttactttctgaaacagctcactttctcctggtagactgtgttcattgtgcggtaaattgtggttgttctatgtcttctcttgtcttggctggtttgctttccagggccaggcactgtactggaggctttgtgtacatgacctaatttaatttgcagagtagtttttgggggggaactggttatttttggttaatattcccaatgtgcacttagaaaactaggactcaagatgccccaggtgacacggttgagtgaggcagaaccaggactcacgccatttttgtgacttccgttctctctactgtatcattgagtccattgttttattgtgagtttggggtggggagtggtggactgaagacgggagattactggggcaagggatagcttgcaggagtaaaaaggcaaagagtgaggaggtggaatggattagtggttaagaacatgggctctggagccagactgtctgggcttaaattcttctcctaccacttactagatttgtgactttggacaagttactaaatctatttcttcttcagattttgaaaattatgtgcaagtacttctagaaaaggtacaatcaaggcaggagggttaaagcagtcagtatagagggatctgagtgtaaacctttgacctgctttaaatccactccaaacttgaagggttgatgcttagtcacactgcagaaattattctca

SEQ ID NO: 104355 - DNA, 1904 bp, Homo sapiens
taaacttaggcaatcattggttgttacatttttcttttttgctgttatatctaatgctgaacatctttgtactatatccgtgttacatttataaggtgaaggacgttggaaaatatgtggttagttcttgaatgtgctgccctttttaaagcatacatgttaagtatccatacaggcagggttgtggggaagcactgtctacagccggtgcaatatgcatctgatgggttagagccttcagctgagagtcccagtagcacttaccttgctctttctctctacacagtcttattgttacaggtatcgctgtgctgctcggagccagaacacacctgatagctctgcttcgaatctgggattccgctgtgcagccgaccgcctgcccactatggactgacaaccaaggaaagtcttccccagtccaaggagcagtcgtgtctgacctacattgggcttttctcagaactttgaacgatcccatgcaaagaattcccaccctgaggtgggttacatacctgcccaatggccaaaggaaccgccttgtgagaccaaattgctgacctgggtcagtgcatgtgctttatggtgtggtgcatctttggagatcatcaccatattttacttttgagagtctttaaagaggaaggggagtggagggaaccctgagctaggcttcaggaggcccgcgtcctacgcaggctctgccacaggggttagaccccaggtccgacgcttgaccttcctgggcctcaagtgccctcccctatcaaatgaagggatggacagcatgacctctgggtgtctctccaactcaccagttctaaaaagggtatcagattctattgtgacttcatagtgagaatttattatagattattttttagctattttttccatgtgtgaaccttgagtgatactaatcatgtaaagtaagagttctcttatgtattattttcggaagaggggtgtggtgactcctttatattcgtactgcactttgtttttccaaggaaatcagtgtcttttacgttgttatgatgaatcccacatggggccggtgatggtatgctgaagttcagccgttgaacacataggaatgtctgtggggtgactctactgtgctttatcttttaacattaagtgcctttggttcagaggggcagtcataagctctgtttccccctctccccaaagccttcagcgaacgtgaaatgtgcgctaaacggggaaacctgtttaattctagatatagggaaaaaggaacgaggaccttgaatgagctatattcagggtatccggtattttgtaatagggaataggaaaccttgttggctgtggaatatccgatgctttgaatcatgcactgtgttgaataaacgtatctgctaaatcaggcttcaccgtcatcagcttcttttctctttctcttctttatgttttcttttaaagagaggactttgtgatatgcgtgttttatttgctagaaaacgttcatgtttgttagctaatggataactttgatatgtgggtaatttgtgggaatttttgttccaaaaagcaaggctattccaccagtaaccctatcatgaccttgctgcttgttgccacagtagataatgccaagtcaaaggcactgcctcacttgtggtcttgtaaaacccagcatttgcttcccatgccgggaaagcaccttgttttagaacaatagctttcaacctaaggtccctgttatcaagttcccatcctgattcctcagtcctgagaacccctaagccatttcttgcatgccatttgaaagaaatgtttaaatcaaataatattcaaaagtgtctaaccaacacttgaatgctacttttgtgcttagcctcttaacatgttaaaacaattcccttgaaaagcagtca

SEQ ID NO: 104356 - DNA, 1053 bp, Homo sapiens
taatccctctgggtctttagctcagcctacaacattaaggaaatcctcaccatcctaccaagatgaagagcaaaaggagttggtctagtgttagtggcaagagcaacggacgggaaattgagacctctgttctgttgtggcattctctataatgatttcgtttaacatgagttacaattatctttaaaatgccctttgtaccaaaaagtctccctctcataaaaaccatattgctgctcccctttactttgaagccccaaggctggtaagtcattatcttaaatggattgttcccaagtccaggatctcattcttagcacagacatggagatcaatttcacacagtaattagccatcttaatgaaataggactaaaacaggtccttcccactttccctgttcttaattaatagaatgacccatttttcagccacctaaagacctcacatccttaagaaccacttttgctgctaaaaataaagttggtaaaaaagaaagagcaatgaggacatttataatgaggccatttacctctttaattatgtgctttattagttggaatttaaaataaacgacttattaataaatgtttgctgagtgaatgagtgcatttgaaatggaatgatgtgtgaattgactgttttctcaagtgatggccctgacctcgcaacactaacttttgtagtgagtcttgctttttagggtttaattctttattgtcattttggttaatggacagtctcagggattgctgtgatctaataaagaactaaattttggtggtggggaagggagaggcactgattttaaacttttcattattcaaagaaaacattttcatagcataaaatttagaaaatacatagtaaagatcaaaatgaaaataagatcatcatgctttctaaagaaaacaattgatagtattccagcaaactttttgtgtacttaatttttgtctttcaagaatggaattattctgtatataccggggtcttcagatatggccctgggaataatctcttgtatatgtcttttcactatcctgtgtcgcag

SEQ ID NO: 104357 - DNA, 1170 bp, Homo sapiens
tgtcatttagtgattaattcctgaacctcttagtatgtcagaccgatgcaccttataacttaggaacagaaggcaaccatgtttgtccaagttttacttattctggcatgtgaaaaatgttgaatgcaaatagtatactaccctgcctctaaaaccaagctaccccagcagaatgtatacaaattgagacactacatggacatgtgtgtggaaagtgcttcctttaaaaagaacatctctgaatattttttatggtgtgaacagattgggggggagaatatcatgcaaaatcccatctctagcaaagtagtcattcataagtcagttccaagaatgtatatttataaccaaactagctagactggttacttgatgtgcttaattttaaacctgaactttttgaaaaggctcaaagggtaatgataaagaaaattaattcttcaatatcttctcaatataggattacagagcaattgaagaaatagactctgcctgaggctcatttttcagaatacgggaataaagttgttggatatgcttaatttttcttcacagaataacacatgggctgctcatgaataatctagagaaaacagatctactttttgagggctgcagataaaaaagctgagttctttagaagccgtcatccctcctcagtttcttttactttccagcggggctggtggaagtagtggtcaaaatgagaataaggttgtaaaattctaggtgggtttgtggttgggagatgtcattctctaccggcaagatgtgacttggcatttgctgtcagaatcagaaatagaatttttttcatctcagataaaagcatctgcatgcttggaagggggtgcacaaggccttagaatgctggcaagttgtgaatgtatctatctgaccatctggtgtggagctgagcgcttgttagctttcagttttagagctacttgtgtttcttctaaggatttacagaaaaattcacatttttcttttcaccaatcccaggctttatcctggatgttgcccttgctctaatgaaattgttctcattttaggtttctctttgtcccagtggcctcctttgcttcctcatttgactgggatataatttaacagttttgagaactaaaccccaaatccttagacaattcatactccataattcaggtc

SEQ ID NO: 104358 - DNA, 1050 bp, Homo sapiens
gagatcgagaccatcctggctaacagagtgaaaccctgtctctagtaaaaatacaaaaaattcgctgggcttgctggcacgtgcctgtagtcccagctactcgggaagctgaggcaggagaatcggttgaacctgggaggcggaggttgcagtgagccaagattgcaacccctgcactccagcctgggcgacagagcgagactccatctcaaaaaaaaaaaaaaaattcttatagatatacaccatttaaatacatatgtatttgtttgctgtgaggctttatgatatgaagtaatactttttttgttaaagatttatttacatataagtctttattttggtattctggcaaatgtatttgtttggtaatccaaatggaagttgaagacattgagatttttgctgcatgtactgagttgatatttttctagagttgatgttagtagctaacatcagcctgttctgggttgctttgaggttgcagctgctccctggtggttacctgtgaaaggcgctaactggagacacccagaagggcctgactctactattctgcacaggtgaggctggtccctctttccccagttgacaagttccattgcaaaataggtaccctttgctcttgcaaaagaactcagtgggcatcttcatctataaaatgataagaatgacaaactgtaattgattggtaggaaaataagatggtgggaaataacgtatgtaaagacccaaacactgcaccttgctcataagaaagctcttaattagtggcctctttctctcctcatttggcttgtcaaagagttgcctcttcccagtttccctgctccttttgagaggcctattccaaacctcatgacatgtttaatctttacattctgtttccattattagcgggtctatgaggaagaagacgtctgtcttatggataagtaattgtgtcctcccaggttgccactgtggaagcccaggccttgggtataggattcacatgatcttgagttccagattggaattctttgaagccaccatctaactggaaaaccacag

SEQ ID NO: 104359 - DNA, 1139 bp, Homo sapiens
aacagtgttatacaaccatcaacattatgcatttccagaactttttcatcattataaacagaagctgtatgctcattaaacaataactcttcagcctctggtgacctccattgtactttgagcctctgtgaattctcctattctaagtacctcacgtaagtggaatccttgtccttttgtgcctgacttacttcactcagcatcacgtcctcaaggttcatccatgttgtagtatgtatcagaatgtccttccttcgaacccctgctttcacttgttctggatatgtatggtgacatatctcttgacctgtcatttgtattcatgccttcttgaggtctgttatccatcagtggggtgtgttctttgacttctagtgatggaagtgagtctaattccttctgtgacaatttgctttctggcttaagatgtggtctgtgtgttcagcatacaactctagatgtcccactgtcttccaggtactatgccaaaatgtgaaagaatgccatttgaatatcatctatgggagcatttagtttttgaaagcagcagggctcagacctggtatgacccatttcatgttgtaaagtcagcttttccttggggagagaacactggccccgtcaacagggtgaaggtgggttcacggtaactgagttattcgggaagggcaggccagggctggctgactagatgagataagaaggtaacactgtcttttgtgtctttttttgaaaagagtagttgttcacttgacttaggagccagtgtgtggcataagctcaggaagcaaaacatgataaccctggaaggtgagaacctaatataataggataacagggcacacaatatttttttctaacctgctccaagacacctgatctgaatgagtgtgtgtgaggcatgctggggtcccagaggtgcagatttgaaatacctgtttaatgtgaccttaaatttcttttcatgtcttggttcttttgaggcctaacttagattaagaggtaacaatgattctgatgttccctgcccctcgaatattggactctgtatcgtcggcctctgtgggaaaacaaaggtaaactgttgagtagagagtcatgctgagggatgtctagctttaagagaaacttatgcaaaa

SEQ ID NO: 104360 - DNA, 1032 bp, Homo sapiens
acttgagcccaggagttcgaggtttcagtgagctgtgatggcaccattgtactccaggctgggtgacagagtgagaccctgtctctggggagaaaacaaaacaaaacaaaaacaagccatattttattttacactgaaaccatgatcccttttgaaggtttgggcatatctttttttccaacagctttattgagatgtaatttacataccataggttttaccatactaagtgtataattccatattttttatatagtccagtttcacaactagaaagctgaccattgatacaactcacttattttggggttgtatcaaaaatttatctatatcattacaatctaattttagaacatatctatcagccctaaaagaaaccacatgcccatttgtggtcattaccgattcccatccccagctttaagcaactgtcctgagtcctagcagtgcttcagtcctagtagtccttcatggcttcatggcttcatagctttgctttttgtgaggccaagatctgctccctcccctacccctcatccttaaagccatttctttaagaagctctagtatcttgtagtagaaaacagtatttcgaggaccctgtctaggccctgggtatgctcattgctattaggttggtcattgtttctaggcctctgcagtggacagactgagataaaatgccaaaatgagtatacactgatacttccattttgtgatttttagtttaacctgttctgtattacatctatctcctttcttccacagcaggaatactggttttcaaggacacaggggatgatagactagtctataatcacgcatttattttatcccaggttacatacacagtggtctcaataatactaatgctaccatccccagtgtaattactgagaataggtttttaaaactcccaaacatttatatatgcttttcctgtttctcccctagttttaaaatactgtactatttctgtattattgaaacatatgtccattatagagagtactctttccattttagctctca

SEQ ID NO: 104361 - DNA, 1108 bp, Homo sapiens
gaatctctggtgttggggagcagcaatatgtagttttaaccagctgattacataatctcaactgcacaaagcctgagagccactggtgtagtagaattgcagagagccaagggcagagctctggggagcagcagtgtttcagtggctgaaacaagagcccacatattttaggagatgaataagaacactgacaaatgtaggaggagagtcatggttaccaagggacaaacgacctaattttcagaatagggttacatgcaacaaaaataatcaggtggatgaagaattgagacactaatgttaaataaaatcattaaaatacagatttccatttgatgcttgaattggccagttgagatttataagcacatttgaccccttagtggaactagaatgtgtcagaatgtgagcaaacagtgctatttaattcgtttagctagattcaggacaaaggacaaagattgattatgtaatctcacacgtacagaatactatttcccagagtcatttgtgatacttggggaaatgtatttccttcaagaacagtcacgttctcaaaagctaatcttgttcagtctgcattcttatcagctaagtgagtcttaaacgaaaatggtctctgtaagtgacattaatttaagaggaagccagagacttttaggtcatttctgagtcctctgggaagtcataagaaagactcaagttcaattggacaagaggaatcactttaatagtgtggagagaaaagggcacacatgcaacacattactacaaccttttctggatttttatttcctaccttccttataggctgagaagtttggcgactcctttgtctttgaaggcatgttgagtgagcaagtgaagaccaatattcaacaggcagtaagtaatgtttcaacaggctcctgtatttctctaaggctcattgaaaagggtttgggtgaaaaatccaaaccacatgtgtcaccttcctctccctgtaacacctaaccattctcctgctgaggattgaccccaaataataggcccatggaccaggacaccttatcttaaggaaaatgggacaagatggtatctgaggaagtgatgggtctgccttgagttt

SEQ ID NO: 104362 - DNA, 1044 bp, Homo sapiens
gagccctgatcatgccactgcaccccagcctgggcaaaagagtgagaacctgtctcaaaaaaaaaagaaaagtgggatattctcgctacctctgcattctagccgttagcggcttggtgactgttattccagacctgtttccagtgcaggtacagatttgtatcaagtagtggtttgattaaggagattaccttcttaaagaattttcacttctttttgagactcgtgattcaccttctttggggtatagagagatttttccgaattttacagttattactgtggtgaagatttacaaacttgcgtgcttcctgggtgctaggaactttacccctacacaggtacaccttggctgtgatgcatgacttcctgtgtttcacctttcattgtagatggtccccatccctgctggagtatttacaatgggcacagatgatcctcagataaagcaggatggggaagcacctgcgaggagagttactattgatgccttttacatggatgcctatgaagtcagtaatactgaatttgagaagtttgtgaactcaactggctatttgacagaggtaatgggattggggaaaggagggagaacttgttcttttccagaacttttaagaatgctttaatagcagctaagattgactgaccatttttactgcattctgtggcagaactgtgtgaagcattttattgtatatatttcatcttaatttctcacagcaaccccatgaggcaggttatttttcaggtggcatactgaggataagaaaagttatttgccccacatcacacagctagttggtggtagagctgggattccagcctggccagtttgacctcagaacatgtgctataactattatgctatattgtgttaatgcttaatgtgtcagagaataccactgtccactaaggctttttgagataacagatggcatgtaaagtaagaccacttttcttctcagtaagttgcagtttgtttttttccagaagcatttcatattttttaagtgataaatgcagaagtgcagcttttcattt

SEQ ID NO: 104363 - DNA, 1909 bp, Homo sapiens
gcggtggctcatgcctgtaagcccagcactttgggaggctgaagcaggagtatcacttgaactcagaagttggagactagcctgggcaacataacaagacctcgtgtctactaaaaaaaaaaattagcagggtgtgttggtgttcacctgtagtgccagctgcgtagaggctgaggtgggagagttgcttgagaccagacgatcaagggtgctgtgagctgtgatcacgcctctgcactccagcgtggggtgacagagtgggactccatctcttaaaaaatatatatatatatatatgtatatatatacacacacacactctcacacacacacacacacacacacactgtgtgtgtgagggcacatgagctagagggatatgcaggcaggaaaggcctcctggaggagctgatccttgaaccatgacaatatttaccaagagacaaagtggtttatggaaatgcgggtgaaagacagggcaagagagagtgtgagagatgagctctgatgtttatatatgttattctgaaaggcgataggaattcctgacagttttaagtaggaaagtagtatggtcagattgacactttattttttaaaacaggtagtatatttacgtggtttaaaaatttaaaaacatatagaagagtatatagtgaacaatttctcatttacccagtaactttcccctcagacaaccactgcatgcatttcttatatatttcctcagagctatgttctgcaaatataagtaaatacaaaaatagtgtacctgtatccctcaacctactttcacgctaatgacagcataccatacttagcatttgtgcaccttgctttgttcttgtagctcatcatggtgagatctttccatatcaatatatcaaaagcatccttttttatccccctcttcttttttctttcctatggctgcttaattttccattttattgaaggcccacaatttacttaaaatgagcctgctattgatggacatttagattgtttccagcccttttcagttggaaaattgcattgggtacagtagactaacattttcagaaggattagtaggggcttaaatatttgttgaatgaattattgaatggaagatagatgacttggaagcaggtggggatgtgaaaggagactgaagacaggaacaccaattacaagggttctgcagttatctgggggtagaaaagagggagagattagagagatacatatttaggaaatctagtgagactaggtggcctgtgtaatattgggagtaggggatgtgagtagtcaaggttgatttcttgggatagtagtaatacattagacaaataaaaacacatttattactaatttatcataaatgaaaacagcaccatttttattgggaagtacacgcatagaatcaaagcagccaccagcaaggaaagccagtagaaatggaaagtagaatcaatgactgtggattcctaatttctgtttcttctgatgttatttttctaatgcttctgcccgtattgctaagtgactctctttttttccaactagtccatctctccttgacttcttttttttcccctttctaatttgagcccttgttttttaaaattttatttttaattgacaaataattttataataatttgtggggtacaacgtgatgttttgatatatgtttacattgtggaatgagtaaatcaagctaattaacaaatccatcagctcacatacttatattttttgtgtggtggaaacatttaaaatctattttttaataattgcgaaatatataatgcattacttattatagtcaccactctgtgcaatacatcactaaagctaatttcttctatctaactgaaattttgtaccgtctgatcaacatctttcctttccccatcttcccctc

SEQ ID NO: 104364 - DNA, 1044 bp, Homo sapiens
agagagatcatctcccactttacagatgaggcaactgaggcttaaaggaatcatatagctcagaactgcaagaaactttgaatgtcatttcatctatgattagtgtctgtctgtagaggcaggagggtgacagaatggtatagataaataagccctgtatagatagataaggcaggagtttgtggacagatccagagagcatgcttctcttattcacccagctttctcatgaacctttagcttattttattttattttttattagaggggactcagaacaagagcctttagcttttaatgttaaggttgaggagaggaaagaaggaaaaggagaagttacacaaaaaagttacgtatgagctgattctatttttgtgtacaagacaaaaatcttacggtagcaagtgaaaaaaagacaagactggcttaagcaggaaaaaactggaagggacatttatagctcccctagttgggaagttcaagagtaaatatggccccagacacacctggatacagggcctcaggcagcatctccaaggcctttctctttggctatctcttggctcttctgcatagtcggctccattgtcaggtaatgtcccttctcctactgataagataactagaagagaaaaagttctttcctggtagctccagcaaaagttcaaagatgaactttgattgggtcttgggcctatccctaattacatctccgtggtcaaaagaatgctatggttggccaggcttggtgggggttgggaagtaggatagagtcatccagtacccctgggccacttagaaagcttaagaaatggttttggaaaggaacttcagtattttacaagaagtagagggattgggtgccggatggaccaaaatagcagtgcccactgcacatggcctaagtgtgtagcccacatatggttctgttattccaatgaataatagagtcattctttacttcacttatgcttctggcttgagtggcagtggcagaagctgtggtgtggcagggaaggggttatctcaccttcagattggagg

SEQ ID NO: 104365 - DNA, 1190 bp, Homo sapiens
ctcgctgctgtgtggagcggcagggagccaggaggccgggaccggtgcgggcgcggggtcccttgcgggttcttgcggctgcggcacgccccagcggcctggcgcccatggcagttcggcagccgctcaccgatactcgcgggaggctaacgctccgggccccgtacccggagagcggcaactcgcgcactcaaaggtgctccatcgattcctccgaggcgggtgggggctgctcggttcctggacggggttggagtaggcaaagcaaggcactagtaggaagggaagtaaaggttataaccacaccccaaatcgagcacctgctgttcccgtatgaggagttccttctccgtgcctcaccggaagactccatttaattgaccattagggagtttggtttgagggttattgttacttctttaccccctatttctttctccctccaacctgttctcttaatgaggatctcataattttaaggcaatcaaattatggtttaaatcaccatttcctctcttattaacggaataaattaggatcctgggtctcagtatcttcaccagggttgttgtatacttatctgtagtctcctcgagtacactctgcttgaggacaagggcttgaattgtttatcctgctattcttagcactttagcacttaggaagggctaagcaaactgtagttgttttattgctattatttatctgtcttgcttagcgcctgtatgtgttaggtgccgggatatataaataacttactggccgggcgcggtggctcacatgcctgtaatcccagcactttgggaggccgaagcgcgcggatcacgaggtcaggagttcgagaccagcctggccaacatggcgaaaccccgtctctactaaaaatacaaaaattagccgggcgtggtggcgggcgcctgtaatcccagctactcgggaggctgaggcaggagaattgctggaacccgggaggcggaggttgcagtgagccgagatcttgccactgcactccagcctgggcgacagggcgagactccgtctcgaaaaaaaaaaagaaagaaagaaataactgttacttcaatctgtctgcccggtattttgcatattgatgtgttgtcgaaacaacttatgggtctaaaggtcaggtcttctgactcctaaactagtgctccttcttgtttacttagcag

SEQ ID NO: 104366 - DNA, 1018 bp, Homo sapiens
aaagtgccccacccagcacaggtagtaaggggtagaactagtggcttattttgtgaacgcagtagtttgcaaaatgtatggattagcatcatcttggagcttgtcagaaatgtgaatttttgggtcccacccaagacgtactgaatatggtggcatccccagcaatcattgctttaagaaggcccctaagtgagtctgatgcaagctacaggtttgcctgacccaattgcaactgattggaccagaaatagctacgtgactcaaatgcagctaaagcataggcttcctattggtctatggtgtcttgtggtgagagaaagaggagctgggcaaaccaggcttcccctttgtggcaggtgaatggggaaacagtgatgctgaatgaggctgtgcagtagcattgaggccatgaagggtcaggaacatgctgggaacgggaactgtgactaagcagaagctgtgaagccaaaaacaacaatgacaaaaagacaacgaggaggggggaggaaggcaagccaactggaagagaaaaaataagtgtgcagggaaaagcagaccttggagagctggggagtgaaccaggagagcagcagagtgaagttcaagaaagtccgctgctgaggtcccagagctgctgcagcctctaagccaactcctggttctgtttttcacaatgtgccagtgccttctgaaactaatctttctgttgtctgcagcttctgtcctgtgtattcttaaaatgtatcttttctttgcattttctttaaggaagtctttccccatgccctccacccccaccccagtgctttcaaggagtggggaaagtaagaccagaagcatttgaaaaagaaaagggggcggggcgcggtggctcacgcctgtaatcccagcgctctgggaggccgaggcaggtggaccacgaggtcaggaaatcgagaccatcctggctaacacggtgaaaccccatctctactaaaaatacaaaaattagccgggcgtggtggcgggcgcctgtagt

SEQ ID NO: 104367 - DNA, 1062 bp, Homo sapiens
aaataaagacacctcgcgcctttaatccttgaccgcaaacactggcgtttttgtgccccggatttctgaaattcttggctcggggaaccaaggcagggggagggtgggcttgtaaaaacttcccaaagcagaaatccgagctcctagcccctccccggccccagtgacacctggattccagggaaggggggcagccggaggagaggcgtccccaagggttgcgggcgcttcccaggggtgactttgaacggctggctccaagccctaccgaccccagccaaggaacaggctcagcagcctgaaagcctcgcaggacgcccctcccctgtccccgcacgcgtctatttagggcccagcccgggcgcccaggggattctgggacttgtagtccctccccgcagcctcaggcgccgccacgacccgctacttggactacattgcccagggagcttcccggcctatataagccacccggagccgctttaaagtgcagtaaccatgtggatgtgctgctgaagcgtttcctcaagctcgctggggtgggaggagaggaggaggaggaggtggtggtggaggaggaggcagggggtggagagagagaaagcgcacgccgagaggaggtgtgggtgttccgcttccatcctaacggaacgagctccctcttcgcggacatgggattacccagcggctgctaacccctctcctcgccctgctcccccaaaccggcgtggctccccgggcaccaaggtagcggctggggccgggcagagggcgcggggagttggcactggctccccgggcgcagaagtttttgccccgctctcggggagatcttgatggatgtgcatgcacttggcatgcatttgggggttcctttactgcgggcagttgttttggggggagctcatttgaagcttaaaaaacaaatatcctctactctagtgcgtggctttgggggctccccattctggtctgatgtggcattcccccaagttggaaactgttgctgcagctgcaggaaatagttctttttttttttttttttttgaagagaggttgtgg

SEQ ID NO: 104368 - DNA, 1055 bp, Homo sapiens
agatgattgctaatgagaataagccagatacaccactgaaaccgtcacccattcaactttgagatttctaaattggatgtagtttaaggcacatggtgtggtaaatctatttaacagactctaagacctgttcaagttgtgtgcgattcaaatgttttattctttattcaacaaatttcttgagcacctgctatgtactaagatgtattccaggtgctcaggatatagcaatgaacaaaccatcccgttcccaagaggcttacatctcagttggtgggaggcagccaatataaataaacaagtaagtattatagtattagaggtagtaaaagctatggagaaaaagaaaactggttaaagggggaacagaaaataacaagtggagaaattagatcccttgtgcattgccggtgggaatgtaaaatggtgaagctgctgtggaaaacagcatggcagttactaaaaaaaattaaacataaaattactatatgtcccagcaattccacttcaaggtatatactttaaaaaattgaaagtagggacgtgagcagatatttgtacacctgtgtcagtagaagcattatcacagtagccaaaaggtagaaacaacacaagtctactgatgaatgaacagataaaatgtgaaatatacatacaatggaatattattcagccttaaaaagggaattctgacacatgctacaatgtggatgaaccttgaaaacatgctaagtgaaacaagccagaaataaaaggacacatattttatgatttttcttatagaggcatctagagtagtcagatccctgcagacagaaagtagaatggggattgctgggggagatagaagacaggaagggggagttagtgtttattgaggatagagtttcagtttggaaagatgaaaaagttctggaaatggatggtggtgatgtcacacaacagtgtgaatgtacttagtgccactgagttataacatttcaaagtggtatattttatgttatgtatattttacagtaattttaaaaagcaacaaaacatgatgaggggtatta

SEQ ID NO: 104369 - DNA, 1012 bp, Homo sapiens
ttattccactatggaatacagtttaaatggaataaagtgtaaagatgaatatttgcagagcccaaagaagtgctttttagttttgtaaaggctcttcttttcagatagtgactcctttataatataagcaaagaccaaacctcctgggctgcctatctcttttctttgaagcagacatttcctattttacattgctgtatgcatttgaaaattataaattgcataaagttctataaatcagatttttgctcttttgtgcttttttcccaatctttatacaacttttaagggtataaatatatttcataatgtactcatttgattatcttctcccgtctcctcctacgcctattgtctagaagaggaaatgagaggtgaaatagtcccaaaggcagacagaggcagaatggagaatcaagatggttaactccaaaatagttacgaatggtctatattgtctttgtgtagaaaggagtagtgaggccccggggcggcattgttgaatttggcaagagctggactcaaataaattgggggaaggaagaccagcagcttctccaagaacctcatttttacagcagccagaccttcctttcaattatagctattatttaaagcatgcttgtttcctggtatttgtgcagaatgagtattcctaggctctcatgcaggttactccacactcagggagcaaattattatagatacagaattatagctcaattagacttgtgctcccactgtagagagattttgtttcaaatgtcatccagtgaaaaagaagtcatccatggctgcctgatcaccagatccagtgactttctacatttgacctctctccattatggacctacccttaacaatttatcttctgtggcttttggcaaagaggcctccttctgccctgcctctgactctccctcctttcttcatggttggctccttcctgttttcatcgtctatggttgactcttttaccctcttcttcttttcagtaatgacagcaacagta

SEQ ID NO: 104370 - DNA, 1068 bp, Homo sapiens
gacaggattttgccatgttggccagaatggtctcaatctcttgacctcgtgatccgcctgtctcggcctcccaaagtgctgggattacaggtgtgagccaccatgcctggccatggcttgatgatttattaacctagccctaccttggattctgagcccaccctgtcaagcattatgttagctctgggggcattactatacttacaggagcttaaggtggtggttttatatatgtatattctgctcttgatttttacatgagaactcaggccattggctacactgttcttcttgtttatacagtgaagtcttgtgtcatgaagctgaaggaggcaaactgctggtggggtaccatggacactttgatttacccaccaaatagatactgagctgccagccttgggcatcttctggccttcatggagctggtagcctggtgcccctttggagtctcagtcagtgaggttgggaggacagagaaggagaggcagagagtgtctggcgcaggagaagcttggtcgggggggctttgtggagaaggtggggctcttaccctgagtcctgaaagacaggcaggacttgaggaggcaaaagggaatcttggagaatagaacagtaagggtcaaggctgaatatttaatggtaccttgcatttgggatgagaggaggcagcacagatgaatggaggaaccctggaaaaccatggtgtgttagctgggaacaactgcaagttctgtggtcacttggaagattagccagttctatcagtaccagttttaggagcttggacaagttgtgtaacttctcagagtctcagttccctcatctgttcaaaaatatatttttaagtggttcttctaaaagaattgtgcaagttagacttagcagtcaggactttaaatactgagtctttatgtaatgtgagcttatttatttgtaattttttgtactttccccactagttgcttttgatgctccacagtcctttcatatcttcatgagtttgtgctcatggttctttccacctggaaacgctcccctctagcctccaacatctatttcgaatct

SEQ ID NO: 104371 - DNA, 1423 bp, Homo sapiens
ttaactgggcattgggatttttgaaagcttctcaggtgtttctcttgtgctgccaaggttaagaaccatggctaatgaaatctaggctaataaaacttgaactttgttattcagggaagagctgatctaggtttcgcttttgcagctgggaccaaggggagggatatgcgtccggaaggcattgcttgggtccagcgtgagctcttatcttgttctatatacgggccttgggagctgggagatgaacctgggagagattctaatgtactgtacgaagttaactagtggctatttgttttttacaaatacatgcacataatttaaaattttgttttttaaatcgacatatatttatggtgtacaacatgatgttttagaatatgcatgtatagtggaatggctaaattgagttaattcatatatacattacctcacatgcttattattttttttggtgagaacatttaaaaactactcttagtgagtttcaaatatacggtgtattgttatttgctgtagtcactgtgttgtacagtagatctctggaacttattcctcctaactgaaatctgtatcccttggccaacctctcaatcctccaccccagcccctggtgaccactgttccactctctgtttctaggagttcaatctttttagattccacatataagcaagatcatgtggtattcgtctttctgtgcctggcttatttcacttagcataatgtcctccgggttcattcatgttgtcacaaatgaaccagggactgtttgaatacagggttagaatgttaaaaataaataggactatagcaggggaagtcggaggagacatgtttttctggcacgactgtaaaggtgcctggtgcttggatgtatgtatggtggctgatttgaagtgactgttttgagataacggtaatagtctgacagaagctatttggaaggaagcaaactccttttacagcctggcctggttctacaggtggtcacgtgacagtgacttgatttgttgagtgcttttctccctaaattaaaaataaaggtttctgggttgtgagatgcttcgtccttgtgggaaaatctggttcaaaacaagctctgctgcaggctttgggaatgtaggtcaggacttccttaattccatgtgctaaaccagaggtcccctgcacccaggtgaggggcctaggcagctctgcctttgcaggctgcctcagtgctggaaagatctgcttctccaccgtggaacttgggcagtgagttttaaaaaattttccaaagcattccttcaactgcggtgcagcatactttgacgtttttttttttttttttttttttttttaaatgaagagaaagatctctcttttggaagcaattgctgcgtttccaaatataagtgtattttggagctgaagtcatttt

SEQ ID NO: 104372 - DNA, 2072 bp, Homo sapiens
gaagaaaaggttggctgcacatctgtttcacataagccacatctttttcatctgaatgaattttggacaatatcattgtcctcgtaagggatgaggagagctgagacttagaataatacagcaactttagttcttttattaatatggtaccattttaaagccccaacatccatggaaggtaaggcagaacctcctcttctccctgatttgtgttgtctttgcccataatcttgaaagaatagagaaggcaaacatcagattgaaacagggaatagaaactttgtggttagtgaattcctttatctgtattatcttttcctcttcccacttttaccagtccctcccccagctcccccggtgctaaatataaagatatctacaaagaaaaggtggaaactaacaaccagtcttcattttgctcccagaatctctgctctttttaaatataaatcacctccagggttgttggagtagaaacaagggaactgggcttttgggcaattagataggctttagtgttgatcatgccattattgcataagattcgggcaacagtcaggctcttgctttcaaaacctaatcttctctgttcacatcaagaggccagtcatggctccaaattcttgatgttggacagatgttaccatatcaataatatcaaaatgtgcagcttttaactttgcagggagccccttagtttcagaataaaagctgttcgaagggaaacttacagttcaaaatgaggagaagttggggcaggaaaaaatgaggtgaaaggaatcattattctatcactaagtggttcatatgaattggggaggggatcagacagactgaatatgtggatgttccagataagtatcttacatttctctttcccagtgaagttggtttcaagcatcatagtctaatctaagcaaatgtattgtgaaaaatgagtgttgacctccagcgctgaggccctactgtgtaccagctgctggccttggtgatggcaggacaagatgagttacactccttcttgctttcaggagtcttagagtttcatggagaaacagacccacattataagttacaatagccaatgttaatacagcatttattttgtgcaaagcacttcctttgaattatctcttttaatctgaggaacccacctatgaggtgtaggtcttgatgttcccattatgcagttgaggaaatggaagctctaagaagttgggtaacttgcccatagtcagttaaatgtcacttcttagaatgattatcattcatttcacaaacacttattgggtagttcccatgtgccagccatttgtactccatgaggaaagagacattctcaaagaagtctacatcaatatgtagtgaaaatctttaagaaacttctttagagtaatttgttgtcttcactgcaactatttatatataagtagaagcaaagcaggtgaaatttcttcctacctagtataaaacctggcctactggggaaaagtaaatgaggatgcttttcatgtcctaatctttcgctgtgcagcaccctgagaccagagcgcatctatttggtacctgatgccatttgagatgacaagttatgagctggtccagtgccatgtgacttatgagtgtcgtagccagagccctcttccaaaggctgggcccagtgcttttcttcctttgtagttttatggagacaaggtctcactctgttgcccaggctggattgcaattgtgtggtcatggctcactgcagcctcgaccttctgggttcaaaccatcctccttcctaagcctcccgagtagctgggactacggacataccccatcatgcctggcttctttttaaatttttgtagagatgggggtcttgtatggtgctcaggctggtcttgaactcatggccccaagccatccaccaccttggcctctcaaattgctgggattactggtgtgagccactgcaccctgccacacttaatgcacttttagccattgccccaaccagctgtgggatgcgcagtatgttacttacagtaggatgagtcctgtttgtagtgcaaacgagggtctggcct

SEQ ID NO: 104373 - DNA, 1040 bp, Homo sapiens
ttcaagctatgagatgcatgtctgaaggctctgggtaccctgaaaatgagcataagggaatttgtgtttactttgatgccctggatccattcttttttgcatacctgagtcaccctggaaagtagacctcagacccctcttttatagtcatttacccttatgatttagttgctaatggagaaccattttcactatgtgcataaaatgcttctagtgcaataaataagtttaccttgtcctccaattgaatcactgtattgcttttgtgacttcctccattgagggtgaaattgatttggaaatctcagcaagcgtaatggggtcatattgtcatattgtcatattgttatatggttctcctgaaagcagtatactgtggttgattacggactttttcttttggcaaagggttttataatcccgtcttgagcattgatgaagatgtgtggtgaatcacttgagcttatgataactcttttcctttcttgtttgacatgtgagaaaattagagggatttagaaagtctcctggggtcaaagagcaatcctgtgccaaaactagggttggggcacaaccccagtttctactcacactgtcttttaggcttctgtgtttgagccatgaattaaaaattttttttggttccatcaccctgtgtaattaatgataacctactttttataaatgcaaataatagtgaataccttgtgtagtgctaagagacattagtgaatataatctatttaattaatatactttacatacactcatttatttaatcctcataacaaccccataagtaagaccggtacctttctacagatgaggaaactgacatgtaagatgtttagtgtctggtccaagatcacgtagctagaagtggcagagctgggatttgaacccagtcaatctaacaccataaatcctcctcttaacagctactctaaactgcctttagaagtggactggccttgaaatattctttgacaaaaattacccgatttcttaacttcctcctctgcaaccccaaagtatgtcat

SEQ ID NO: 104374 - DNA, 1050 bp, Homo sapiens
taggagtttgagacctgcctgggcaacaaagtgagatcctgtctctacaaaaaatgaaattagccaagcatggtggtggtcacatgtagtccctgctacacaggaggctgaggcaggagggttgcttgagcccagtaggttgaggccgcagtgagccatgtttgcaccactgcactccagcctgggcaacagagcaagactcaacaacaacaacaacaacaacccctaaaactgtcttgtagttgactcgtcttctccctggaaagtggatcttattggtctcattctctgagagtgtcttctccttgactcctaatgtttgatcttttttctctctttcatgcctatagttttgagattccttggctgcattcagtacatgagcatgaaaaacaaataattgttaagtaccttcctcctttgtgcttggctttctgatagggtcatgcatgcttttgttcttgaccgttggagcacactgtgacatgggtactgttatgtccccattttacagttgggcaccctgaacccacagagggttagcaatcaaggtgtatctgggatttgaacctatgtctggaggaccacacagtgtctgccacttaagtgaattcacagagttgggctgctcagaaaacacttgaggcttctgatgtcctaggttccacatttcaaaggcatgttgcttcgtgggaataaagctaacgcaggggtaacttggaggctaggtctccattcgatattgaatgatgacgttttagattagctccggcaacaacatttctcaccaaagttgctgcacagactcctcacctgtttctgtaattccacctttgcctcctttgtgtctgagtgtggacacctcctccaatccaccgtttactgcggctaggggaatcagcacaggtctgaagatgtcattcagctgcttggaacctcatagtggttccccagttgtgctcaggataaaagacacactctcagggttcccagcagtctgcatgagtcaccactgcttacctctcagccttatctgcagtaactcctcca

SEQ ID NO: 104375 - DNA, 1341 bp, Homo sapiens
gctcaggctggagagcagtgatgcaatcaaggcccaccgcagccttgacttcccaggcttaagtgatcttcccccctcagcctcctaatcctgagtagctgggattacaggcgtgtgtcaccacacccagctaatttttgtattttttgtagagacggggtttcgccacgttgcccaggctggtcttaaactcctgggctcaactgatcctcccactttgtcctccaaaagtatcgggattacaggcatgagccacggcaccctgccgagattctacatttctaacaagttgtcatgctcctgcaaggctctcgggagccactgactgttatcttcccttattttatggctgtcctatagaagacagatgttctgagcccagagcaatagagaatgagggctagtggatcaaagtgcccagaggtagaatatgaggcttaaaagaacttaattctgactattagtgctgagcagttactcaaagaagaggcctgcttcaaattactgagtttcccccgattcaaagagggctgaccatctgtcggggattttgcagagggaatttctgctctgggacagaggttagatggatgattccatttgactgtgtgtgttttcccaccgaaggacccagctgttctttctgtttttgcttcctgtggaagccctatggttgggagcgttgggtcaataaacagctggggagagcacagatgcactgtagacaagaaactctctggaaactgaatgggttcaatccaattggtaagagaacattagtggaaagatggcattattgaatgtttgaaaaaatgaacaaatagaaaaaaacaatagctttctaagtcaaggcttgccgaatccggtcataatgagtgggtaagatgtcctggggagacactacagcgtggtggttaggagcacaggctctggagtcagtcatgggttcaagtccctgccctgctcttactagttatatgaccacaggcaagtcatttaacctgtctatgccttagtttccccacctggctgccatggtgaataacactgtggagctgataggcttgtgtgaggatgatttggtgcatgtgtaacacagtaaatacctgcaatacagcctcagcactcagtgaagagtggctattgtgactgaatttgcaattagcagctttcgggacatctcttaggaagctcaaacatggcctttgccatcttgtaaaacatcgatatgtccgttttaaaaactcagccagtggagtatacaaaggaatccatagccaggcagactttagccttcctgaattttttagattttattgagtgggcctggtaaccagctat

SEQ ID NO: 104376 - DNA, 1688 bp, Homo sapiens
aaatgatgttgggctaggattctgataaggacacttgttggtgatctgctagatgactttatgtgaaggaaaattattttcttttttttttttttaattttttttttttttttttgagacggagtcttgctctgttgcccaggctggagtgcagtggcgcaatctcggctcactccaagctccgcctcctgggttcacaccattctcctgcctcagcctcccgagtagctgggactacaggtgcctgccaccacgcccggctaatttttttttgtatatttagtagagacggggtttcactgtgttagccaggatggtctcaatctcctgaccttgtgatccacccgcctcggcctcccaaagtgctgggattagaggtgtgagtcacctcgcccagccaggaaagttattttctctccaaaatctgggcattttaaagcaactaatttctagactcttgttcctttgaatgcctaatgtgtgattaagtggggccaacgtctcctagttctgagtacagctatatctgcctcccccaactccacaggccataagcaataatctgtatgaagattatgtaaaatttgacatctcttttcatctacttatcaagagccccagcagtagctcatgtttctgatagtggctggaaatgtcatcaatattgtgtgaacttagaaagctgtggtaccatttctggaatgaagtggcttccagattttgtaatttcaggacaaagaggtttctggtccttcattgacactcttctctgattttattatcacctgccctggaggctgcagaggtgcaactggagttcagtcgtttgccaggtttatcactgattggaaacattgctctgggttttcttgaacttctattgttgtatctctttgtcaattacatattgatacattttcttaatttcagttttatgatttcagctttttaattggactttaagataactatctaatagaattggaagggtgaggtatatttaagggaatacaaatgtttttgtttgacgtttttaccattttgcatgtttctgtagtggcatctcaactattgcaatggaaaatatgtccttggcaagactcttagaaacacagcctcaaaggtcattggattgtgcaagcttcttgactatttacaaggtcacctacctgaatgaatagaaatgctccctgcccttaaggaatttgcaattttatgaagagagatgagtgagaactactttgtggattattcttggagaatgttgaatcccagatgagcttttagtcccctgatgttcattgtttttatctatgccatcagatcactgtgcccaaataatttgaattcatgttaataatagcttacgaaaaatgcagtaagagagcttgctggaaaagtgacagcatgcattttaaattacttctagttgacctggctttcattacccaaatatccacaggcccttccatgaatatggataattgagttgatatttagcaaataccattgaagaggttagatgtgtcaggttggttgttggaatggtgaactagactcttgattttggatgatagcttaaactaacctaaacaaaagggggattttttggggtcaatcccagacgaacagctgaattgcatgaaggacaggagtgcagcaggggctcaggaaaacacagattcagg

SEQ ID NO: 104377 - DNA, 1019 bp, Homo sapiens
tttccaggagttcttgcctcagacagagctcgtgcaccgttcactctagctggtgttcctctgaccagtcagtagcaaatgcatgctctgccttcagccacagaagtccgcaagcagtagtgtcctttgtgttgtttcctcttaaaacgtcatctacttaaacaggttgtgaatctgtcttaaggatagacaaataatttaatggcagaggtgtagggtgatgattcaaattcagtgacataaaccaagcgctgggccaactctgaccttttttttttttttttttaatccctttgaatcatcttgtgctgcattctgatgaaatcttgacataccaccctgaaggaagtgctgtgtgaagaagtgtgggctcataagataggaccaggggaagagaggggccactgaaggcttaactttgagtgtttggaaaacaacactggtttaggagctggaggacttgagtcccagtctttggtttgtccctgactagcagtgtgacctccaataacgctcttgacctgtctgggcctttgctgcttcatctgtggcatgaacacgttggactagaaagtgaaacacagcaaaacttttattgagtgtctactccattcaaggcctgtgctaggcatgatttatagtacggttgtagttacagtctcttcactgtctcagattccctcacgtccctgataaactttaatttctcttttaggaaagattcggcctgacattttatttttattcttacatcttagttttaagaagcacatagatttatcacttacatttactcatatgaataaataacatatgtatttattaaagccacttagcaaaggaattaaaactttcttctaaacttaccattcatggaaagctgtaatataagcaatgaaaagaccgttcttcacatgtgtcttgtgttactgctcctgggcctcctacttccatttccctctagatgacatggatttgtcccccttaattgtatccaggcctctatggcttcaaaggac

SEQ ID NO: 104378 - DNA, 1106 bp, Homo sapiens
aaaccggtggaattggatttggttaattgattgtgtactatgtctcagtcagcattcatcttcagtttttcacctttgtactgcattcaaacatcaagtttgggttggttatacatttggatttccttttccacaatattttctagcaacatcattcaagaactcgtaaagtgaaaaggggtgtgcgtgtgtgtgaaactaggacattcttgtctttttagtaaatactcattcctttatttcttattgctctaatggcatgtgactttaatttggtctatttagcaactgtttaatttctgtcatgcagaaaacaaatttcagcaccttttcccgaagcccgtatgcctccttatgaaatgtacaggtagtgatgaatgaactctttgtcctgtttattggagttgtgccagtgacccttttcattggtcacttcagttcgttcaaggtgacatgaaaggcattttatttggggggatgtctcagtcaagtcaggagtttcatttgggggctaaatttgagggctagtaactaaattgaaaagccactagccctccaattttaatctgaaataactaatgaccttttaatctaaagtaacttcttagaaacccacattctctgtaagtcagagaaacaagtttccagtaagtgtttgcattagacacttgttccaattctcacctagtctgggaaccccattaagaagatctgggttattctcccttctcagtaaaaactgacttcttgaaatggaaggccgatgtgtgttcccatgttaccaaggagtcacttttcgggagggggggacttgtttttcttcttggtcacagagtgcaaacaacaccaggccactcttggttgtcaagttagcaggaaagaacttaagccctctccatttgttaatttttatgaattattagttaacatgaaaattgtagtgtgtaaatgtttacaaagaaacttctaaataccaatttgccttataatacatagtttaaataaatatgatgcttttctttttaaaaatagacaaatgcactgacaggggtatttagtaatcattgtttgcattttgtcacagaatgtttaaaattgacattgca

SEQ ID NO: 104379 - DNA, 2693 bp, Homo sapiens
tctcttctttttgaaacctggaacattttggtatctctgaccagatgaattttttcccaagtgccttaggtgctgtcttccatctgaaaagtggggctgccgtcctcttctggggaatggaaccaaagtcttgggttcttcatcttgggttttcatcagtagcctctggcccttttttcctcctagacctataacttggagtgctgagaagtaagaaattgtcagaattaactgtctctttctcttgggccatttctctgcatattctcccatggaggtgattctgactcaggaaatgcccccacatagtcggaacctttcgagggcagaaaagggaggaaagaaaaggacgtggatatgtctactaactgaaaagccaagggtggtttgttcttccctgccgccaaaaaacaaaacaagattttcttcttgagacaacccttcaatgcctctgttttctttagaggactgttttggctaatgaaatcaatgtctgcaggatttcctgtgctttcagtctctttctctatagttttaacattcccctgtcattattagcaagttgtctgctaacagcttggcgcatgccagaaagctattctcggtggggttaatttctggctattaaaagttctctgagaccccagatctctctgagcagggccatgttggggatttccagcacatgtgctgtttagactcaagggccacagcaagcttccccatctcacagcagaaacactgtaggcacaggtgacagcaaatgggcattgaccagtccgctgccagagcgcttggtgaccgtccaacccacagacgcgctgccatctacctaacggggtcgtgacagtgattttattgcgtgcttcatgaaaatcatgtagtgcctggtccataataaatgattgcagactattgttatcctcatgcctgggacataataaatatccctaaactgttacatgaaaaatagaaattccctgagagcataattaggccagttatctccaagttagatttcgttcatgggacaaatggcagacttttccagcatgggctgaaagaagtaaaaaaaagaagaaacactgagaggtaggaggactgcttgaaactaggggtttgaaaccagcctgggcaacatagtgagatcctgtctctacaaaaaattaaaaagttagcgaggcatagtggtacacacatgtagtcccagctactagggaggctaaggcaggaggctcattcaagcccaagcccaggaagtagaggctgcagtgagctatgatcatgctactgtactccagcttgggtgacagaggcagaccctgtctttaaaaaaaaaaaaagaaagaaaagaaacactaacttgttgaagattgagatgactccactaggaacaaaaatggttggtgaagaggaagaggactgagaatagaatagtgctgcctgcctttgtgtttacatctcacatagagctatcttcccctccccacagagcagatgtagctgaagtgctcatgtgtatgtatttgaggggacagcaacttggaagagaagataccagctgcggcatctcatagtggaggtttggaggccaaggcagggcttcagggaagtgccttttctgcaacatgtgttttgttgctcttattcttgtcttggtctgcttgtaacaacaacaaaaaagaccatctggagtctagaaggcaaaaataatgggaatgaagagatggtgttagaatcatagcagtatcaccgtatttatgggatgagttattctactggccctcacttttggtgctgagattgagatgtgaaatcatgaagcgattcagaaatgtgtccttatgaaaatactgtcttctgatagcttcagcatacagggttttttatgagaacagatctttctaatctctcagcgttgccaagaagtgtccatgcttcttatctagagagattattccatgttttaattataaagggttgagtagctgtttcagggctgacgttggttcttgctcatgaatcaaggtcacaacagagctcacccctggccttggccagggacttaatgttcattcagcaaacatctgccaaaccctcactatatttacagcatgtgttaattgtagtgggctagatacagataatactccatgtatatagtacttttaacagtttctaaaggcttattctcttattcacatgaagaatctgaaatcagagaagtcggcttaagttatatagctggtaagtcaacaagcaatagctgcaaccagtcgtatcttattttttgactacatctctgctgtctgaggcaaggtccctactctcaaatgagttaacttttaatagaaaagataatttgattgactctaacgaacatttattacatatgctctggaggttccatgtgaaacaggcttgtctttaatctaggtctcaggatagcagaagtaatcccatttgtatttttatctgttttgtttaggatgcttatcacagttctaatgcagaaattatttggataattctgattgtggaaaaaaacaaactcaaagtgctttttctagtctctcactcaacagcagtcaacacagatttctgtgacaaacggggtgggggaaattctccccatcaccaagcaagcaatcaattctgcagcagacaacagctgggtatcttctattttaatg

SEQ ID NO: 104380 - DNA, 1004 bp, Homo sapiens
gtgaggaaactaccttaggtgtttcctgagttaggtgacttagccaagattgtacaggtagttattacagagacaggactagaaacttggtcttcagaggcaagcgattgcttttggcagtttggtgtgtatctttccaggatgtttcctattcatttgaaggcatataggcgtatattaaaacatacatttttatgaattttcttaaacccgtaattattattctgcaatttggttttttcacctgactcctttcttaacccattttttgttaatgtcaatagcaaaataataaataaaccatggtatatccaggcaatggaatattactcagtgctaaaaataagtgggttatgaagccatgaaaagacatggaggaaacttactaatctacaatctagtttttttcagcatttgaggattattccatagtatggatgtgccagagtgtaatcagccattctctgagtgataaaaattcaaactatttattttttaccatcatgagcaatactacaatttacttaaaaaatttatacagctcttacttttgtgccccttgctattctaaatgctgtacaagtattaaccaatttaatccttgttactgcataaggaggcttgtctgtcttatagatgaagaaactgaggcaggaagaaattaaaccatctgcttaacatcatatggctcgaagtcaggatttgcacacaagcacttcagctccagggtctgtgctcgtagacactgcgtcgtgctgtgttttagcagtgagatccttcacctagctcttcattcacatgtgcaaatattaactatgtgatgggtagcatagaaatagaattatcaaagaaacattttttctaatttagttaaaaaactttattattattattgttaggtttgcaacaacattgataggaaggtacagaggtttctcatatgtcccttcccctactccacagcctctctcactagtaacatcccccatcagggtgcacagcct

SEQ ID NO: 104381 - DNA, 1045 bp, Homo sapiens
gtggggacacagccaaaccatatcactgtgtcattcaccaccccccacttttttttgtttttgctatgttgaccaggttggccatgataattcccttttgactgtgttcagctgggcctgcttttgatgaaatattttggctaaagcttttgacagacctctgagtagtaatctgtggctttcaagcttcaaggattatatatttctttagcacttggcattgtttgtaaactaattgtttgaggtttctttttctttcacattatttttgcagattttatacttttttcctatatcaaagttatagtgtagggatatgactcagaagccagatgggggtaggggtgttcccaattattctaaatgtaaatgtaattagagtttcatgtggatgcatacctcctttctaaaaaaatatggttattttagcgctcactataaattcactggtattcataaatttatggtgaaaccctctagttataaagtgagttttattacatccacataagctgctttttaaaacctcctccttcactttcttttctctttcctacaagaacatcatttgtcccctcagaataagtttagtaaagtgtttggaccattctcaaaccggccaacttctcaattcagtttaaaaaattggaacgtatgcttaagaatagatgttctgagttagaatttcttccatcatttgacaggtttaacatatctaagatgtagggggagaatcttaattggacatacagctacccaatagaatgcctgatatgatgaagagtttgaagaaagttaaggacatactaatggcaaatagtgcaaggaaaaataaaagcaattagaaactccaggaaaaactaaaactgagctaaaattgaaatgtattcatattacattatttgagatgcatagaaaaatatttacatggttataatataaacacaatcaatttatagacaaattacaaagctcgtggttataaaacagtaatgctaatcaacctcaatgatatgaaagtaaaaatatagacaatagatggtaa

SEQ ID NO: 104382 - DNA, 1445 bp, Homo sapiens
ttttaaacaaaattgtaataaaattttattgatggtatacacatacattagttattattttgtagagtttttaatgctcaatgttgatatcaacttcctgactactatttttaaagaaagaaggaaaaaccaaattgaatagtatctgttttttccttctttctttaaatcatgtgtttatggaataatccagaagcataagaggcgacttttgtgttaagcatgaggtgactttcatgttaagctttctctggaagaagagagaactggatttggactttttctttcaaggagaaagaaaaaaatgttagtcacattacagccttgaaagaatcttcttgaacagttctggaggaacagattaactttggtgcatgtagatacagtagttcagcctctgccacttaatctatccccaaggtctcatggagggaagaagtagaggtgacagcgacttattataacgtaactgagtggttagtgaatgttctagaactcctatcttggtttgattggctttttgttcatgttcttttaaccttttgaattttgctaaaagataggtgctttgaatccaggatcctagacaacttgggggccaatgaattgatttcaagatggccttttgctgctttgaggatgcaggctgatgacttaggtcctgtgttcattgattctgctggagatgtccatagaacgaggaggagaatcttgggtttaatgtctcctgatttatttttagcagctgacctggctagctgtgatttgctaattgtctgtatgtagtatatgtttgtaagtgctgagtcgttttgaataaatagtctcatatgaagtgagatgatctacttggcctagtagctgattctttctggaattgataatgacgagagtgaaattctatcttaacaagtgcagcagctgccctaatggagaaggacgacgtggaatttcccattgtctacctgtactgtcctaaaaatatacgaccaattccagtgactgataatgatattgagaccgagtggttaataatggctcaagaaatcccagcttgatttgaccagctttccagcttttttctttggcaggtggggagtgggggattaaatctgttgacttttgcaaatacataattttatagaatatgtgtcctaagaacgaaactcactacatttctaggttcaaacttacttttttgggtccaatgctcaatataggacaaaaaagaagaggaaaggagaaaataagaaagaatgtatattagttaactcagatttttggatctgggtggatttcggatggtgttaaattggcctggggacttctttattattttttttaatcgtagcattggtttgtaatattcatggtttagcctgaatgacttaaaggatttattttttaatttaacgtgggttaaaagaacatgagcaatagacctg

SEQ ID NO: 104383 - DNA, 1240 bp, Homo sapiens
aaatataaacagataactgtttgttttgctcaaaggtcacattgaggattcagagctcatgactcaggatggctatttttcttagaggaatgatttagacaagttgaattgaatagctcctaggccactgacatttattcaattttgtctttaacatttgtttactttttgaacctgtaaaacaggggtgtccaatcttttggcttccctagaagaagaattagaagaagaattgtcttaggccacacagaaaatacactaacaacagcttatgagcttaaataaataaataaataaataaatgcaaaaaaaaaatctcataatgttttaagaaagtttacagatttgcgttgggctgcattcaaagccatcctgggccgtgggttggacaagcctgctgtaaaagactggaatttagatacagctcatcaaaatatcttgctattctaaaagtaattctcaatttctattttttctaagaaaaattattagacagtaatgttaagttgcagcaagtaggtttgcattttggatagtaatagtcccaattttattaaaaggttggcttatgataaccatagatttcttaattttaattttatttattttgtttgcacatactattttactgatagtatgtgcaaaaagatagtgagtgaagcagttggactaattgtttacactaagattacttaggaaggactatctggcatgtttatattacattcagcaaattgtttatagtagggatcatttaaatatgcattaccaatatctcaggttttagatttgccaaccctgtatgttgagattttccaggatcttataattgcaccggctagtggttctcccttgaataaactgcaagactttgcacttagctaaaaatgactcacctttgaaggtggtacgcattcattaaaaaaaaaaaaaatcaagtgcgtgcagtgcactgtgcaccatgctaagcactggagatagtgttgagtgagacaaatgtagtctctgcccccatagaacttacattctagtggagtgagacagacaccaagaagcaaacaatacgtaatgaacaagattacatcagagtgataaacactggaaagaatataaaataaggaggatgtgatgcagcatgactgggggtgggatgggtgggccagcactagatagggcagttagggaaatcttctggaggaggtaacatagaggttgacacttacaagtttaggaagagctg

SEQ ID NO: 104384 - DNA, 1440 bp, Homo sapiens
aaagagcttaaaggtaaggaataggtgggtcagttcagccaagtaaggccagatagaattagagttgagagccaggtcagagttgagagtggggagaaatagccaggactatttggcccaggaagcctgaatggggacacatgcacacacacacacacacacacacacacacacacacacactgaaacactctgcaaaaattgaggtgtttcccaggttcctaacctcctgaatgcaatgcagattctttcctccaccttcccttcattgttcccatacaactctggcctgtaatcagcccaacctgggcctgggccttggccactactagatattctgttggcaccaagagtagtcaggaccagttttccctctcttaatttcctcctcaggagagttgagtgtttatcatattctcttcttttcctctctctttctctgttcagcttaggcaatcttccattctgcagtctttctcctagctgtgtatcttgagaggtaatgcaatgtaggttaagactgcctgagttgaatcctggcagtgccacttatgacttgaatgacctcaagaaagacatttaatctctttacctcagtttccccatctgtaaaatggggataataatacctatttcagtggaatgttgtgagagttaaacaagttgatatgtggaaagctcgtagggtgtggtctgtaatgtgttcaattagcattaattgaagagaagtggagtctccccttcaattcttacctgagtaacactggacaatttcatactttgttgtcactatttttctttagctcttactcttttttatccattcctgtagcactagtgatcaggataaaagacgtgattgctaatagagtaataccttgttgaatttgtgtaatgttccaggttggaggggggatgataaagcctaagaagaccaagtccttttttcttgcaactttaaattgttgtaggaaaggagacatgttgataatggtttgcagtataacatggaacatgctagactccaagtcgaaactgagattagagataggcgaatgaagatgacagtcaaccacgtgcggtgggcttgggggctgaggtgggtcatggagggctttataggggaggtgacgcttgagctagttttttttggtttcttttttgagacggggtcttactctgccacccaggctggagtgcatgctgccatcttggctcactgcaacctcctcctgggctcaagtgatcctcccacctcagcctcacgagtagctgggactacaggcatgcgtcaccacacccagctaatttttttgtacttttagtagagatgggatttcaccatgttgtccaggctagtcgtgaattcctgagctcaagcgatccacctgccctggacttccacagtgtgggggttacaggtgtgagccaccgtgcccca

SEQ ID NO: 104385 - DNA, 1103 bp, Homo sapiens
acatggcaaaagcaggagcaagagaagaatggggaggggtcacacgctcttaaacgaccagatctctagagaactcactccatccatcacctcccaccaggccccacccctcacactgaggatcacatttcagcatgagatttgggtggagacaaatatccaaactctatgaatggggcaggttctttgatgctctcttcaaggcgcatggacttttatcttgtagaatccagggggatcccatgaaagttttttaagctggaaagtgacatcattaaatttgccttatttttattttaaagaaagttaattttggtgacagtgtggaagatgtgtttccttatatttggccatataaaatataaaatttgatttttaaaacattttaaaacagtttctagtattctaacagtataacagtatgtttagatttataaacaaaggacattttatgtttttataagtcaactcatttttatgactacgttttcaatggaaaaatgaatattgagcgtcaacaaacaaaacattgtgtgacaagcttgtgcattgctgattctctgtgttggcctcatccataaactaaagcctcttaaactcaaatctctgatgccttttagaaatgccttttactttctttttgtgtagtaagagggatcatggaacctatgatctaaaaactgggaagcaatgatgccatgtgtctgcaagcataggtaacacagctgttttagagatgtctttaaaagggtacatgagtgttttgatatttgagaacagatcttccagcttgtcatgggagttgcatagttttagaaatcagtccttaaccttaaactttgttcacattgaactctagaatagcagtggtttttgaagagcagttgttgaatgcatttatgcatatttaatttttttgaatggctattaaagacctaagacaattatattcaggtttcaaggaaagaacttcttgtgggagtttaacatttttaaattgttggttggtggagggctggtatttactgatattcttgagttaatgagtcccaactgtaatagccacaattgtgctgcccttcactttggagaattgcgtattt

SEQ ID NO: 104386 - DNA, 1649 bp, Homo sapiens
tgtaacatgatttccttcatttttaaggtgaaataatactccactgtatgtgtacaccatgtttggtttatccattcatttatcacggggcatctgggttgcctctaccttttgacgattgggattagtgctgctatgaccatgggcgtgcaaatctctttgagaccctgcttttaatttctttggctatataccagaaccggaattactagattatatagtagctctacttttgattttttgaggaaactccatactgttttccattacagttgtttcgttttataatctcgccaacagtgtacaagggttctaatttctccacatctatccaaaccttggagtctttttttggcttctctatttcatgccctaatctagtccctcagtaaatcctcttgacttatatttgaaatatatcctacatctgactgcttcccatctatcactgtcacctttttctgagtcaccattggctcttgtctggactatgatactagtcttctcactggtctcctggtctcaatccttgcccccctacagtctgatctccatagaacaaccagagtagtaatttaagaatataagctacatattgtcattcctctgcttaaaactttctaatgactcccatcacacactgaggataaaattcaaagttgtttccttggtttataatgtcttaaaaattctcattcctttgcttgcctggcttcagacacactggtttttgtacttgccttaaacacactaagattgtccctgcctcagggcctttgtcctcgatgtttcctccacctgggtgtctgtattcacagacatttgcccttcacagaggcctttccaaacagccttctcttaaaaaggtactcactgtcaactttttctattctcttaccgtactttcttttcctctgtgcacttgccactttctgacatcgtagtgtatttatttgtgactttcttatggctgttttccccaagagaatgtaaacaccatgaatacagggattctatctcagcatctgaaagaatgtctgatactgaaaagatgctcaataactatttgtggaatgagtgcgtaaaataatattttgtagccatgtgtttaagcagctttggccatggcgacagaggtgccccatgtacacatggcgccttaggtggaggtggttgcccaggaaaatgctgtaatctgtctaccatttctagccaatttctccagctagaaataatttatgggctattattgttcatgaggtctaagtgggaaagtatagatgccttatcttctttttttttttttcagcctcttattgaaaaaaaaattcagggattgatgggaattatttgcctctgcccttttggccccagatcatccttcctgagtcttggctgctccttattacctgcagtcacatttcctgttgtaatgtgagggcaatgcttcgtttgcacaatgaatgccggaaatggattttaaagcattataaagcaaagccagaaattcctcctgcaggggagatggtcggttgacaagtctgtgaattatataatagaatctcctcttactctccttgtaaaatataccaaaatatcaaaaaacaatgggcttttcttcccagtttgtttgggatcatactggcatc

SEQ ID NO: 104387 - DNA, 1859 bp, Homo sapiens
gcagggtagaggaggaccaggcaaggtcagcaccttctgtgctacagagaggcccatgtgagtcttgtcctcttcagaaggcggtctgcatgatgaaacacatctgcagtgatgctgtggtgctatgctagtctctgtcctgacttcactccctggtgtagggttaaaaactcccaggaaaggcttctttgttcttcccagaccagtatggtgtatggtggttgcttttacatcagttttaggtgggttgccatattctccacgagcctcttttaggaatatttgggatggtagtggtaatctatattgggagccatctcaactcagtattaaatgagtctgggacaacaagcaacacccaccccattacaagttttatatgaagcaaacatctatttttgctttgtgcagactccactgtataaagtgctaaaaataaccaaatgctcagaaaccatttgtgatgcaaaaatgactgtagggggaaccgtgttgttttctgccctggttataactaaatagtgtacggcaggaattgtgcccaagaactagttttgcaaggtcattctgaggcttttctggtgttggagggacctacagttgtccctgtggactcaaaatgtcatcttgcccacacaaactgttaaaataatttagacaggcttttttcttttttattgcttaaaagaaatagtctgtttgggtcttgaagattttgtgagttttatttttttttaggattttttttttttaaaaaggaaaatggaaataaacagatcacaggttagggtaaccagaagacagggttgttacgcctttaaaaattttagcacatttcctaatgctgctgtcatttcttaagtcatgctatgtgtgagacttgaatactcggtgctcccgtactggcctcagtgttgttaccaagaagtgcatttgccagtcttatcaaactggcatcagaaatcaagctctgagctcagaggttagataccgcttatttttatcaagtaggcaattttcctctccccttagcatatgcgctttgggttctagacttgttcgaacatgccaaagaaaccgctggttaatttaatgcctagaggccatgttcctactgtgtctgtaggaaaatgtcctcccccacccccgccaccccagcctgagtatgttgaggagccagttgacaaaattgttagcatgctgtgaagggacggatggtcacctcctcttctccccacgcgtccatgtgtatgcactcagcctgttctccggtgtgggtgtgaagatggacatagtcttgtgtgcttctctattctgctgagatttgtgttatcagctccacacttcaaggacaaaaaaagatccaagatgatgagtggttgaccatgttgcatgaaaaggaagtggatagagaggattcattctggaacagactagcaattgactggacaacgtattctttctaagcctcttaaccctttgtatacatctctttatggctgtgaaagtgtcttaccatctgttagattttttctgggagatgattagctttcagaaacctaaatgactcaagggaagtgaaagcaatactagactttctagaaaaatgtatggaatgtgttctccttcttccagctctgtgcgtgcttcagggaagctgctgcctctgctttagtatgtctgtgctctttgggctggtggcacgttgtctgagacctgaagaagacagtggtgaaatctaaatcagaaccctaggcagattttccttctttctttcttttcacccaccagcctttactttagcaatcttcctctccaatatttatttaaaattttctcagcatgtacaaactcttggc

SEQ ID NO: 104388 - DNA, 1017 bp, Homo sapiens
ctgatgctgctggttcacacttctcatggttttttttttttttttttttgagtcagaatcttggtctgttgcccaggctggagtgcagtggggcaatcttggcttactgcaacctccacctcccgggttcaagcaattctgcctcagcctccccagtagctgggactacaggtgcatgccaccatgccccgctaatttttgtgtttttagtagagacagggtttcaccacgttggccaggatggtctcaaactcctgagcacaggtgatctgtctgccttggcctcccaaagtactgggattacaggcatgagccaccctgcccggcccacacttctcattttgagtagctggggtctggactgtgcattttgactgtactctcttaccctttcagtctatttagtggattgtgtctcacactggctggaatttgtggcttccaacaacctactggaggtaattgcccacaggataaagtgagaaaaaggagcaaaatgggaagatactgaaagagaaactgtctcaatttgggaaggacttgttaaaaagacaagcattgctaattagtagcttagtatctaatctttgtcactgaaggctgcaaatcatgcttcctggagtcttcttaaagacagcttctgcagaggttttaacacctctcatctgacttttgttaaatagcctgctggaatccaaaatagaagctgtgtagggagattctccctaagcatatttactgccaagcctgctctgttaagactgtattgattttcccccctcttggtatgaaattagtcatataaaatcacaaagtcctcaaagacatttggttcaatctgacacttgatgcttagctgtccccttaagcacccccactgagggatccctagaccttgctgcatatcagaatcattaagaggtttaagaaatgattttctattatataagaagtagatgcatacagtcttctcatattcttgctgcaaaggcttgttccttgttctcttcctgaccc

SEQ ID NO: 104389 - DNA, 1031 bp, Homo sapiens
ggtttcaccatgttagccaggatggtctcgatctcctgacctcatgatccacctgccttggcctcccaaagtgctgggattacaggcgtgagccaccgcatctggcccaagttcattaattttactcttcagatatttactatttgaaaactcagtatgtcaaaatgtaaacttttcatggggagtgtcaattttaaatattggtttcctagagtagttattggtttgttgatgacatatccctgtcagaaaaatctggtgaagcccaaatattagctacttgagaagctgaggcaggaggatggcttcagtccaggagttccaggctgtagtgtgctatgattgtctgtgaatagccattgcactccagcctgggcaacatagcaagtccctatctctttaaaaaaaaaattggtggctataccctaaactttctgtgtgtgtgtgtgtgtgtgtgtgtatttttaaaagttacaaacgtgtattattgtagtaacacattgtaggcaatataaaacaagtggaaagtagaaggtaataactcagattaagattaaacaataatgtaccctgttatttatgatggtttcatattatcattaataccttaaaacacatagatgctttagggtaatgttcatcattaaaaacaatattttaagtggttttagttatgatttttaatgtctggatggctttttccagatctgattagatcatcattctttttgctttacaagagctctaagggaagggttggttctgccttttttggtttgctgggttgcattactattacctttgatgttttgatttttctgcagaaatcttttgaagccacttgtccattttatgaatgttggttataccacataagacaatgtataaagttgtataaaccgaggcatgctaaatggaagcacatcgcagtgcactgagagtgaggggacaagggcacagactatctaaatgccagtttatatattttctttctgtgtcccagaaggtcatcttgcacacagtactcaaga

SEQ ID NO: 104390 - DNA, 1087 bp, Homo sapiens
agacagcgtcttgctctgtcacccaagctggagtacagtggtgtgatttcggctcactgtagcctgcaactcctgggctcaggtgatcctcccacctcaacctcctgagtagcagggactccaggtgtgtacccccacacttggttaattttaaatattttgtagagacaagatctccctgtgtcgcccaggcttgtctcaaactcctgggctcaagcagtccttctgcctctgcctcccgaagtgctgggattacagacatgagccacttcgcctggccctgcgttgttttttaaactgttgcctgtgctcagagtggccttcctcagctccacctttgtgtcagggcatgccacactgcagttccttagcccgttcacatagggctaggtccaccccactgacggatggcaggttatgatggcacagttgacctgagcaacatccatcttgtccaaggctttgctgaaaaataaaacatgatagtttttcttgtattctgccctctctttctgctcccttttctgttcttccttttctaatcatctgcagccgtaggcactttgtgattctctggcttcaccagcagctcaatggtgggaggaatgtttgctacatagttggtatgattgagagaaggaatggtagaaaattcagatttgctgacactcactttattctcttggtgggtttttagctcctgcatttgaaaagtaataaatacctaacagtgaataagaggcttcctgctctgttggagaagaatgccatgagagtcacattggacgaggctggaaatgaagggtcctggttttatattcagccattctacaagctgcgatccattggagacagcgtaagtgcggattctccacctagaaagtcttccgtgccatgcttccaagcatgactgtatattagagttaaggaggagacgttgaaagttggaaccagaggcttgtcctgtgtaaagagaagggaattgctatggaaactagtgtttgggaaacagggaactgtggagagaagtgtgacctaaatactgtcactgtgtttttcctcctggatgtctgaaaacattgtatga

SEQ ID NO: 104391 - DNA, 1018 bp, Homo sapiens
tgttatagtaaaaatatgaaagtaattgttttagaaacataaagttatggctttgtcaaagataaagacttactctgactctatcttgttttttcttaaatttagttaaaacttacttatataggtaccttaaactgaacagttttttttttttttcctgctctgaactggctttgaaacatctctgtataatcagtgacactcgaggaacaacattcaggcttagccttgtaaacatgaccccctctgcacagggtcaggttttaaagaaggcgtggtgtgtgctacatctttatacttgctggggataggccttgccttcttcagcacagactcatatgtcttctagaactgcccagtggtcaatccgcagtccttatcagttttgtgcaaagctctattgctcctttccattccaggtggtcataggtgacaaggtggttctgaaccccgtcaatgctggtcagcccctacatgctagcagccatcaactggtagataacccaggctgcaatgaggtaaggacattgagttatgtgtgtgggtgtggttatcctgcaggagcgggtctggcaggcgccagtgcatgcgtgtgctgagagtgacttcagcagtgacttggggcagggtgcccattctgcaggtgaagaaacaggcccagggtcaaggctgccgtgtaaggttgtgcaactgtgtgcagtgggtagtagatgtgggctgatactcactctagtgctcagtttgtgaagccttgcgtcactgaggggttgttttttcattggtgaagccagagatgaacccttttactaatttttttctggccataggagcacctttttctaatttgtctccatatacagggtgcctctttttaactgttcaaaaaggaacactgcagcttatcagcagccctgcaagagtgatagcttgcttttggcaatacatctacttctcctctaaattagcaattataggatgcaaggatgttacttccttgtgacataaatatttgtctgat

SEQ ID NO: 104392 - DNA, 1995 bp, Homo sapiens
agggtgttgccaagaattaaaggagattgtgcgtgttagcacctaaacctagtgcctggcacagatttagtgcacaaacaatggctgctgttgttaacaatgatcattaacattttcgagtgtatacactggactcattttttttccctttatggctcatcccattttataagtacttattttcatcaggcctttactttctggctacagaacaagagacttggaggaaaatgaaaatatcattccagaaaggcaggaggcttggttccattagtcatggttggaatgtgcatagtgattggtgcaaatgaaccatttatttccaaactctgccagcaggccagttgattttgcaggtgctgtgattttagtggcgtcaatctttagagtttttagtctcaagtacagccttgcttcctaggctgcggtgagaagtctgggggctggatgacacagttgttgtgaggggtacgtgaaaaaataactcgaatctgtgtttcaggtcaattccgtcaactgcaatacaagctggaaaatagtccttttcatgaaatggagtgataacaaagacgacatattaaagggggtgagtttgatgctttatgggctgagcattacttggctcttcttgggggcagcagtctaattctctttttaaattcttttttccttaattctttcttgtgttgactgtcagggtgacgtggtgaggctgtttcatgctgagcaggagaagtttctcacctgtgacgaacacaggaagaagcagcacgtcttcctgagaaccacgggccggcagtcggccacatctgccaccagttcaaaagccctgtgggaggtggaggtaagggtagggtggagaaagggctcctgggtttagaggatatcagcctgtatataggctctctctctctctatcctacaaatattcatacatacatatacctatatgtgtctatacacccacatacacacacctacacacacacacagaatacatgtgtgtgtatatatataagtcacaaacaagtacttatacccaccttattccaaaaatgggttggggatggcatagtgaagtaagtgcatcatggcatatcatggtgctgcatatttgtgcagaaggaaagaataagtactttggaaacaaattcaaaaacgaaattagaaatagctttctctgagccatctaatcccttctattgttttctttcccttgctcatttatctatcacaacaatatttaaccaggtgtctacctgacacaatacataggtgatgcccacattggtgatggggcagaaatgagaagatatacacccagataactggaacacacaaggggatggtgaaggtggtaagaggcatattccacatgctctggaggtttcagtgagagagggtgaatgtctgggtgggtgaagaattaaggaagacttcctgaaggagatagcatctgatctggtacctgcaggatgatttgtatttcagaaggaagagatgaatggagtaggttacttcatgtaagagaatggtgcagaatgtggaaacgtgaagcagcgtgggataaaactcagtaacttgtttggtgaagggcacgggataggcatgggaaattaaacagaactgtttttggagaccagaggctgaagggccatatatccaggctatagggagttgggatttaatttatgggcaggggagaaatttggaaagttgtttgaggaagggaataacataatcagtgtgcaacttaaagaagctagaagattctgcccacagcatgtaatttgttgtaaggagagtctagaattgcaggacaaagaaggaaatgttctgaatgcttggtgaaagaggcaatgagagcttcaactaacatggagctctttcttcacctcaagccttcctttctgtgtaattgcagcatgaattagaattctaattcaaatttctaatttgaatagataaatttttctgtctctgcttgcgttctct

SEQ ID NO: 104393 - DNA, 1127 bp, Homo sapiens
atttactgaacattgtaatacaagtttgttgagtatgtggagtctgttgttctttaaagagtactgaattttcttttgttgtacactaaagtgacctgtggatccctttgctcctttgaaggcttattttcaagctttattcagccaggtgttgtgtagagttaattttggggctaggttaactccccttccaagatgggacccctttgatgtgtctactaacgcacagggtgttccacatgatccctcagctttggctttccagaatcaggactcctcccagccctgtgtgcgctctgggaaagttcagctttcagacaccttgtttttcttcatttggcttcatagggtcttgccttatgcatatgcagtctgatgttcagcccaaaactcaagggagcctcctgtgcagacttccagagctttttctgtgtgtagttctgtatgcattagtaccccatccccacaaattctagctgcctcagtctccctaaactttgatctgtctccttaactccatgagcttcatgcccttagcttggattcttcctccctatgctgccatccagagaggaccctcaggtagaaaatcaaagcaatagccaagctggccttgtttgtttccctattctcagagatcaccattgtgtaccaccagttgtccaacatgtgaacacagttgtttgggatattttatccagttttctagttgtctatggcaatttcatctattctctgcagtgtctaattgtttatggcaccaactaccactgctagttaactctgtcatggccagaagctgatgtgacatttatttttctgatacattggccccggctctgagtttcacatttcagagcacaggcctgcgtgtgtgttctagcacatgagtacatgcgtagattgctttgacagttctccacgaaagtcctttttattggctgtgcttttggtaggtaaatttcagaatctgctacttcattatggctaaggcaaataacctgaaaaccactgaagtttttattccaaccattgtatgttaactaggagactcgatgccttctttggagagacactgcttacttttcagtttggatgctacacgtgacactggcaatgggtttgtt

SEQ ID NO: 104394 - DNA, 1048 bp, Homo sapiens
ctgccgcccaggttcaagtgattcttctgtttcagcttcccaagtagctgggattacaggcgcctgccaccacgcccagctaatttttgtatttttagtattgacggggtttatattggtcaggctggtcttgaactcccgaactgaggtgatctgcctgccttggccctcccaaagtgctgggattacaggtttgagccactgcagccagcctgggctaattttttgtatctttagtagagacggggtttcattatcttggccaggctggtcttgaactccagacctcgtgatccacctgccttggcctccccaagtgctgggattacaggtgtgagccaccgtgcccggctggaacatttttattgcaacacaaagaggtagagcgtaaatatccctggctgcatggccagttgtcatcttttaggactgctctgtaactgtggtccttttcctgccaactgctgacattcacgatcctttcttctccgttcctgtggattgtggaataattgtagaaagtgaaggctttggcatgcatggttcttgatttggtgactttacctcctcaggtggaccctgatcaggacgcctctcgaagtaggttgcggaatgcccaagaaaagatggtatactccctggtctctgtgcctgaaggcaatgacatctcctccattttcgagctagatcccaccactctgcgtggaggtgacagccttgtcccaaggtatcattttaaaattgcttttccccaaagaatcaggcctggtgtaggtggcctgaccaggtttcttggaatccaaatcgttactgccttttcttttagatttttataaaggatttggtgaaaggtttgcactgactgcccggtatggcaactgatttttttaatggctcaccattgataagttctcagtagttgaatgagaagtgctatatttaggtaaacaagccaaaccataagcccaagtagctcaattttcctagttccctctactcccttcctccttccccaaaccttgggagagctcttggtttggggaaaaag

SEQ ID NO: 104395 - DNA, 2392 bp, Homo sapiens
tagggaaacaagcttactcttaacaacagaatcaacaatattaataataatggctgacacttattgagcgctgactgcatgctagacacaaagctaagtactctacttgtgttatataatttcatctttctcaaaaaacccagtgagagataggtattgctatcaccctttcttgtagatgaagaagctgaggctcagagagtttaagcaacatatcataagtcagtgagtcccgtagcagaacccaaaatcttaaatgtttaagacacatagggttatttgggccattctgactctccaataccatgttggttaatggaaatgtcactgtcatttatggattacacgtatggcccctcgtgaagtattagttgtgtttcatccattcagaggtagctactggtaacatttttgtttatgtagttttagacaagtctctggtcacacagagatgactgtgtcatttattatagatgggatcataagctattttaaacatttttaactgaatagtatgttttatacatatctccaagcgaatgaatatcagttgtcattgtcttaaataattgttgtaatcaggccgggcgcagtgcctcacacctgtaatccgagcactttgggaggctgaagcagacagatcacttgattgagtccaggtgtttgagaccagctggacaacatgacaaaaccccgactctacaaaaaaaatgcaaaaatttaaccgggcatggtggcacacacctgtagtcccagctactttgaaggctgaggtgggagtatcctaagcctgggaggcagaggttgcagtgagcccagattgtgccaactgtactccagcctgggtgacagagtgagaccctgtctccaaaggaaaaaaaaaaaagaaactgttatagtcaattgtaatcatctttaaataacagtagtatcaactagttaatattgtattaactggttcattattggactgttctgttatactgtattaatacaatatattaatataggtattcatatgtaatatgttaatattacattgtaacaatagaatataataaatttgtattctattaactagtccattattgagatatcagattgtttacagtttttattgttacacataatgctttgttgaacatctgtttgcctcatttgcacctgtactatcaccactgaaggaagaatacctaaaaataggattggtagatgaaattatagatatattttatgtgttctacaaggtgctagacttcttttcagagttttgcttgattacgctctcaccaaccatacataggacttacttccctaagctcttgttgagactgggttttagatctttggaatatgatacaataaaatgatattgttttaacttgtgtaacttttatactaaggaggttgaatctatacttccatgtttctttgtatttcattattaaattacccgtttgtgtccttgtcccattttcacttccaatattcatatttttcttattgatttgtaacagccctttgtgtgtagagtaataaccttttaatgcaatgggctactcttttattttcccaggctatggtgattttttttcaactttgtttatgatggttcttttttttttctatatagattatataaaatttaaactatgtaatgagagttatccgtcttttacttttaaaatttaggaatcttatattttgttatatgattcaaaaggctttccctactgcaagattagtaaatactcatttttttccagaaattttatgatctcatttattgtttcactgatccctatgaaaatttcaatcattgctgtattattatttcttgttataagcactaatatatacccgtaaatacttcctgttgctctgtctcatgctctgtttatgctgagacactcattcatggagtatgatcttatatttagaagtataatatataacagtaactgtagagtcgttatgaatgattttctattgtaaatgcatcagaatgtggcttggacctggaccatttgccccttcgtgtatactgcccagtgtatgcagtaggaaaccactttgctatttctattttgatagattatattctagactaggggctatagagtaaacctcaatatttatttccctaaaaccctccttttttccctgttaggaactcttatgttcggctcagacacctatgtactaatacctgggttcacagcacaaatattcctattgacaaggaagaagaaaagcccgtgatgctgaaagtaagtcctgggacttgcctgtctccttttggtctcgtgtttcctaatgaaagggctcctttgaggacagatcagggagtatggagcgtggagatttgttgctttggcgagagtgtggtcat

SEQ ID NO: 104396 - DNA, 1056 bp, Homo sapiens
ggctgaggtgggtggattacttgaggtcagcagttcgagaccagcctgcctaacatggtgaaaccccatctctactaaaaatacaaaaattagccaggcatgatggcggatgcctgtaatcccagctcctcaggaagctgaggcagaagaattgcttgaacccaggaggcggaggttatagtgagccaagatcataccactgcacttcagcctgggtgacaaagtgagactccatctcaaaataataataataatcaagtgatgaagacctcactctctctttctgtctctaagttggtctctagaaccacattactaaatgtcagggaatgaggttactctgagataaaattttgtgtctgatatttcataaaggtgatcatccttttgtggacaatgatatgttttgtgtctttcactctctttgatacttggcttctgttgtcagtttcaaagaaattggaaagtgtgggtctgcccctgtttaactggctcattcgtccagaaggcttccaaggcaaagcttccagcctgctgaacactgaacacatctgtctctaatagcgtctttcctcctaaggtctgtaaccaagctgctagaagatttggtttacttcgtcactggtggaactaattctggtcaagatgttctcgaagttgtcttctccaagcccaacagagaacggcagaaactgatgagagaacagaatattctcaagcaggtcggtgagatgtggcgtactggggatttggctttatgagaaatcataaagcatgagtggtagctcatgcctgtagtcccagcactttgggaagccgaggtgggaggatccccttgagcccaggaaatggaggttgcagtgagctgatcgcatcactgccctccagcctgggtgacagagagagagcctgtctcaaaagagaaagaaaaagagaaatcaatgggatcattgagggatattggtgattcccacctcaaaggcttgatgaattgatttttcaatagactattttctagagcagtttttaggttctcagcaagattgtgcaaaaagt

SEQ ID NO: 104397 - DNA, 1017 bp, Homo sapiens
atacaggctattttgcttaattacatttgtgtggcaggcttagaaaagtaaaggatgtgaaggagtttgcagctgttgccctaggatagaaagttgtaggaagaccctcccttatactgtaatgtctcttaggggcagtagttctcatcaggaaacattgctgctttctttagtctacgcttaaccatattgtcatttatccttcctactgacgtctcttttctctccttataaaggagtatatagccaagcagtttggcttcatgcagaagcagattggctatgatgtgttggctgaagacactatcactgccctgctccacaataatcggaaactcctggaaaaacacattaccgcggcagagattgacacatttgtcagcctggtgcgaaagaacagggagcccaggtgaggcgggagtggggtccatgcaggatggtgtctctgcctgtaagatgcagggacttagctggtgctttttactacgtttccttgtgctgctagtgacaagttttgattagttaggtctggagaggctttttgatgagtagtggcaagaacttggtgttaaaatgagacctgggggtgcattcctagctccagtgtgtcccacctggatgagcttgggttttttcctgaactttaatttccttatctgctaaatgggtagttatgaaaattaaatgagaataaacgcaggtgacgtgcaggcacttagtggatgcagaggaaatgacaaattgttggccactcattcactttttaaaaaatgttcttaattttaatttttaatttttgtgggtacgtagtaggtgtatatatttatggggtacatgagatgttttgatgtaggcatgcaatgtgtaataatcacattgtagagaatggggtatccatcccctcaaacatttattttttgttacaaagaattcagttctattcttttagttattttaaaatgtacaattaaattattgactgtaattaccccatttacctacaaacagtaggtctta

SEQ ID NO: 104398 - DNA, 1035 bp, Homo sapiens
ctgttcagaacatgtttattggtctgcagaatttttgttaccagtagtaattcatttttggcaaaggagcagttttcctgagaagtacagtgccggtaatatggacagccttaaaaaacatactaaattacgtcctgagctagtgatacttcattgattcacatgtataactcagttttgggcttgggctaatgcagggtttttcagtttaggtattttcacatttcgggcttggtaattctttgttgtggggctgtgctaggcactgtaaaatgttcagcagcatccctggcccctacccacttagatgccagtagcacctctccatttcggttgtgacaaccaaaaacctgtccagagacattgcctggtgtccactgggggcagcagcaccatagtcgagaaccactgggttacagtatatgaagatgttaatgtcaggctctctgcggctctgcccttgggggaaatacaaaacaaaaagtgtctttccatgtgtctttatgctgaaagtaaagctagatctcaaagtatttttaaaaatagtaacttttccctcctcctcttgttttctaggttggttctttctcgttttgaatttgaaggtgtctcttccactggagagaatgctctggaggcaggagaagacgaggaagaggtgtggctgttttggagggacagcaacaaagagattcgcagcaagagtgtgagggaattggctcaggatgctaaagaagggcagaaggaggaccgagacgttctcagctactacaggtgcgtgggacacgtgtggggctcagattggggtgccccaaaacagtggcacttaggaatttgttgctcgtttgttgattacttcaaggaatcacaaggagtcatcttgtaagattgtctagaaaaaagccagatgtgtgttttaggagtttggagtgtaagatttcagttagttgacatctggatgtggctggttcccaaaaaggatgagtgcttgcctcagtccctggtgatagtttatccttcagcagcatggcccat

SEQ ID NO: 104399 - DNA, 1837 bp, Homo sapiens
tgggcttggaggatattcatattttaagctttactaagcaattctaaattggatgtgtcagtgtacacacccaccagttgtagacgacaagctttgtttcttcatgtctttgttaaccttgaatatcatgatgctttttaatttttggtaattttataagtgtgaaatagactcatgtctacacttgcatttccccgacatctaatgaggctgagaatgtcttcaaatcatgattattagaaatacatagagtttttaattcagaaggcagtattttgaaagcctgtggctttctcgttatttcacatttcaagtatgtttactctttcagtgtttgatgaatcttctcccaagtgaatgagaaagagtgccttaattggtcaggttccagttaacaacattcacttgcaattggatgaagatgaaaagtgaggagtctcctacttttgtaaatgaaatgtttttttacacgtgtaggaattagagtgacttacatgatataagatctttaaaatgttataaaatttctaattaggctgaatatgtgtgatatcttgaacatttcctacatggtctttactgtataaaacacagctgaagggaaagaaatagacaaccatcttaggccttagcattccccccgtttattttaaaaagtaaacattaaggacctagtggaattaggtcgtcacataattgctccaacacagctggatagacatgtgttcctgttggctgtcaacccacactctactgcacagcttgaatagttcttttatctgcttggtaccaaagccaaaatcctggtatacaagagcaatttaggggtgttgatgtatgagtttagttggccaaatgtcactcccatgacagtcagggctgcccagacgacccttcattcatcctgaatgatttctggagcgtgagctgtgtgcccttgttccttcctctagatatcagctgaacctctttgcgaggatgtgtctggaccgccaatacctggccatcaacgaaatctcaggccagctggatgtcgatctcattctccgctgcatgtctgacgagaacctgccctatgacctcagggcgtccttctgccgcctcatgcttcacatgcatgtggaccgagatccccaggaacaagtcacccccgtgaaatatgcccgcctctggtcggagattccctcggagatcgccattgacgagtgagcctggcacctgaaaacctcactttacattattctgtgcggcagtagatagccccatatggtctcattaaatcttagaagaaagatgaagtgttggttttttcttcaagcttaaaataaaattaagtggatggcaaatatttttttcctcaagaatgtgaaagatggcatgattatgtttttggtttttgtttgtttgtttgtttgtttgagatggagtctcactctgttgcccaggctgaactgcagtggcgcaatctcggctcactacaagctctgcctcccgggttcgtgccattctccttcctcagcctcccaagtagctgggactacagacgcccaccaccacgcccggctaattttttgtatttttagtagggacggggtttcaccgtgttagctaggacggtctcgatctcctgaccttgtgagccgtccacctcggcctcccaaagtgctgggattacaggcgtgagccaccgcgcctggccccgattgtattttttatatctcatttatctcctctttcattctgcaaatatttaagtgtgtactatgtgccaagctcaagaaatatatcagtgaacaaactagaaagcaatctctatgctagttggtggaagacagac

SEQ ID NO: 104400 - DNA, 2140 bp, Homo sapiens
gctatgatagtagtggagcttccaaagatgaaattaaggagagatttgctcagaccatggagtttgtggaggagtatttaagagatgtggtttgtcagaggttccctttctctgataaagagaagaataagcttacgtttgaggtaactcatgatgaaatcttctatgtgtattatctgcctctcagtggtcatttttctatggggcaaatagaaaatatgtgagtaggttgtgattttggtcatgatgctctggttttgtaatggaaaggaattcagcttggttttgttccagaataaaataaaacggataccagtcacatggcttaatagtagttatgggcttaaaagaaatatacaaggtgacttgaaccacataaaatgatagaacatcactttgtgttaaaactgacaagagagaaacactgtgcttgcaatctgccatagcttaatcatttgcagaacataaatccttgttacttctgagttaacaacgtttctgagactgcttttgccttttaagagctgtattgctgaggatcgcagagtgttattatctgtgtccttattgggaataactctgcttgcctggtgttaatattatccttgggaagctgtgtagagcaaatgatgaggtctttttttttttttgattagtcatcagagcagatcagtagctttccatttcttatttttcctccttatgaaacaaaatgaaaatttatcagaaagtgcaaggaaaatacatgccttctcttaccataaggaaggtccaagtctgtcatttctaaactggtcaacatcaaatggaattgaaggggatgcagtttatgtaataccgtcttcttcttttattttaatacaataggttgtaaatttagctaggaatctcatatactttggtttctacaacttctctgaccttctacgattaactaagatccttctggccatattggactgtgtacatgtgacaacaatcttccccattagcaagatggcgaaaggagaagagaataaaggtaacaatgatgtggagaagctgaagagtgagtatctgagggtgcccatacatctgagagatgccctccagcctttcctgttatgctcatgtcataccctatatgtgatgccacatcctttctttgttcattccttcccaacttttcatcgtgaacattttcaaatactgtgtaaagaaaagcggaaagaacagtacgatggagtcccacgtacccatgactttgagtcaacagttattcacgttttgctgaattttattttgtatttatgtgtatttatgtgtattttattttgtatttatgtgtttatgtatgagtcgtgtgtatattttgttgaacaatttgaaagttacttaacactttgaatgtttatataacaaatacatgtcctatcattgttcttgacattcgtgagacccttgataataatatttgtttaggatgtaagaaaatccaggcttctatcttggtggctatttccactttgtgagaaggacaatctgcctttgcatgtttatttcttcctcgttttagggtcagagtaggcagatattggtatcatgtatcaattattgttaactggtcttctgcagctagaacagaaagaaatacattgacttatctctatttgctaggtcttgtgctgagtcatgttgcattataccatttagttcttttgttgagctcctttatttccattttgtagatgaggagactgaggcttagaggtagtatggtgcacctaaggtcaagcagcatcaggatttgtaccttgttaactttatgtacctagttctgtgctcataacaagcacatagttgatgatcaataaaatttgggcagggcatagtgattcatacctgtaatactaacattttgggaggctgtagcaggaggattgcttgaggccaggagttcgagaccaggctgggcaatatagagagaacctatctctaccaaaaaaaaaaaaaaaattagctgggtgtggtgatgcatgcctatagtcctagctacttgagacgttgaggcaggaagattgtttgagcccagaagtttgaggccacagggaaccatcattgtgtcactgcactccagcctaggtgatagaggaagatcctg

SEQ ID NO: 104401 - DNA, 1061 bp, Homo sapiens
gagtgaagttagtaagatcatgtcctgctgctgctgctgggctacaattttatccctgagctccttacaggctatgcaacaaagaaagcaaaatctggtctttcattgttcctaatattaatgtatgaacccctttaaaaaaaaaccgcactggtcaattttgacttaagacattattataattatggaactcttatacctccaagtataaaatttggtataaacaccatatgcacatagttcttataattagcacacttggtttgattattgctttataacatattactccaaaaaacttaaggattcaaaccaccaccattttattaatacttcttacagtcctgtggcttgattaagctggatggttcttctgctggtggtcactgttgggtctgtcatactgtagtgaggtggtaactggggctggcacctccaagttggattattcacatttctggcactatagcagagatgcctgcaaggccagaacttctttctctctctgtccatgtggatagcttgggcttctttacagcacggtggctgactcaaaaagcaaatgttctaagaggacaagccaacagtatgcaagtgctaattgggcctctgcttgcattgcatctcctaatatcttattgttcaagcaaatcccatggccaagctcattgtcagtgtgggaggggactacataagggtttgaacactctgttggggcccaccagtgttaatagtctacctcaatgcttaatataaaacctgtgaaatttgaattagcaacattatgtactatgatggaagatgtttttctgaaacttaaacatggtattgtgagtttagcataatacaggttccatgtgctgtgtgatcactcagctctcccgccattttcctcatagtgaacagcattgaaaccttcacacctttttggaatacatagcatgaatacagtatttataagtcttctctgtgcttttcttattagccagcaaccaggaagtttccaccatttgtcattcatttgactctaaacccaatataggtgcagacccaataattga

SEQ ID NO: 104402 - DNA, 1104 bp, Homo sapiens
atttctgaagctttacaattgaaggaaggactaattgagaatactgtcagggagtcatctaagtgcctggtacacagtgtccccactgagagctgtagttttttagaaacctttgcgtacgctggttcaaagttgggaggctgggagctttgtgtgttttaccccagagcaaactcttcccagggtctcggcaatgatgccaggtcattccattttaagcgatatctctgaaactgtcccacttgttgttgaagccataatcccctgcttattctggaagacgtgaccttagtcttatggatttggcttgatggagtcaacagaaatgccacatactgaaggaattttgttttacgtttttaatgcattataatcccctttgcctccctgcccgccaccaccctctgcaatctttttccagctatagttcctagttttctgagactgatttctttcattctactagattttgattcggcttagcaaactctgtgttcaagagagtgcctcagtgagaaagagcaggaagcagcaacagcgtctgctccggaacatgggcgcgcacgccgtggtgctggagctgctgcagattccctatgagaaggtgagcggtgcctcatgcacagcagctgctctcaggatggggcggatccctgggtttccccaaactcttcacatctggatattgttagtgaagaaatgcatccagtgtgactattgtgactacaaagcaatttcaggtattgatatgaaacagagcatctgaaaaataaagtaaaatcacccgtgaataatcctcatccccagttttaagattctgtaaagaaagagagtccatttattctccatactcccaagacatattggatagagacaacttggtctgtgtcagagcttagagctatatctacccatgagttggtgtgtttcaatttcatttgcaatgtgactcaaccaatttaagtatcaccagctattaagtgcatgtaggaacatgggatgtgcccacttttgaagtcctcagtaagacgctgacatctgcttaagtatttggatttatcaggtgatgctttgatctaggtcttcttttctgttgctggaagt

SEQ ID NO: 104403 - DNA, 1020 bp, Homo sapiens
gtcagtgaggaagtcagccccagttctgttgtcagtccctgtttttgtttacttttaaaatttttattatttttatcttttgttagagatgggtgtctcactatgttggccaggctgttctcaaactcctgccctcaagtgatccacccaaaggggtgggattacaggtatgagccactgtgcccagcccgtccctgtctttagaagtagggggttcagaagtttcagtccttgctggataatggactcatggatgccttctattagccttactctgcagtgctccctcccacccaaataagatcttcactttcatccaatgagcatagacaagttactggcttcttttcagcgtcagcagtgcagcccctcaatatttacccacaacaggtccccagcaaacaccttctgactcccacgttagcaggaggtgttgggtataggagaagctggtctcctggcccagcaatcagtgctttcatctgtctcctcccacacaggccgaagataccaagatgcaagagataatgaggttggctcatgaatttttgcagaatttctgcgcaggcaaccagcagaatcaagctttgctacataaacacataaacctgtttctcaacccaggggtaagacttgaggccaatctgcaaatctatagagggaggagggcagggaagagggaggaggaacagcttgttctttggctgttgtggcttctggggcttgttataatgcaacattcattccaaaggggaacattttcatcacttatcacgaggacataaatactcatcttttggggatgagatggcaggagttggggaggggaaaaggaggaaagtgagatggataaagtaagatacgtgtctatattttcctagtcaagtccttcattgtatcaaacttcagcaatatagaagtgctaaatgtctctcctgccacctgctactgaagtcatgcataaagttttctgtggctatgtatacatatataatatttccatatcaaacatatctgtaa

SEQ ID NO: 104404 - DNA, 1006 bp, Homo sapiens
caacaagagtgaaattccatctcaaaaaaaataaataagatggaaacatttaaaaagaaatatcatagcctaattggtaggtatggaaataccagtgcaagcttgcaatctctgtttccacttgatgcattaatgctggtatgcaggctttctcttcccctaatagctttctagggccagtgtggtatttctgtatctgtggactaaaattatgatgctgaagatttctagttgttcagttatataaatgaatgaagtcaaaataggtaagactgatttgggaagataaatgctaacagaacctctctcttcctctgtgaatagatttttttcatgctgccccacccctgcaagcttgtaatctaaacccaccctgttctttatgtagctggtcaattcgggagaggatgtcctcgtgttctacaacgacagagcctctttccagactctgatccagatgatgcggtcagaacgggatcggatggatgagaacagccctctcatgtaccacatccacttggtcgagctcctggctgtgtgcacggagggtaagaatgtctacacagagatcaagtgcaactccctgctcccgctggatgacatcgttcgcgtggtgacccacgaggactgcatccctgaggtgagcgagcccagcctggctgtgcccttctcgttgctatgtggtgtgtgctgtcgtggctcactgggagacatggtggtggctggcctgggggagccctcatggctctgaaagctgcagctcattttgtagtgggatttcagttccctaaaacattttctcgagcattgattttgcatgaaaggaacacggaagaagttagtcgttctttctgtatctttaagaacagtgaggaaaaaagcttcagctctgtggactaatttagcctgttgagcaaaggggatatgacctgaatgaacttttcagaaatgtgacgaagagtaggttgagatctagtccatatgaatgtaagacttagtaagttaa

SEQ ID NO: 104405 - DNA, 1014 bp, Homo sapiens
agttgagccccttgccgtgtgtttttttttttttttttttgacatttgatattcctttaagaaatatctgatccggttttttgcttaccttttctctgggggtatctatcatataagcacagatctaggggcattcttcattgttacacgccttgcagatatcttgtcccaacttgggcccatttacctcttgaatggtgcctttttatgaacagaaattcttaatttcaaatagtcaaacttgtccctgttctgtggtcagaggttttgcctcattctttaccttgagatcatgaaaatattctcttccaaaagctttatggttttggatttcataattgtgaatttcaaatatcagaaaatcatagaagtaagacttggcagtggggaatgggatgaccattttcatcggtccttgctgtgaagttgaggcagctaatgagttccatacacaccaagatggtttttcagaaaagcttctttctatcttgcaggttaaaattgcatacattaacttcctgaatcactgctatgtggatacagaggtggaaatgaaggagatttataccagcaatcacatgtggaaattgtttgagaatttccttgtagacatctgcagggtaaggcttttggaactgaggaggcagagttggagagtgagaggtgtgtgtgtgtgtgtgtgtgtgtgtgtgtgtgtgtgtagcatctttgtgcacacatgaagaaaacagctgcatcatttctactctaatccgtggcatgaggaggcacttgtgactttcttctcatgtatcctttcttccttttttttttttttgagctggagtcttgctctgttacctaggctggagtgcagtggcacaatctcagttcactgcaacctctacctcctgggctcaagcaattatcctgcctcagcctcctgagtagctgggattacaggcacctgccaccatgcctggctaatttttgtatttttagtagaaacagggtttcatcatgttggccaggctg

SEQ ID NO: 104406 - DNA, 1027 bp, Homo sapiens
gatgggttcgatcataccctaaacctcagcattaagcaatacacttctgcagcaaacctgcacgggtaccccctgattctaagataaaagttggaaaaaagaaaaaaaaaagttgtgcttgttgaggccaaaggaaacgtaggaggaagcccttgccacagaggttagtttttgtttaatattttagcaagtggttgacttgactagtagctcagtgctcattagagaggggaagtctttccatttgtcttggtggtgataagacaaaagacaaggagagttgatgtctgtggaacggtaagacatgaaaacagcactacccagagtcccctctgtgcctcttgggggtcgcttcctcatgactaataccacacccagaacccactgtgttagttgtttagcttatgaatatccaaggcatagagtttctagctgtgacgggtgtaccctgtgcatcctgcttttcaattgttaattatttgtatttttccaaatttcccactttctatattagactgttagaaagttgttggctggcttatagttttttttccgctaaattgtgtgtgtgtgtatgtttttaaatgggatttaaataattgcttctcagattcctctttcaggatgttggagttgtttttacaattagatagttgagtactttctttgcttctagtgttttgaagcattgaagacaggaaatcattgttttttggacattttcccatatggaaaagagtgattattagtcttaattatcttccttttcaaaatcttttattttggaataatttcaggtttatgggactgtagcaagggtaatacagagagttcccacaaatccctcacccattgtcacccgttgtcagcatcttacattagcagggcacctttgtcaaggctaggaaactgacactggtacagtgctattacctcaactccaggctcgattcgaatttcaccacttttcccactgctgtcccttgtcatgccctttttctgttccaggatttggtccaggtaccac

SEQ ID NO: 104407 - DNA, 1443 bp, Homo sapiens
gacagtcttgacaagtactagtcaggagtcctgtagagtgtctcccattatgggtttgactgatgtttgtctcatgcttagactggagttctccttttttaagacgaagaaagaagcacctatccagaaagaggagtttatgccattgtgaatgctacctttaggattatgtttgggataacccagcatttttgtagattgttgaacaaacctgaaaaataactagcaaatgattcattggccaaacgagttccctgtcttgattattcttaaaatacacacacacctcagtgaccctaagaagccattcattgaggaaacccattgaactttaactctgacatgccctggccttatgacctgagagcattttaacattcctaagaactgcttccccccagaattcacactgggaaaccctgacctaaaagatggtaaagttgacttgagcttctcagtctttaagctcaataccaggcaagctggcccattctgggtgtgaaaaacctgctggatggggactagggcattacgtccatctgtagggtgtcccccataaaagttgtaggctcacgactcatctttctcctgtgcagccaagagccgggccattgccattcccgtggacctggacagccaagtcaacaacctctttctcaagtcccacagcattgtgcagaaaacagccatgaactggcggctctcagcccgcaatgccgcacgcagggactctgttctggcagcttccagagactaccggaatatcattgagagattgcaggtaatgcctggtgttgagagaagtgatgcttagcctggcctcacgtgattgccacacacagcagtgcatccttgagccacagagcatctaagctgggccgtgggaagatgtcggtgtgctgaacgaatagtcaaatgttatatatgtagggccaggagtgggaagttacttaggaatagaaaagttcctgaaaagtgatggtctttaaaggttactcctagatttgcagatttcttggtgaaaaattgggactctgctcttattagaaggaagtattgaagtattacagaggatgtttagagtaagagcataaatgttccattttccccatcactctggggttatttagcctcttgaatcagcaggtgaacaagggtggtgatacctgagagaagaattttacatcagaatgagccagatggaaacaaaagtattccttccagctagattatttaccttttttcgtagaatctaccaagacatctgctctccttttgttaaaggggagagtagtgagtattagatgttaagcacttaaacatgcatcttaacattaacgtattttttatacaagcacctcagttgatgctctcacaggtagtacataggtcacagtttgagaatcgcagatcctttgaatgagcccacaagcagtgtttaag

SEQ ID NO: 104408 - DNA, 1050 bp, Homo sapiens
tgataagaacaactttaatcctgtgtaaataccgtagacaaagatttgccagagtcaggatcaataactattgaagagaatattgactgggtgcttccaaaagggatgctatggggggaactgataagagcctcagaattttgcagaaatgacccttttttgactgtgctgtgaaagtcagtatgaactaagggatgttgcaaagtaccgtcttacagtcttgttgggaaaattgccccactcaaaattatttgattgattcatgtatctttatgcatcttaaaccttactgagtgattacattcatcacccaaattgtgttaaatctaagattaaattatcttcatgtcattagtttctggatgaaagattagttaattctttgtcaatcccaactgggtcccaatttaagcagcttttcccatgcaaatgtccttgggtaaccaggccttcctgtattatccaacgtgctgtgtttggcccctgtcttagccaacatgcctgtaggcaggttctgagtcaccaaaccatggagcaggctttagcatcttttgaagataatttctcatctgttttctatcatttgccttcaaatggtgtttgttgtgttggttttgctgctctttcaacttctctctgttttcctttcctacagctatgtgttttgcatttgaagaccatcatgctatcagggtacatgtatttagcatgttgatacagcatgttcattcattggtgtcctcatgtttgtatgactttattatgtgaataattcatgctcattgaaaataaacaacactgacaagtatttctatatagaagaaaatcagaatcacctgtaatcccaccacccagagaaaaccagtagtaatgttttaatatttgatgtttatcctttagctagatattgatgatgtttataaaaataggattattattgtttgacctttgttatgcccatgtcatagacatctttccatgttgttaaattgattttttgcgtcatattttaagctacatgcagtggtaccttgagtagcataagggcca

SEQ ID NO: 104409 - DNA, 1227 bp, Homo sapiens
ctctgtctcggttctcctctccatataatctctccattgtatgtggctgactcctgcccagtgagcctgtttgctgtgatttaccagcaggtgtcactattgagacacagttgctaactggctgttctcagtgcagggaatgccctgaagtatctttaacctgagagctcttaataaatatttgttcattaacggactagttaaaataaattgcttgtgaagtctttttaatttaaaattagcttcaaggaagtaatccgtggttttccccccattcaggttaataaagcatacaaaacagctgctagaagaaaatgaagagaagctctgcattaaggtcctacagaccctgagggaaatgatgaccaaagatagaggctatggagaaaaggtactgcattttattttcatggtcaaaccaggttttactatgaaactgaagggagggacctttcaaaacccaccttagctcaggcattactgactgaggggctagctttttttaaaagaaagaaagaaagaaagaaaaagctgtttatcctgccgttaaagggagctaaatcatatgactgtcttttttaaaagtcaaatatacttagtcgtctcttataggctgattgccacataatctaatgtcagagaagtggtaataacaagattttccatctatttaaattcccagtgaggagcaaatgcctcttttgtatcaaagtatgcgtttctgatttttaggtttcagccaagcatacctgtgggtttacttgcctcgttcagatgagctgttgcgcaatcctttcagtgcatcaagaaacgccctccacttctaactgcaattaaggcaggcatacacgtcaccacttctgagggagattgggaaatggacagtcccgtgacctgattgttcttagtatatgcagtgaacaaggatataccagatccattccttacacctctgatgttgggtagagcaggacagaaacaatgtcattccctttcctttcagcccccagcaacaaatgatgggcgtgaattgaaatctcactcattttcatttgaaggtaataatgttcagtaacggtcagctagctacatttagcaacaatttctgagtaggtgaatatgctgatatcactgacttatcaaaatacccagtaagtcatttttcagctctaggaagaagccttgataattaaatcagcctgccttgtcaaaatcgatggtggcaac

SEQ ID NO: 104410 - DNA, 2075 bp, Homo sapiens
aatccttaaagatgacgagacgtaggtacctttacccatctttactttttcattcaactttagtacttagtcaaggtcacagatgaaaaagaaagttgacatcattctttattatcctgttcaaaaactttggcgtgcctgtttgggtctccctgccttggggaagaaaggccatgaagaactgtcacccatattaccaaatagactaaaacatgatagaatcactgtaagactgacctacactttttaaaagtcatggatattcactagtttcctagattataagttacaatgataacattgatcgacctcttgtcatgtgctagccactatactaaacacatctgccttatctcagttcagcctcagagatagataccactattgtcattaactattttatacgcaaggaagagaaaacataggctctgagagctacagaatttgcccggggttacatagttaattacaaggcaacctggctttcaaacccagacagtccgatcctagagtcctagctcttcaccactgcattatcagtgaacagatggacaccatttgagtgttttgaggtccacctacaggttgaacctgtaagtttcctttatgttacacgattatgtaaacaatagtgggcattagccctgagagcactaaatgtatcaaaacttaaacatctagtcttcagctcattgctgatttttcacacagttgagaacactctccaatagacgccaagtgcatttacaaagtgtgattgtcccaaggtcatccaaaacctgtagttttggtcagttcccacacagaggaatcagactagtgagtagcaagtggttggttcacttgtctgggtccagtgcccccaagaagtgcctgttcaagaactatcatggccggatatggtggctcatgcctgtaatcccagcactttgggaggccgaggcgggtggatcacctgaggtcaggagttcgagaccagcctggccaacatggagaaaccccgtctctactaaaaatacaaaaattagcctgacgtggtgccacactcctataatcccagctatttgggaggctgaggcaggagaattacttgaacccaggaggtggaggttgtagtgagccaagattgcaccactgcactccagcctgggtgacagagcaagactccatctcaaaacaacaacgacaacaaattatcacatatgatgaaaggtaggggctgactgaagaagatggccagagattttaatcatgaccacttaggaataaaaaaaatctttaattcttatgtctctaaaatgcaaaggaccaccaatgcatatacttctcagatcgttaaatataaaataaatattaaaattatcaccaaaataatgatgaaatacatttttgcatgatgcttatagtgtcttttggtcctgtgtattcaaagttaataaactttaaaattatatcaggactttataaacactctgtgtgcaatgcctactaatctctgcttttaatctacagtttaaaccatgtctgtgttgaaaagaaaataacctcccacagctaaatagctctaaaatttaatctgaatcactctctaactcagaaaatcttcaagcccctagaccctgcttgagaaggaaacataattattttatgtattattaataactggttttgtttactgtgggtttttattattaaactgctgttgacttaagttattactcaaagagctttggaaagaaattcagaggccaggaattaatgtaaaaggatatcttagaatgtatttaaaatccatttcccttctgaatagtagtagctgttttagtactagaaagtatatgacctcaggtaatgcctgggttttcatttcatacaaattgtcagtctcctattaattaccaaagcgtctttgctccagctgagtaaagtattaacatttccagctactagtgtttctgacagcaacttaaatttgcaaaacatactaaatgttaacaaagcctaataaaaaatcagttgaggatcatccaactatccttaaacaagcgtaattgtgatacttctcttgtgctttt

SEQ ID NO: 104411 - DNA, 1012 bp, Homo sapiens
aaaaacattggggaatttgcccttgctcccagctcggttcatgttttcatgtccacaagcaagcacacggctgtctgcacatgtggttaagtgacctgcgaggtctgatgcctgatatgtgaataaagcgtggcagcatcgtgtccgttttggtcctgagcagatgtcactgtgagctctggccgtgtcctaagcgcccaagcctcttaggatggttacccatctagcaaggctttaaggagaaacgtcagcaataagagtaaagtctataaacttggctggcttgtatttcctttcctaacatttccttctctctctctccccttttttcttttccagctaatttccattgatgaattggataatgctgaggtcctaattttgttgttttttgtttttcatgtctcatggtggtgtttccgtgacaccttcccagttagccctgtgatccttcctctagtctcacagcgtcgagtatctggctttgtgtggtgtgccctctgggagtgagtggagtctgtcgtgtctgtgttagcatttcccatgagtttgtttgccattagtccttggagatctcatctgagtctagatgaagactttctaaactgcagtaagattttaattgttcactgtctaaaatctcagctgaatttgtggttgacgctggccattaacctatctctgaaagtcagttttgaaattggcctaaagaacttctctatctgtgagtaaagcatctgatacaaaacgatacaacagcattggtataatttgaaagtagtaaaaaaggaaaactcattaccctcttggtctacgtattgaaaagtattgagtgtgagagttcatataaaactttttttaagcgcagtgtgaattcctacgtgctagttgagactttccatccgcaggctcaccggcaaggttagaaatgtcctgtatccatggcttctcttctaggaaaactatgtatagatccagaaattgaatatcatccagtggcttctgtacttat

SEQ ID NO: 104412 - DNA, 1539 bp, Homo sapiens
gttctggcagccactcagattctttgaaaattccctgaagaagcaactgtggatccccttctgcgttgttcccctggcaactgccagcgctgggacaccgatgccctgtccccagcccctcaggctggtggatctggccctctcagcggagatgcctccttggcctttataattgatgccgttctggaagctaccacagctcctgtggtttctcccccaccaagtcgtttgccggtgtgtactcctggaaacctgcagcccacagctggagttctgcagaagcttaatgagaattcgtgctggcccgggattaaggcagggcctcacatctgaactgcgtacccatgttccaaagtctaaatgtggtggggaagagccccaaggctgtgtagggcctgcccagtggcccactgaggaagggacgccatgctttgatcataaaggccacttgatgtgcaattaatgacttgataaaaagtacaatgcctactgaggccctgtcagtgctctgagaaaacagggtgaaatgaggacacaggtgtagatttcctgcaagaaaagcgcatggtatggggtcttccccgctgcattctagaataaaattttgtttgaaaccaggaagaggaggggttgtttgttttttggcaagcaaagaggcagggtctccatccttaccccctgatttttcttaatcccctggggctggggcagggggacagatggggtggaggagagagagaaactcctcatgttgttgtaccttccgctcagagctgggtgaattgttacacatgtgtacacctgtgtagccgccacctaaatcaagacacagaatgtttccatcatcccagaaagttccctcctctagccattcttggcttgaaagagttaacagctggtgctaaagacattcatttatatgactaatatttgagtgcctgttacgtccagggggatttggatacagtggtgccccaaatgggcacagtgtctgccattctggagattacagttttgtggggggcaaagggacaataatacagattcatgcaagatgacagctctcagctgtgagacacattagaaaggagaagctcatggaatccggggacttctacctaagcagggaggccaggtagcggcttaggagatcaggtgatgacaggtgagtggccccaacaggtaatcatgtgaattgctttcctatgctttaaagtgctgcactaatcaaacggatagttccagcgaagtactcccgaggtggtgagcagaacagtagtccacctagttttcatagatgtgtctgtagaagggattggtgtgtttagaaagcaggtactgtggttcagtggacgtgtctgtttctacgtatttgagatgtgattcccactgaatcactgcctccttggaactgtggaatctctggagccattggtgccagctagcaactttgccctcctgcattgcaacaaaaaagctaaattcacattccagctactcagggcggctgcagcctgcatatgttaactcctcgacttc

SEQ ID NO: 104413 - DNA, 1005 bp, Homo sapiens
aaaaacagacagacacacaaaaaaagaatatttgctttgtcctccttgagtaggtcaggaagtggatgcccagagaggttcagtgactggctcagggccacacagagagccagagctaaaccctggatgagccatagtcacaggatgctcatgcagtgctctggggttttccagtctattccacgaagggatcacattgaaaagtgtttttctggttagacacgattcttgaagatgcaaagcatcctctgttttctcaaacggcttcgtaaaattttcaagggaaaagacagttattaatttaaatttaatttttgttttaagaattaattaaactaattttagaacaagcatgacagcagtttaacagaggaaatagtgtgtcagtacaatcataaaacataatccctgccgggtgattaagaaatagatatatactacctatttctattctgaaagaattcaagatgcttctctggacaaagagagcacaggcaagagaattcaaacagacgacatactagttccatctttattttcttttgcttttgttttgattggcaaaggggtaagagggtagctccgtgcattcctatggtgaatccatgcctataattcttttgttctgatcatattggatcagtataaaggatgctgtagtgggagggtttcccatgcaaatagtagaatataatacttctgtctatatctctgtctgctctaaaatgcatgggaaattgctttaattctgctttttctcatatgttctttttgcactaagggaagatagcaaaaatgtttacacagttttaattctttagcatacagaatgtaagggtagagttaaaaatgcattcttggattgtgatctttctatcattttgaaaatacctttacctgtgctctgcttttactttccttccccactcatgtccttcctaccaccagcactgtccctccccaccccgagcaggaggctgcatgcttcagagggaagttttctcc

SEQ ID NO: 104414 - DNA, 1042 bp, Homo sapiens
ggggtgggaaactcatctccaaagtaaccctgagtgcaggaaaccttgtttctcccagagacactggagcagggagactgcatcccctaagcccaagctggagcctaggtcttcttctctgctgtaggacaggatgtggagaatggagagacatgggagaaagcctaaacccacaggagacatgtggcacgtggaactttcccaagccttgggcccctgctttcatcactacccctgctcccctgagagcctccgtggacacgcatactattgctttccttgtctcggtggactgagacaaggatgtgctgtggtttttcctgtcacttgctttgttttaaagcatcattcctccttggttagtggtagactttttttgtttctttcttatcttaaatgtgttcccccatcgcaggtcgattgtctcctccagcacaaccacattcagtttgatttgaaggtatctggtcaccttgattgctgaagcccacttcggcaggtgatccagcagggttgcctcatctctgatccttcctcctgtgttttgtccttgagtgttggtctctggacttctctgtggcccacgagatgcaagtgccatgactaacgtacttcgttttactcccaattagcttcctccagctccggattctgagaacgccactgaggtgtgttgcccgcctatatttgtagcgccagcgccagcaaatatggatgcctctcagttgtcctggttgggtgtctgaattgttgtaacaaaaagtctctcccggtggtagatgtaggagggaggtctctaggctggctgggaacagatcattgctgacgtggatgtggctctcagtgtagaaagttctgaggagctggatccaaactgagcatcctccaggtgccaggacatggttctttgaaagttctcactcagaaccatcttaatcctgagacatttagctgagacatgtgaggatgttaagacctttctgctgttatacaaaattgactttgggtcctgtgcagagatgatgcacttttgaagttatta

SEQ ID NO: 104415 - DNA, 1494 bp, Homo sapiens
gaaagaagacttaaaaatgaaacatgaacaaatgattgaatagctaagttgcagtgtctatgttttctaatgatcagtgtttaatatcctaatcagagctcctcattctgttaacggttttgttacaagacttgtgtacttgtggggtggggaaagccgtggtcccatatctgtgtctgctcagaggcgtgtgtcttgatgtccttatgcatgtgctgtgcaatgatgcatgtatgaatcataaggacctgcccgattgagtcttgcattacaaccccttttgggttaatgtcacagcatataatatagaacttctttttcatgatctttgcaataaattatgttggccaaaaagtcatatgtctgcccattttgaacagtgcactagggttgggggtatgggacagtcgttaagcagcatctaaagtaatcaagcatggatatacgggggaaaaacaaaaatccagacctattctccttttgtgtaactcttgtctatatatgaactctcaatgtattttatatgtgactgatgctgcagatggtagtgtctccttagtgttgtattaaaatggaatttctgcatgcctagcaggagcttgaaccaagtccacccctgcggcagctggaagaccataaaagggtacgtagtcttgagtcttgggtatcgggagctaatgatcaatgaccgtaacacctccatcagccacacactgtgattgagagacagcttttgttgttgatattgttaaagcattaattgactcaagagcaatcacagccatgtatataaatgaaactaaatagtggttctgcccattgtctacctgatcagagcactgtaaccagctggcctccaaataatgaccaagtaaacttttcatgtccttttttcttttctgtggtggctttctatttaggtgaaatataaaagaaaaagaaaaactgtaatggctgatgaccattataatttataattttaaaaaaatggaaaaacgttcataattacattacctagccacaagagccactgtttttgtttgttatttggggtggttttttagagacagatattactctgttgctcaggctggaatgtagtggtgcaatctcagctcactgcagcctcaacctcctgggctcaagagatcctcctgcctcagcttcccgagtagctgggaccataggcaccacacccggctagttttcttttattttttatttttgtagagacagagtcttgctatgtttcccaggcgggtctcagactcctgggctcaagcaatcctcttgccttggcctcccaaagtgctgggattacaggtgtgtgccaccatgcccagccccactaatgttttaatatttccttctacctattttttatacacatgagcacatgtgccaacagacacaggcacatttgcattgtcattgggattattctaggtatacaacttttgtaccctgttttgtcatttagtactggatctgagc

SEQ ID NO: 104416 - DNA, 1033 bp, Homo sapiens
ttaagttactttaaaatgtacaattatgttattgttgactgtagtcaccctattgtgctatgaaatagcaggtcttgttcattttttgtaactatttttttggtacccattaaccatccccacctgtcccctgtcttggagaattgatgcctgagataaatgggtagccagatgcacctgtactctgctcacacacccaggcccctgcccagtcccactacatcccaaatcccttttgttttcttgctctgatagagacatcaactttgtgatttctcagactaggaccagagaatagctccaggaagttggcatttcatccgaattcgggacatgaggctatagcccttcttctccagcttcctgtatctcctgcacttcatggcccgaggcaccttgcattcttatattttccatccttgcctgccctttagaattgtcctaggtcctaggagtagctgataaaggcacatagctgtccctcatgtcctgagctctcagaggacttggtatggaatgctgcctatgcctgtgaactttgtaattagaaacaggttcaagttttggggttttctttttgccagatactagctgtgtgattttgagcaagttaacctccctgtgcctcagtttcttctgctgtaaaatgggggtgacaatggtccctataccttaggacagtgagctgtgcacatgaagcccttaacacagtggctggaatgtgataagggatattaacttgtagataccttgtggagtgaaacattgaggtgattttgtagacaacaagaggagaaggaaggtattttaaaatccaggcgctaccctcatgccgactaaggtgtgagaggctcacagctcacatgagagggtgatcttgcctgaagcacatgatttttaagtggctggaacctgggaaaccgaaaggtcagttctctctctcctttgtgtgtggcaatgttaactccttagtgccttgttcaacactggctctcttcccacgcagttcattcgcttatttagttcagttcat

SEQ ID NO: 104417 - DNA, 1064 bp, Homo sapiens
ccggaaaggagtccagggaaaatttatacagcctttgacttttagaaccttcagattaggaggtggtcttggggccccttaggagtgcgggtgaaagtgtagagctgagaatgcagaacgcatgctgcctctggttactggcttgccagtatcccccagtattactgaacaatggaggtttttttggttagagtaataacaaagagttactatatccctgttcaggactctttgatatttatatttttaaaaaattttattacagaaaggttgaaatgtatataaaaggagtcagaaaggttttgaaacccctcattcataactctgcttcaacagcaactgtcagctcatgcccactcttgtctcacttatatccctcgctgcttccccttctctcctgtattgttttaaagaagattccagacaaaatgccattttacctatgttgggtttttttttatatatttgatatctgccactcatgccactaatttatttcctatagcattatgaggtttttgttgttgttttggtttgtcttttgtttttttaaccatttggcccatcgactatttttgtaagaaaggcttactcttggcttattgtatcatcttattctattaccctgatatcttaatattttttcggaccttgggaataaaccttgtggttgaaataacatttttatattgctatgtggaagctgacctgtaagccttttcaatttgtcttaattttatcaacttaccccaaagagatttttgtttgttattgttagttgtccttcaaaattactgttctgtcttatcattgtgtgagagggaacttcagtcaatattttagattgctaccgttttttaaaaaacatctggttttctgagaaaatattgaagttaacttcagagtttctaaatgcttccatgaataatttattctttcgccaagtgaaactgggccaattataactgagtacccctgtgtgttttgaatattcgtccctcggtgatgcattaaatgcagaagctgattttattatcctgtttgaattaagggtgaggcgctca

SEQ ID NO: 104418 - DNA, 1046 bp, Homo sapiens
ctcatcacaagatgaccaaagagtttgaactgtgtgtgctatttagaagatttaacttttatgtatctatagataccacagctgttgcttctgataaatttacctaccttttaactgaaagtttaataaagccaaatcaatttgaaatactagagataccaggctatgttagtcagaaatgaatagatgactttttgaaaggtaggtatgatatatatttaaaactaataataaaaactcaaattctatttctagttcactttttatagatgtccttaaaaaacaattttcatgattttttcttccacaacagtcatcttagaacatgaattttaataatacataaataacataacttttatatatgatccctttaaatatttttaatacctcctttatgcactcttccttctttgttagctctctgaataagagttttttttttggacgtgtatctatgtacagactcgtgtacacatacacacacacatatgttttgataaaagctttattgagatataatccacatactgtaaaattcaccctgatgtatatatttgacctgacatattcttggccttgaactgaaattcggagtctcggttaatgaagtcttggttctttgtgcaactttgtaaagggcgtttcttcctgtgagtcagtgtgcccccggccagggtgcctggcttggcaggtgcagcacaggtgagatttcagtccctgcctgctcctccagccagcacccttgtgccttggcacaacctgtgcagccaactgcggtggcccttttctttcgccttccaatccccgcttcccccaacgtacacttttgaagttcattgtcacgtgttgcaccaggttgggatttgggacaatgagtgaggcacctgggccagtggcaaggcccactgcttgtctaagttgtcacgtgggcacgagtcgtacacgttgggattgctttttattttgtcatgtgtgtgtgggtgggtcctgcagtccttctcatcaatggaatgttgcccagccactgctgtgttctgggctcc

SEQ ID NO: 104419 - DNA, 1131 bp, Homo sapiens
acggtcacttcctgttcggtgcaccatggagggtctcaggaagggaaatgggtctgtggtcagctggccttcttgagatccatgtttcctgatgacaggtggtagaaaggggagttgcagggaagcaggcaggcctacacagttccagaaatgtatacagtctgccctctgtgtttgtcggttctgcatctgtggattcaaccaactgcagatttaaaatatttagggaacgctgggcacagtggctcaaggaaacagaaactcaaggaggttatgacttactcagagttccagagctggacaaaacccatgataaaatatcctgtacctcttgtccgtcccacctccacctgtagttatctgtcactgaataaccacctaaaaatttaatagcctaaagcaatggccattttggtgcctagcatgattctgtgagcttgggctcagctgggtggttcttttgctctgtgtgatcttggctgggtctgcaaccatcagggggttgactggtcttagaacagcttacgtggtcactcatatgactgtggccattggtgctggtcctttgctgagagctcagctgggggtactgcctggagtgccttggttctctgtgtggtttgggcttcttagaacatggtgactgggttctgagaaacagtgtttcaagaagcaggaagtggaagctactagccttttcaaagcctgggtttagaattcctagaatatcacttctatcacattctattggtcaaagccagacatgaggccagccccatttcaaaggcggggagaaaaactccacctcttattgtgaggagggtacatgtataaaaagagagaattgttggggaccacctttggggactggcttcctcaccaccacccccattataatcgattgagcacctaccatgggtcagccaggcccccaagctggatgctacagctgcaggaaagggagacaccattgtctctgcagttgaggagtttggatctccctggatactaaatcccttctttgcaaaagtgttgactcttgtctttctccttttggatgttgtaagaaaattcagtcctgccttaggataagctcactgggaatcacagcactccagaaattctagattt

SEQ ID NO: 104420 - DNA, 1100 bp, Homo sapiens
tcccagacttctcctacctggctgccatcagagcaggcttcacattgaaccctccgcttatgggaacaaggagacagtaccacagcccgtggattttccagaaacgggtgacacgttgtcaggtgataggatcacgcttgtcttgaagagaacttccggctttctttctccccactctggtgccacccgcttcctgtcagcccccagaagaaatatttccttgtggcttgatgttttgtagcaagtgggaaactataaaataagcatttgcttatgaattaatttttggcacacatggggctcagcagggctcacggcactttcatatccgtccttcgagtccttgccaatttctatgttccttcctcctaagatgttcccaccagcgcctgggggaagttcccttcgcttcctcttccttacagaaggacaggggctgtccttacctggaatgaagaggaggacaggctatctttggacatacctcgttttttatttttgttttttttaagccaatacagatgttttgggatatatatgctgacatgaccatagagaacctcctagcacattatggggatagatagttaaacatttttttggactaattgcttctggtttcagaagcactgggaatttcatgtatcaaatggctgcccacgtctattcctatgccaaagtctagtctacagacacacccgaaaagggttttcttttctgcacgtaagcagctagagatggaaaatgtgagaagtgctccgtcaggaaactggcctgcaaattcagcagagagagtgatccctggttcatgaggcctttcctacaccacactctttttttttttttgaggttggcttaagaaatcagcccaagaacaagtgttagataggaaatctcacatcccttccggaagtcaccaacacagtgtgggagggacacgttggttgggctatctctgaccccagttagcaaagagatgagggcggaaagggcaatttgatttgcctctgctggaaatggaaggccagtttgtgaggaagatcagccttggtttgacagggcagtcaccctgaggaggaggaaaagattggtgtgtgagc

SEQ ID NO: 104421 - DNA, 1565 bp, Homo sapiens
aacagctccctgtaatgcaaggtcacgtggtagacaagggttagtattaggtaaccttgaatactaattcgtgattctttatcttctcaaagtaaaaacaaaagaacaaacttttgttctggtcattttatgagtcatctgagcacttgcagaaccataatggcaaatagctaatacatggcaccttttcagttgctcacattggatacccaattccctgccttcatttatgcattattgtggttttgaccacctactggttctgatgagagaggaaatcccgtagtaggagtgatagccagagcatctcttgctgaggtgaccccctgagctgattatagccctatggggtattttgttttgctgatacataatacattgaaaacactgtatatagaattttttgaatgcttaagtggggcctccatatacactgagatcattttatccccctaccttccactgcacttcactgacacttaaccccgaagacatttgcattggaaacttcgcattatctgtttgaaagtcctctcagttcaagccacacattctaagactcagcaaaagcttattgacaccaagggcattgaattcaccagcacctgtaacgtttcttgaagaatgcttgctagggaaaagttcccatggtaactgtttttaaaagagttttgtagcatcaacaggttagacaggaagtcaaaatcatggagctcagcagcatcccctataagcacgtgctcctttttaaccacccctaacaaagacactgaagcaccctgttcataagccctgatgggcactggagggtctggccaggttgggctggatttcaggggacctgatttgtgtttccctgtgcagtgctcgtttccatcaccatctttaaggaggaggccttttccatccactggactcttaccatcgtgcctgttaaggaacaaaaagacaactgcttaggcctggagggtatgtggaaaccaccagttacctttgaatatacctgtggtgctcgaacctcctttagaaaacccaagatgccattttaatgatgctttgctcttgggtatcaaatttactccttaatttacctcaggagatgttctaagaggaagccacaagattccatacctgctgttgttgttttagagctggtggatttttttttttttaatccgcggaggaggacttgaccctgtgggttcctaacttggatggccatgcagagcacccttaacttggaaatctatatcctgctgtttaaacttcaagatgattcctatctggattaaagtcctcaaccagcaggccgaggcaaactctaaagaaaaacaaggtcatgctgcatttttttttggtaagcacaggaatcaacaaagagatgttatataacttctatttatatcctccttgctcactatctgcaggcagacaagagtcgctgagaagggatttaatgagctctctgggtttgctcaccttcctgagctggtaggaaccagcttgttctcaaatgcgtcagtaaagaatctggctgtgggtgggcggccagggtaggtggactg

SEQ ID NO: 104422 - DNA, 1505 bp, Homo sapiens
tgctctgcttcatatggagctgttttgccttttgtcttttatctagcggcgtctttatcctaagatggtgttttgggaccggagaggagcacgttaccctgctgaaaaaggcatttggaaactgctggattccagtgcttccagctgcagagttctgtgatctgtgttctcttgctcttttgttgtggttgaaggttggctgacagcagccatgcccacttccctttccccctgtccagtggattcaggatggaaacagccactgccggggtcactgcctcaccctgcccctgcccctgccctggccttttccttaaagcgtatctgatcagatctgtcatcagggatgtctgggactggtgctgaggatctgcccgcagaccagctttgtgtcttctgctttcccagcctttgactccggcctcactgctggggctggttgtctgtgtcggttcaacgtgcagatgggaggagagttggttgtggctctgccacaagtcactgacctctcctaaccccagctctctcatctataatgtgacagatttatgaatgatgatatctgccttggcaatctcctaagactctggtgagacagcttatatggaaagggctctggaatcaaatgtgatttggagacgactggagggtgaggagaggtcggcctggcgggggcagatgccgttccctctggtggagaggcagcctcagaaggtggcccctctacagagttccccagctttctgggaacaaagcagactttctgttatctttttttaattattattattgtgatataattgacatataatcataggcacagattttaaatgtagactttgattcgatatgacaaatgtttctatacccattgtaccagttttctgtggctgctgtaacaaattcctacaaactgagtggcttaaaggaaccaaatgtattgttttataagttcaacatgagtcttactagactagactaaagcaagtgttggcaggccagcgctcctttctggaggctctaggggagaaggcttccttgccttttccagtttccagaggccacccacatcccttggcttgtggctccttcctccatcttcaggtttagcaatggtgaatggagtccttctcacattgcctctcgccaccctcctctcctgcctcctgcctccacagcgaaggctccttgtaattatgttgggcccacccgggtaatccaagctcatctgtctactttaaggtcggtgattagcagcttttgttccatctgcacctttaattccccttcgccacataagacagcattttcacaggttccaggaactagaacatggacatgtctgcggggaccattctgtctaccacacctgtgaaactgccaacctaatcaagacatttattttcttctagaaagttgtctcattcccatttatagtccttttctactcacaaccccccaccctccagaggcaaccaccattttggtgtttttttcaactttta

SEQ ID NO: 104423 - DNA, 1036 bp, Homo sapiens
ccttttgataccaagagtagtgtaactgagcacacctctcatttcatcttgacctcagagcccagcctgggactcctctgaatcctcattccccattctccagttcccaacctattctctttttgattttctgtgcttacttgtgtcttctagaccttattatccattttattattttattgagcacattctatcaataaagctgcttcgaacccttgagcgactgaggactggaatcagtaatgcgaaacaaacctagtgaccgtggcggaaacacacacagcaatgtggcgttctcagcgcctggccctgtctcatctcataagagcttcccttaccctgaccctagcggttgacagccattgggtcacccgattggccgtcagacagcgcggtccgtggcaggctatctgtgtgtgtcgcgtggcgctgctgtcagataacagatggcgggctttatttattcatttacttacttacttgaagggcttttgtttccttgaatgaccagattgtcccaaaatgcttttaaagctgcttccatgccatgagaacacagctgggatagcagctgaagcgaatggccctgcacggccaccttctggtgcaccccagctttagcgggcagtcctctgtaagcccgcatgggtgagatgttggatggtctgtcttggtgagaaattcagtcaccataattaggtggcttcaggttgcattctttgcccccatgatttttttgtctcctttattgacctgagggttcaagagctctcaaagaagtgaacaactgaaagttgctttctcatatttgagcaattttctagaattcatttattttggagatttatttctgtcatgtccaccaaatataaaaaggatctgaccatggggaggggggcatccagttatggggagccataaagtgttgggttatattcattcttttatcaaataatcatggagtgccttctatttgctgggcctcttctaggtgctctgggggcagctggaaaccactcaggcgaggcatctgcct

SEQ ID NO: 104424 - DNA, 1059 bp, Homo sapiens
atatttttcatagggctctgcccaggggaagagtgcatagaagcccttaaacaaatgattggccctgcagtaatccccccagaaaagctcagttttcattattaacagtgttgttttgcgtgtgtgcaagggtggaagggaattgttcttagttggcaacagtctgcccaccacactcgagcatgctcccaaagcctatgtgtctgttgcagccacagcaatttgtttcaaaggctctgtgttgaaaaccccaggccttagaacccagagaactacagtgtgtggagtggtccttaatgttgatctaaacttagatcatgcgtgaggttttgcaactggctctgatcttcattaggttttggtgtcatgagtggggtgcagtttctggtcagttacagtgttcacaatctatggattttcctttgcagcactcctttttctgtcgcttgacagaagataagaagtcagagaaattctttaaggtgttttatgaccggatgaaggtggcccagcaagaaatcaaagcaacagtgacagtgaacaccagtgacttgggaaataaaaagaaagacgatgaggtagacagggatgccccatcacggaaaaaaggtaaatgttcctcagtcttcagtcagctggatcatgaacaccagaagagtccttgttatccttcattgttttcattacttctgtgctctaaaatgcattatgatgggagctttcagaagaaatgccagcctggttatgatgtaattcttcctcagtgacctgagctgaagccctgctgctcagaaggatcttcctgtttaataaagaacattcctcttggtcgagcttagggttttattggcaagggatccatgaataatcttttcctgtgattcctattcaatgttagagaaagttgagggaaatacgtattttaaaactgggtgttagtcctttgtcagataatgttcttttgttttccgaggtattggaaagcttataaagctttttatccagtatctcaccagaagagaagtcgtactgggcagtgggtagacccacaagtgttgg

SEQ ID NO: 104425 - DNA, 1191 bp, Homo sapiens
gaggtacctccattttacagatgaggggactggggcacagagatggtaattaagtcattacggacatgcagctaggaggcagtggagccagcattcgaacccagcgtgtctggccgcagagtcagtactgctaactgtaatgccataactacctcacagggttattctgaggatgagataaaataacacacacaaagttcttcatcacagtgctttgatagttacagaagggtcaggcattacgacaacaataattgtgattagcattatgttgagcttcttaagaactttcttgagatgttattcacggatgctctcccattttaaagatcaggaagctgaggcccagaaccttagatgtgtgaggctgacagaacctgtgctgaggcttttcctctgaaacacactgtacacgtaggtgaaatggtagatccacaagtaaggtggcagggcctggctcggttttaatcctgtctgaggactgagagcagattgtgacttctttgagtgttttgccaactttgaacgtctctaggagataaaggaatgtaggtttctgagtgtcacctttggagtggtgaatagggcccatgaggactctgcagcctttcatgccttatgcttgctttctagctaaagagcccacaacacagataacagaagaggtccgggatcagctcctggaggcctccgctgccaccaggaaagccttcaccactttcaggagggaggctgatcccgacgaccactaccagcctggagagggcacccaggccactgccgacaaggccaaggacgacctggagatgagcgcggtcatcaccatcatgcagcccatcctccgcttccttcagctcctgtgtgaaaaccacaaccgagacctgcaggtgagggcctgggggtgggggcgtggagggagctcgggaaaggctgccaaggcctgccttcctctgatggttcagcacctctcacttgggccagattgcttgagccaaggatccagcaaggttcttttttttcctttttcttttttcttttttctttttttttgagatggagtctcgctctgtcacccaggctggagtacagtggcgtgatcttggcttactccaacctccagctcttgggttcaagcgattctccttcctcagcttcccaagtagctagaattagaggagtgcctggctaatt

SEQ ID NO: 104426 - DNA, 1064 bp, Homo sapiens
ttggctgaaaggttgagctgtatttattgcatgaaggatgtcataggaaaggtcattaggaaagatgggaacacagaaacctgtgggaatggcagttattttttctttactatttagaactgagagtccacactaacagtcgatttgggtgtgtggtttaaatggactttttttctgctatttttaattccttttgacaaattgtgttttagagtgaattttaacagattcaaccttgtgtacctggccaccatttatcagaaagtccgaaataaacagaagttcatgtgctcctggtcagcatttgagtgactttttcaactaatccagtgatctatggatgatgatagaaatttgtgccctgcgatagcatgataccctgactcaactgctgtgacctaaactaggggaagaaataagaccactctcactgtccaaaaaaagaaaaaaaacccaacagctttcaagtcctgtacataaagaagcatacaaagtatcatagacccagggcctaaaatgaagtcaagccaggaagtacaggatgtggggtgtgaacatgggtgtttttaatgtaatgggaaattagggcttggcctgcatacattgttcctttgggtcacatttgttaactagtgtcagatgtactcattatattaggggttatgagagctaatagaaatattttaagacagggaagaattacctttattacctgtcttctctggcctgcaaggccaaataacagtttgtaaccacacctgcccggaaggcagcacagatctgtgtagtagcagcttcttcccaaccactgtcaccatgagggtgacagtgtatccgtaagcacccacgtgtaaattcccaatttcttctaggacttgtaccagctaacattagggcataacacacatgccctgacaaatatgtgcctctttgtccgaaatcagattctgcacacgtatctggggtctgaagggggatgctctctgcctggtgcagatggattttgatgtccttaacccagagcttcctcatggggtgaaatgttcgtctgtttagccgggatg

SEQ ID NO: 104427 - DNA, 1004 bp, Homo sapiens
agaaatagtttcaccagctattcctaaatgtgaatagacttcttatcaggttttcctgaaatggtaaagggctgggagtgggaaatgttggtgggaggaaatgttgagataggaaaagtctggcttctagcctacattcatatcatatttattgtttcaaggtgcttgaaagccattgctgccttctaaagaaggacattaaccagccacagcatgtctcttggtctaagtagagtgaatgagtttcatttctcacgacaggagaggtggattggtattgatggcctgtgccagtgtcatgaaggattctgaggctgtgtccaagcccgataggagagagtgcggaacagccttttccctgggaggggagacagccagtgtgcatgctgtccatccagtcctgtgtgggtcttccttgaaacaggatttttgttcccttggctcttcttgcaggtggaagtgatcaagaaagcctacatgcaaggtgaagtggaatttgaggatggagaaaacggtgaggatggggcggcgtcccccaggaacgtggggcacaacatctacatattagcccatcaggtatgatctctcctgtgcctcctctggatgctgcctccctacaggtccaaaattccgagctggagggtgcccccagtcttgcttttcctttatgactttaacctaggactgtctgtactcatgagcctgcggctcacaggtgctcgtggcaacctgacccagtgtgcagagttccaggacgtttccatttttccacagtgatagggtcatgtagttggaaatccccgtgtttcttaaaagcattcacccccaagcagtgatacttggatggtttatgactctgtctggagacagttgaaaggagtcttaggcttttataaatattgatgagcctctcttaacaatccaaagaaataaacttcagcttccttgcatattgcacttggaaatctgtgggaacttgtccttatgacttccttttgtttccc

SEQ ID NO: 104428 - DNA, 1012 bp, Homo sapiens
atctctgtccctgtattctagttggctcggcataacaaagaacttcagagcatgctgaaacctggtggccaagtggacggagatgaagccctggagttttatgccaagcacacggcgcagatagaggtaaaagctgagtaaactcagggcatggggttgtgttgaggccattagtgtgcaatgccctgctctggggctggcgtgcattcattcatctgagcaatggaaatgtgagtgtgtactgtgtgctaggtcctgggctgggtgctggacatcccatggccaagacagtcattattgctgcttgtggtccggtggggaagaggacactgagcaacctctcattcctcacgaattcacgaggacaggtgggaggcatcataagaaagtccagcagagggacctgctgtagatcgtggtggtcacagaggcctagtctgaagaaatttcatctgaacccagaccgtaaagaacagagggatgaaacaggtagagactagcaagaggaacttttcagacatggggaataacagcaagcgaaagcccagacgtgggaagattctaggtgatccggaggggctaagcaaggcttcaaggctcagggcatagagttcagtgcagagggagatccgaagggaaaggcaggcagccctgatctcacagggtcctatcaaccatccttatgagaagtctgggctgcatccccagagcaatggggaaccactggagagttttccccaagagggcattacaatcagatctgtgttttttgttttttttttttttttaaaaaaggtgtcatgtggctgggcacagtggctcatgcctgtaatcccaacactttgggaggccgaggcaggtagatcacttgaggtcaggagttcaagaccagcctggccaacatggtgaaaccccttctccactaaaaatacaaaaaaaaaaaaaaaaaaaaattagccaggcgtggtggcacacgcctgtaattccagctacttgggaggctgaggcacaa

SEQ ID NO: 104429 - DNA, 1070 bp, Homo sapiens
gcattttgggaggctgaggtgggcagaccacctgggctcaggagtttgagaccagcctggccaacatagtaaaaccctgtcaatactggaggaaaaaaaaaaaaaagccaggcgtgaaggtgcgtgcctgtaatcccagctactctggaggctgaggcaggagaatcacttaaacccaggaggcagaggttgcagtgagccaagatcgcaccactgcactctgtcctgggtgacagagcaagactcctgactctgtctcaaaaaaataaaaattaaaaataaataaataaagttaatggatctgaagttaggaaaatactcttccagagttacccaagctattttttatataaatctgagacacacagcccagtttggggttataaaatcagagatcatattatactcaatcttgaccaccgagtctaccaccagtagcaaatagtcttagtaaaaggtttcaaagatgaatatttaatctcatccactttttcatcctagattgtcagattagaccgaacaatggaacagatagtctttcccgtgcccagcatatgtgaattcctaaccaaggagtcaaaactacgaatttactatactacagagagagacgaacaaggcagcaaaatcaatgatttctttctgcggtctgaagacctcttcaatgaaatgaattggcagaagaaactgagaggtgggttccaacgcatcagcaacaacacagagagacacagttctgggatttcacaaacttgggcttgatggtgcgttcatttccaagcaggagcaaagctagtatcatttatgatactttgcacctctgaccaccaggaagtcataaccagttttgcagctgatcagtgggctcaagccaaagtatgataactcccctgaaaaggcttccttcatcagaatttgacttgatttgattggaaagctccatggaagactttttgaatgcctcttttgatatctctatctagaaaataaaaagaaaagggaaaagcccaggcccttgagctcacagggtggttcacttgagcaggaaattcacactgcttgctggctca

SEQ ID NO: 104430 - DNA, 1589 bp, Homo sapiens
gagatgggaactctgctgctgaccacgaggtcagcaacttgtacccctcgcttccctgtcctcaagaatgatcatccaacttcagggaaatggcagatgactcaatgccgggaaaggaatcattgtcttgcttttaggcactggcgtgttagtggagcatgttgagccagagaggaatgtggaaatgataccagccctagtctggggcccagcggggctgactctgaatgctgtatctcccccacccctccccagtgccccacacttctaaaaagctaattgaatttttgggtctctccgggcatctcatctggtcccagagccctagggggaaccgaggactcaatgtgtgaactctggataacccccagattccgcaactgatggctgcggctggggtatgcagggtttatagatgctccaacttttctctttttgctctctccttactccacccccaatacatcttctgttccagtaagtactccacacagaaataaaccaatctgatgtcattatgtaccaagttccaaacaaatgatcatttttactcttgtggtaaaaaccgggaacaaaagtggacttgtggggcagagctggcggaagggccacattgcattcctggcgttccggcttggggtctccagcctcacgcggctttgcctttgtctctgcagcccagcccgtgttgtactggtgtgcccgcaacatgtctttctggagcagcatttcgtttaacctggccgtcctgatgaacctgctggtggcgtttttctacccgtttaagggagtccgaggaggtacccatatctttaacttcaaaaatcctattagaagcagcaggaaggctaggacttgcatctcagttgtggttcctggatgtattggtgcagtactggggatcccagttatccacattcagacaagaggagattgtagctgttaccatagatttagttttaaatctaacttaaaataatttaacttttttatccattttttttaaccaggaaagaaagagaagcagctagatactattaaacctgtgagaaagtctcttaatcagccccttcttttatatatgaggaaactatgtctcagagcagttaagaaatcaggccaaagtcacatagctaactaatggcagagctaaccctaaaacgtagacgtcttgatgctcagtccagtatatgtgtttccacaccgcacttctggaattgatttcagactaaagaatttgtaagaaatctctggaatattttttttgccaggggtcagaggggaggcaggacttgaatgactgcagactgtacaatgtttagtctattaagaggtacctgccattattcacataacaaaacatgatgattatggtctttctgggttccccccagcctacctccttccaggctacacattttgctgagaaaaggcagacaatttggaggtgggcattttgctatttggggcccctcgacaagcattcaaagctcctcttctgtgatacattcatggccccttttctgacatccacagcagccacctgggaggtccacctcccggctaaatttttcatcagagctttttgg

SEQ ID NO: 104431 - DNA, 1066 bp, Homo sapiens
agccaacttcttgcaaagagcaggttccttagcagagggcaagcctggattgtgaaggcactgtgacctgcaggggtcttaccctcgcaatgttaacgtcactaatgtccctgcgatacaccagctatgtgaccctgccccagtctcttgatcaggaaattgatgataattactatttactgtacttactgagcatatggatgccagtgtgctaagcactgtgcgtacgtggtttacttattcttcataacaactctacatcctccagtctgcaaatgaggaaatggagactcagaggggatgaggaaagtgcctagcccgagatcatacggtggacagtagctgagctgagatttgaatttacatctaagtccagagttcttgccactgacgctggcttgtagtacgtctgccttcccaccagacactgggctgcaggagggcagggaccagggtggctggctcttcataaactcaattcagtaccttctaaatgaatggatgccaagaccctcatcactttcctctccctttgtctctgaaactcattggcacaagcatgtattttctctatttccagtccctctaaatggctctggatactacttgaagttgctattgtttcctgcttcctcttctgtgtttatttttcctcatttttaccatctccgtttcactgtgaagccagggaagatgttcagtgttaagatcatatgtagtgcttttgagtgtctaagagggcaaactctctataaaccaagtttgcattatgggatagtgatgtacatctaacatcaaggcttcttaaaattctttttgtttgttttcaaagctttttgatttagtgtacagagaagagactttgcttaatgtcattaaaagtgtcactcgcaatggacggtccatcatcctgacagcagttctggctctgatcctcgtttacctgttctcaatagtgggctatcttttcttcaaggatgactttatcttggaagtagataggctgcccaatgaaacagctgttccaggtgggtttgggatcttctgatctttttaatgctaaaag

SEQ ID NO: 104432 - DNA, 1918 bp, Homo sapiens
ctcccaaatgctgtgttcttggcatgtatctccagcctcccaagttgacactaagtgacatttactgccagccatcttagagttgtggactaaactggcctggaccttggatttctattaatgcctgctaatgcttctcgtgcagacttggtataaatcttgccagagtctgtacgttcagtagtatctgtctaagagtttcagctgtttgtctttaaagttggagaggtgctatttaagtgcgatatttctagtaagcctacaggaattgacatttttggcttttttcccatccagatcaccaaatgaaagtgtaaattgcatttctgctttgaatttatatgcaagattctagggtgttatttatgtaaagaattgtttaatcagccgtgaattggggacttcaaacattttaaccatatgctgccagattgttcatcataaaatttccttctctctcccagaaaccggcgagagtttggcaagcgagttcctgttctccgatgtgtgtagggtggagagtggggagaactgctcctctcctgcacccagagaaggtaggacctcctaactgtaagccccatgttaatatcggactcctccagaggcttagctgatgcaggtgatgttggaagaagattaaatttactgctcaggagtaaggctatagcaaaggggaaaggctgagaaagaggagggagatgaagggaaaagaaggttacacctgaagaaaagatctgatgtgattcagccgatttatactgagtgcccgccatttgccagggactgtggtgtactctaagagacagtaatgtagtggagggtgcgggcaggccaaatggtgattgctagagagttgcccaatgctgggaataaggatggaatacagaagttaggcacccggcctactactgggctaagcgtatcatcaagaaagtgatatccaaactataaaaggagactcttgatattccaaggagagggaatagtacatctaaaggctttaaaggtaaaaagaaaaaaacagcaagtttggggagataatgattataaggaaggagagtggcaagaaatgaagccacagatacaaacaaagggctagatcatgaaggatcttctatgtcaggcgtaggaggttaaacttcgtccagaggatggtcaggggttgttggaagatgagtgatgaaatctgtgttttagcaagaccctctgcagctggagaaaggaatgaggcacacagcaaggcatggctcttactgcataaaccagtgagaatgaacagcctccaatgtaaagcagttgatccagaggccctgccgtgaaatatccctggatatagtcctcacaccattcccagtgaggaacctgtgtcctgtggcataaccctcatctgagagacaagaggcctgtgactcagagttgcgaagcaactcatctgacatgaaaagactgtttgcggctgggtctggggtttaaaacctgaaaaggacagggcatgttttagatcccacagagggagagcaatactaccatagctggagaaattagcgggggttagcgatgaaaacagttgccccagacgactttagcttttgaaagaaaataagaaaattcttggctcttgattccttaattttattctttcgtgtgcctggtgagatggcattcaggaaacaggatttcaaaatcccggtctctcttttctcctcacgttttctctctgttgttacttgccgtgttcacagagctggtccctgcagaagagacggaacaggataaagagcacacatgtgagacgctgctgatgtgcattgtcactgtgctgagtcacgggctgcggagcgggggtggagtaggagatgtactcaggaagccgtccaaagaggtaaattaatcccgaggggaaggaagggcaaag

SEQ ID NO: 104433 - DNA, 1044 bp, Homo sapiens
aaaaccttaacatgtctgcattttggcatttacctgggcgaagggacttcacattccctggttgcatgcaatatgtgagagtgtcacacacattctcattttacccctaaacactcctggaacctagacggcggtctccccattcactaacaaggccactaaggcatgtggagatgaagcagcaactgccaagtggcagaggtgggattcaaacccaagtctgtctgactcacagcctgtgttttcctgccataatgtaaacatgaatgtacttataaggccgacagaatccaactctttataaagacaggagtgaaaccacagccccctttctactgacagttctgttattgattttttttctttaccaaggctgctcagctggggctgggggctttttgtctcatttttaggcttggaaagagacaagtttgacaacaagactgtcacctttgaagagcacatcaaggaagaacacaacatgtggcactatctgtgcttcatcgtcctggtgaaagtaaaggactccaccgaatatactgggcctgagagttacgtggcagaaatgatcaaggtgagtggaaaggcctcctgggagcaaggtggacttggggcctactcagctctgagcaaggccccagcagcccatcggggagctgcacaacagaagaataacatccgatgttgcctgagcccttctcacggatggggcgctgtgctctgtgaacttcgtgtgttctctggagtgatcctcagaaccactagataggtggtattggcctgtgttagtgggggaaatgttgagcctcggtgagattagcacgtgaccacggaactggggctgggattttaatctggatcaaactccatagcccgatttcctgtcgctatgtgaatctgcctcttttcttgatagtgcttttttcccctttctttttaattaacacctactctctaagaggtgtcttagaggcaaagtgactgctcactgcagtccagcatggtttgtgtttgccctcagcctcgcctttctgggagacactc

SEQ ID NO: 104434 - DNA, 1037 bp, Homo sapiens
tggctgcctctgaggagaaggggccaactctccttccagttaccaaggacttgagtgctcggcctgataatgacttaccctaaaggagcctgctttttacctagatgtaattttcaggctttttatgtaaagatactggaagtcaggtctgttcagataagtatcatcattgacaggcctagaggcagccaggctttcagttttattgccagcagggcagcgattacgtggttgtgtttgctgaataccccgattacagaggcacagaggcctctcctaggttctggagggctttctggagattctgtgccgtctgtacccttgaggtccttagagttgaattccatgcttctcaaattttattgtacatatgaatcacctgtggagcatgttaaaattcacattttgactcagcagtcacttccaggacttgagatattctgcatttccaacaaccttccaggagatgccgaagctgctggcccgggaatcaccctttaagtagtaagagcctcacagaggagacaaagcagatgcttacttaagattactctcagaggggttgtgcgaatgatgaggagaaatattcctaatcctttacatacatttggccctcttcggtttgtaaaatcctctcacctctagtattgtatttggttgttaaagttacgctccatggggaacccggaggaagggacttctgggatggggagagatggatggaggttcacggcagaggtaacttttgaaaaaggttttgaaagagaggatgaagtcactagggtcatagattagcagaaagaaaggagaaaaaaaaatcagcacagactggggagaaaaagacacaagttgcagaatgctgatgatggcttatcccttttacagataaaagccaggctgggggttaagtgacttcctaggaacagttcagaaggagctgagccagaattcaaaccaggcttggctgactgtagaaatcgcactccataatcatgtcgttgataggaaaccgggagggtgctggtgattctgggagc

SEQ ID NO: 104435 - DNA, 1027 bp, Homo sapiens
gcccttggcatgctgatgggccccattcgtgtcttcagcacacactctttagacactcacccttggaggtagggcctccgtgcagctccacagaggcgaagaactatgcattgagacctggccggtgaccacagttcttggactaaagcagcttgagaatagagaccttgtctttctcatctttagatcctcagcgctcaaccccatgcaggacacagatattgtaaaagttcagtaaaaagctgttgaatggagaaagtctgtgcattttgcatttatttgttcaaagacccttctgaaatcattgcctagagggccaggaggtacatatggcatgaaagaaggtgaggaaaattctcattttaatctgtagtcatttggtcacttgctattaggaatgagggagagaaactgttccttaaactttcggctatgtgcagactcttgcattggttttctggagtctttcgaaggcctcattaatgtggactctgtttggaaatgtgtgttttctatttttatagaaggtttgctaagcaaatgaacatatgaaggatttgaaagccagattttagatggattcgctaacattttaggcagtttagattcatttgcatgtcagtaataagtgagctacaggtgagttccgactgctagcagtgaggactgtgaatgtccatcctctctcctctcccctggtctggtaaggcacggcggcctttcacagagttcctgcttccttctgtttccctctagtcttcaacagtccaagctgctcctgcctgtctgccctcatccccagctccagccacactggagcctcactgtgccagtggcctctgtgaaatgccctcatgcttgcccaagggctaaccttctttagggccaagccttgcttgaagaggattttagccaatcaatcagtcactggttgttgggtcttacttggacactactctctctaccgctcctagatacaacatagcctgcattattccttagttagttttttatttgttttcagaga

SEQ ID NO: 104436 - DNA, 1033 bp, Homo sapiens
ttctatcacatacttaggtatcaaaactgtttctcctttgagggggtccaggatgcagtgaccatgtctctgttgctcactgtagtatcctcaacattgttgtatccaaagtgggactttgtatcttttttcttcaatttgttttcctcaattgaggtcagtctgcaaaaataggtagcagccaccgtgagtatccagggcctcgtgctaagtgatctctctgcagctgtgctttggtttgtggcttcagcagcccagcccacgtcatccctcctcccctcgccctagtgggagtgagtgatcaccagtgacctgtcgcctatgtgtgccctcttctgaaaaatgaggtttcctcctcagagttgcatagtccttgaacatgggctacttccttggtgggaagatgtggctgtgtctgaaggattgacacaggagagatgagtacagtcaacgataggccactgcagctgcacgggagaaaactggttacaggtggggaagcactttgggtttctcagctagtcatctctgaaatggaatattttttaacgatcttttgcccattgctctgtggtgggaaattgatgaatataagctaatgttaagacacatgaatgaagtgtttattcagggtataggaaggtagagattgccatttttctcctccagcagtcacgataagcagctcaggcttactacttaagcatttgttattagggtgcatgcagaagaagagttgcatatcattctgtccttccacaagcttttattaatattgaatgtctactatgctctagtcagtatactaaggtggttcctgccttcataaagctcacaaactagtgactgtgaccctgcccgcccacccaccagtatcttaagcaaacactctatgacaccttgttgtccatgtggtatgactgcttgtgatatttttcatctagctctcttatagggcttctatattgctagatggccctaggtcaagatacagctcaatgatctcacttgagttgtaatatttagacatgtc

SEQ ID NO: 104437 - DNA, 2015 bp, Homo sapiens
tgcacagcagtgtgaatgtacttaatgccactaaactgtatgcttaaaatggttacaatggtaaattttatgttatgcatattttaccacaattttttaaaaaaaccaaactcatcagccatgtaatttgcaaagatcagagcagcagtggcagtattcagatttggagattaggactcttgtttagaacctatatttcccctatatttaaatttaaagtggcttcctctaagaattcagagttccattgtatgcaattaaaaagatagctactgagcaattaaaaaaatacacagcacataagttctgccatagaaggagataacctaatgagagttaggaaacatggcacggtaagctggcctttcttgtttttacctctagaagtgactcagtcttttttttttttttttttttttttaatgtggattctaggaaagaaaccttgactggttccccaggatgagagccatgtcattggtcagcagtgattctgaaggagaacagaatgagctgagaaacctgcaggagaagctggagtccaccatgaaacttgtcacgaacctttctggccagctgtcggaattaaaggatcaggtaaagaaagaaaatcccagcgcctaccctcccatcactatccccacccacacccactatcaccacaccaaatctgatgaggaaaatcagtagtgcttcatctagatggaaaagggagccaggcaacaggggacaaacccactcactcctccagtctcctcaccccaatccccttcactgcccttttccaggataaagccatggtgctactttcagtgctgctcaggacatggttttaatatgaaaaacaaaaccaaaaaaaaggagggaaatgcagactacttcagtgaagtactgtccaaaaaccactatgcataaagccataccctttttactttatgtactgtggaagattaaaagctgtttcttgttttgcttcctagccctcagacttgtcaaatcctcaccccatatatttaaattcagcatcctaggctaaaccatagtcatggaaaagcccttttggtttcattcttttctcagtggcttactgagtggctatcatagtacaggaattatgccaggtgttggggataaaacagtgaacaatatagacatactccctgatctcacaggcctcaaccatccacagaaatactgcctgcaccctgcttcctatccgtaagataaatgcttcgcccttatcttatggataggaagcaggatgcgggcagtactgtgggcagaatttaaattggaaacaggcagtttccaatttaaagtaagttgtaggggacatgtttatacaaaaccgtgcgtactctgtttctgcccttttgactccattaaaatgaacatgccacagtcaccaggtggttatctagtgataggatgcagctgtgtattaaggacttgtaccctgggtggtgagaagaccctgattggttttattagtgcatttctgtaagtgactgggataatcatgttcagttcagcattttatgtgagtttctgaaagctctttaatcaactccatagacaagattatagtgttgcacagcaataggcatgggccatgtctgcactggaggtaagttgcaaggtacacccacgggtgatttatcactcttacaaagatgataactaatgaagaccgcatctagaatgctcttactggagatggtttacagagcatttttaatcatcatacttagatttatattaatatttcttttcaaactaaattattccaaactgtgccctgagataccatttggcctcaagttcttttctttcgtctgtattaaggtgcaaataaaaaagactagtaggaaaagaaggccttatttatgaaggttgtctatagctctgagcttggtagctacataaaatgagtaataacctaaataagtaaaactaatgaagatctaactagattactttgcttaatattaacattttacccgccccccgccgtg

SEQ ID NO: 104438 - DNA, 1028 bp, Homo sapiens
acaaaatatgtaaaatttgattacatatggactaaggttcattaagtgacattaaaaccagtatggtttaaactgcttgattccagccttttatgcattttttattttgaagttggcagttggaaccactcttcagaaagcccttcccctgtgaatgaatttgaactgttttttttcttggaagatattataagttaaaaagaagcatgagaatccagtagtacattctcaagtgcttttaccaggattgatctacttaagttttaaggtactcagaattacaggaaaaattcagcatagctgctttttttttttttttttttttttttttttgagggggcagggggatttgcatcttttaaaaggaagtagtcagtgttttcttttgattatgtaacgtcctacaaacctttaatgcatttgagaatcaacttgttgaatagatttgaatttcattaagtttggttatagcaatcataaaggtttaaaaaccctttatgtgcaaaagatattaaaaaatgcagatatgttacagagctgctctttcttaaatagtaattgtgagaattcttgccctttgtgggaaaaaattttgaattaaaaaataaaagctccatgaatgattaatgaccaagaaatcttgtgatattttttaaaacagctatgaaagaataccattcactagtaaaagtgctagaaaacacaaaaattgctccattacttagaggttttttttgttttgttgttgttgttgtttgttttagattttctgattcaaaaaccagcagactcgagcaacgatagcttaaatgtggatgactttggtctaaatctttactgttatttacctctttgattgtttcgttatgtatcaatctgagggaaaaaagttcttgttaggatattagtaaaattatggttagtggtgtcactttttctattattgccaagaatggttggttaggattgctattctaagtattatttaacgatgcctctcatcttgaagtttcccctcccaagagatt

SEQ ID NO: 104439 - DNA, 1309 bp, Homo sapiens
tcctgtgcttttattgttttttgtttctttatgaaacaagtggcaagcaatacttctgaatgttacattgcatgactaggtcacagaatttcccattctgcctaagaagatgccttttttgaagtgctgtgtgtttgatatagcgatggtacactatttgtagaaagtgggtttcagtataaaccataaccacagaggtaaatctatggttcagtatgcgatttgacgtacaggaagtatctgggtctaatgatgaaactttttaactttccagatgacagaacaaaggaagcagaaacaaagaattggtcttctaggacatcctcctcacatgaatgtcaacccacaacaaccagcataagcaaatgaaagaaaggaattgtatttaccttttataattattattagtgtgggtatggctaatgagttctgattcacccacgaaggttacatttatgctgaatacatttgtaaatactcagttttatactgtatgtatatgattgctactctaaaggtttggatatatgtattgtaattagaattgttggcatgatgacatttcatttgtgccaaaaatattaaaaatgccttttttggaaggactaacagaaagcacctgatttgcacttgaaccagattatagatttaaaagtatatgacatgtattttgtatttaaaactagaatagccagtatttatgttttttataaaactgtgcaatacgaattatgcaatcacaatacatttgtagctcccgagtgtcctaaagggagtgcacttctttgaagctggtgtgttaatactatgtaataaatggttaactttcaaatgatgctgctgccaaaattatattaatagtgagtttcaggcccctgggcattttgtaccatgtaattatcctctggtgatgctgtttctcgttagtggcagtagtgcctccgtctcctagtgataatgctccaagtctatgaactgttaaatcagcattcattttaagaaaagcaactttagtttcaaagatacttttaagcttctaaattgatcatttaaactatttctttaaataagagagccaaattagaggctcatactttagcttgtgaagaagataatgaattttttaaagggaactttctatgcaatgttcaggataaatgcatactgctggccaatcagtgtcatctcctgggtaaattttgatgtcgcattataaagacatgcataattgatggtttctagattatctagtccaaacaatagagtttattttttcttcatctgaaccaacatgctacagtagctaaga

SEQ ID NO: 104440 - DNA, 1062 bp, Homo sapiens
caggaaccaccttctcttctctccctccatccaactaatcatcaaacccccattaattctactcctatatattttttcgaatatcttaccttttcatttcccatctcatgtgcaatgttactagccttttcggcaaccatcatttcttacctggatttctgcaaaagtcttttaatggttgttcctcctacttgcagttttgaagctcccagcattcttgtaccctactccccaaaacttctactcacaaagtcctttggctccctcttcttatctatcctctctcatcactccctccttcactgaagacactgccccaacacacacacgtaaatctataataattaacactgtacttcccaagtcctggaacaacagatgctgtcttttgcatcatgtcttttcacttactattcctttatgtagaacatccacctcctcctgcattcacttaactaacttttacttatcctccaggttttagttaaggtatcctttctcatgggaagctttacataataccctaatctagatgatgtgctctttatcttttagcacttaacacactgaaattatttttctctctgtatctctttctagattgcaacctccatgagagctggggctgctttacttgttcatttcattcatcactctgttcccactattgttaaattcagtaatccttattacttagaaacaggcacaaaccagaacaaagcagtcaatggcatagtgtaatttgggtgtattgactcagagcaccacattgactatggtctcagtcaaaaatattcatcgcccaacatgttgacattcttattattgtgtaaggcattataggacttggactcagatgccttgggcaattcctttcagcctctctgaaggtttttcttcatttcttaaagggattaagcaatacctgtaccaaagtgatataggagaaacagattataggagatgaagcaaaagcattttgtaaatcaaacaatgatactcaacatatacatatatgtatccttgactaatccacggtggccaaagtataatggcttactt

SEQ ID NO: 104441 - DNA, 1084 bp, Homo sapiens
atccctttaaaatgaactgaaatgttaaaatgtttcctaggaacaccttcagtcctcattctattgtttgttgcaaaaatattcttggatttcttcgctttgagagaaactatgaaaatgaaaaattcccaataaacaaagggggagagttcactttataaaagaatgcttttctttgcgctggcatgtgtaataaaaagaaacaaatacaaattctttattcactgatgggttctgttagcaatacacttaattttcagacacaaaatgttaggagtcagttgactaccaaaatctctgaaatcacatggttgaggagataatttaaaatggaaacatttgatacataccaaagttttcagtgatatagctatttggcaacctcaaagtggaatctacagagatagtctggaaagtcattgttaaaagactcataaaatcatgtcttcggatagtgatgaaaacatagtttagcgaacttaattctagaagacagtaagctggaaaagcaaggtttaaaagccagaccacagacagagaagtacttcacataggcacaataatcttcaagaaatagataaatgtattggatatttatttttatttgtaataattctaagaagctatctcataactacaaaatgccacacaagcatagcagcttttatccaattgctatatgtccttgggcatgtttttacaataatagaaatgttagtttttctattcacatacaaactccaatttagctaattaaatcttagccttaatatgattctactggaattaaagaaagatactgcacacattacttcctgccctgaccatttgagtgttgctgacagcagttaaaaaggcatcacatccctttggtgtggcattgccaggtttaagaaaaacaatgccaggcaaactgggcagagaagctggaaatccttcaggaatgagatacaacatgagtaggtatgtgtgcatacacatgcaggtagaaatatatgttattatttacccaaaacttgttacagagcatatacaactaattttctttaaaataggtggctgtcagattaaattcataatgtct

SEQ ID NO: 104442 - DNA, 1009 bp, Homo sapiens
ttgtgttttgtttttaatttcattgtaaccgagatgcctaggtagagaagcgggggagaagctaacccaaagccccaagcccggggcggaaggacctcctccagcggccccagatctctgcaatctcacttaggctgccggagggccccacccacctcccccggaaaggtccgggctctgtgaccttctcactcagccgggagcagggaaaacagctgaaactccaatcccgcggtgtgagcagcgctgatacagtcagaggagggagccagtggaaactcatgactaaaataaggcctggctggggatttcactgacctctgcgctcccctgccctgcaagttcggggagttgagagatgactgtaagcccttcccactgcgcttcgggtcagtcaccccactgctgagtgacctggctgtgggaaggattgaaaaaaaaatggggtcactgccgagactgggcgaagagtagtagcctcgggtgcagttaggggatcagtcttaactggcagtgcccttgacgacctagagaactggcattcacaagttgaccaaactggcagtgtatttccttcaggtcgccttggagagctcccgcttcctgtttatatttcacaagcgtcaaactctttagcaagtgtgagaaatgcctccttttctaactgctaactggcatgacctcacttcggggctcagagatccctccctgccagaatgtacttttgctggccaaaggcggggaccggggtccgccctggaaacgcgctttcaatcttgggcgacctgcttcattgtgtgattttaataaggatgaagggctgtcacggctgcgtcaaaaccacggttccagcaggaaataagcactgggagaggacaggacacgtacccccttccgccgacaccccccacccgatggcaggagggagcccaaaccttgcagcttccatggctcatggctcatgacaatatcattcttaaaattctttgagtttatcaatacgttttgc

SEQ ID NO: 104443 - DNA, 1360 bp, Homo sapiens
gactcatgcaaatgaggcgagaaccacttggacctctccaagttggctccaacaccaactggccttccttttcaggagtttaacttctggtgattttcaggattccctagtttttctcacttaaaggaacacgccaagaaacacacacattttatttaccccttcccctctaccactccccccaccttttttgttgttgttgtcaaataaggggacttgctttggtgtgtgatttttacggcctgtcctttcttgacagtagccctcggctacttcgcagcctttggttggggaaatggaaaaaaaaaaaatagtatttcgggaggaacaaaaaagcctggatgagctggaagttctgaaagggtgtaaggaaagaagtagggaaagcctcttggctgccagacgtaatagaggtccctctctgagttgacaccactgcaggaaaatgttatctctggattcccctgagttaaggtcggcagaggctgctggagaaatttatctgtcaaaggattttcctgaggtagttgcagcttccaaaatgcctccaaagacaggtggcacccgtttttttaaattatttaattatatatatatattatatatatatacacacacacacacacacacacacacacacacatatatgagtgtatctgtctatctttttaaaagcatgacctacagacttaaaacagccaaccaggaaacactattccacttttttttttcttttctcatttctcattgctaataaatgtcccaaaggtgggacttctctgacctcaccgctgactaaggctcttttccttccagactttgggtcacttggaaaaagcagtggttcttgaacttaccttgaagcatgtgaaagcactaacaaacctaattgatcagcagcagcagaaaatcattgccctgcagagtggtttacaagctggtgagtgctgattctggctatgctctctttaagagtttgagtgcaaatagagagcccgtgggctcaacatctgatgtaataaacattactgcaacaaattgcttatgcacgttcattgggggagatgcagttttatctttcctaaaaggtcagacttttcatttgaaatgcattgtgccacctggcatgaatacgtattagtgaaatgataagatattcctgtggcattttagcttgagagtctctgggttctgggagatttccctactcccttttaaaatgccaaggcacctataatttgcattgtgggtgttttacagttggtcttcttagccctctttcattggagaagaaatcatgggtatgccccagcgttttcctgtttctttgcttccttgtcacttggtgtgtggtgtgatc

SEQ ID NO: 104444 - DNA, 1323 bp, Homo sapiens
aaaggttcggaaggtcctgggaaaaactgcgtgccagtcatccagcggactttcgctcactcgagtggggagcagagcggcagcgacacggacacagacagtggctatggaggagaatcggagaagggcgacttgcgcagtgagcagccgtgcttcaaaagtgaccacggacgcaggttcacgatgggagaaaggatcggcgcaattaagcaagagtccgaagaaccccccacaaaaaagaaccggatgcagctttcggatgatgaaggccatttcactagcagtgacctgatcagctccccgttcctgggcccacacccacaccagcctcctttctgcctgcccttctacctgatcccaccttcagcgactgcctacctgcccatgctggagaagtgctggtatcccacctcagtgccagtgctatacccaggcctcaacgcctctgccgcagccctctctagcttcatgaacccagacaagatctcggctcccttgctcatgccccagagactcccttctcccttgccagctcatccgtccgtcgactcttctgtcttgctccaagctctgaagccaatcccccctttaaacttagaaaccaaagactaaactctctaggggatcctgctgctttgctttccttcctcgctacttcctaaaaagcaacaaaaaagtttttgtgaatgctgcaagattgttgcattgtgtatactgagataatctgaggcatggagagcagattcagggtgtgtgtgtgtgtgtgtgtgtgtgtatgtgcgtgtgcgtgcacatgtgtgcctgcgtgttggtataggactttaaagctccttttggcatagggaagtcacgaaggattgcttgacatcaggagacttgggggggattgtagcagacgtctgggcttttccccacccagagaatagcccccttcgatacacatcagctggattttcaaaagcttcaaagtcttggtctgtgagtcactcttcagtttgggagctgggtctgtggctttgatcagaaggtactttcaaaagagggctttccagggctcagctcccaaccagctgttaggaccccacccttttgcctttattgtcgacgtgactcaccagacgtcggggagagagagcagtcagaccgagctttctgctaacatggggaggtagcaggcactggcatagcacggtagtggtttggggaggtttccgcaggtctgctccccacccctgcctcggaagaataaagagaatgtagttccctactcaggctttcgtagtgattagcttactaaggaactgaaaatgggccccttgtaca

SEQ ID NO: 104445 - DNA, 1031 bp, Homo sapiens
tcatgcctttaaaaaatagctcacgagcgtgtgttttcactaaacacaggaggctggtattcccctcaggtattccaagtgagcaagatatggctggtagaggggagaattgggaggtgagtcaccggtttggcaggtgacgtcaccatgaggtgaccgtctgcgtggtgtgccttccaactcccacgtctcccattttctccactcaggggcggccaggtcaccagctggctcagctggaagtctatctgttctggtgtgatgtttagtgagaaacattcctctttatgactcagtgactcaatatcccaacagatgggttcaggaaggctccagcagctaaagccaactccgaggtcgaaacctggatagccaaggaggagatgaaagacataaacccttgggaagggagaggagagagctcgttttctgtttgttggaatgctaaatatctaagaagtaatgggatgatttaggataataattattatcctaagacaacttaggagactggcacacggaagaggatagtaaatatttattgaatgaaatattcattgattattatttcagaggtattcagctgcaagaacaatcccaaactatgagtgaaaaacacagattctcgggcgggcacagtgcctcacgcctgtaatcccagcactttgggaggccaaagtgggtgggtcacttgaggtcaagagttcgagaccagcctggccaacatggtgaaaccctgtctctgctaaaaatacaaaattagccaggtgtggtggcacaggcctgtaatcccagatactcaggaggctgaagcaggagaatcgcttgaacccaggaggcagaggttgcagtgagccgagattgtgccactatactccagcgtgggtgacaaaagggaaactccatctcaaaaaaaaaaaaaagaaaaagaaaaatgtatattcttacttatgtctcaccaactctagttttctcaaaggggcaccagaaatggagcttgatatattttcatggaattgacacaggtttga

SEQ ID NO: 104446 - DNA, 1073 bp, Homo sapiens
tgaacaggaagacaagagacttgaatttgaatccccaaatatgcttgtgctactgatcagctgcaagccagaagcgtcttttcaaaaggcagatccaactgtgtcactcctctgcttggatcatttcagtatcccccgagaacgttcacatctctcaccaaggccagcaagctcctatgtgtctgcctcgctctgtagctgctctttgtacctctcttcaccttgtggctctgccagtttcttacaggtttcaggcttctttgcaaaagctgtcccctcttctggagcacctgttcccttctccctttttgagccagtacctactctttcctgctggttgcagcttcacctctttggtgaagctttccctgattgccagtaggtcagacctttttggaacacaccctcaatgcactctaacttcttcaaagcacttctccccgtgaaaatgaataatcacatttaggttggccattagactgtaagctctgtgaagggccaggtaccatatttgcctggttcatctgtatccacaaacctagcagaattcttagtacatagtgagagcccattaaggatttatttattttattattattattttcaatactgctccttctgtacattaagtatgtattgatagactcagtgagagtctgagaacccattgtgggcctccattttcccattcgtaaatgtcaggattgtgtaggtgtcaaattctatgattctaagagtcttcaatgtgaagcacctgggtaaagagggagctagtgtcagtgggtggaatttggttaaatcccagagggtgctgcattttatttgaagcttatgaaagaaaaggctagctggggccatctggtctggtaacaggtggactcaaaaacgaagaggagaagttcacttaaaaagcagccctgtctgcaaaaaaaaactcacactccttccctgaagaaggctgtcactggtttctctctctggctctgacatatgcttcaatccctcgctcctaaacgtggttgatattcagagcttgctccatgtgaggagagctgctatgagaactgcaaaca

SEQ ID NO: 104447 - DNA, 1012 bp, Homo sapiens
aagtcttcctgcagattgttaatgaacaattatagcaaaaaatgaatgaatgaattaacgaatgtataagtggatgaatgacgaatgaaccaacaatgaatgaatgtagagaaagcctcaagggggcccgagggtacgctgtgctgcggagcatgcccaccaggtggcgatgccagcggcgggcgggcctggccggattggccgcgccgctcttgccgtgggtgccgacggcggcgccgggacgggcgtggggggtagggcgagtcatatgatccgctcggcttcctgggtctggctgctgccgcccgccggtgtccgcccgtgtcgcgccggggcaccaaggagccgttggagggtccgggcggaggcccgctcgtgtggaagtcgtcgacgccgccgctcgtccgtcctcccgtccgttctcgctcccggccgccatcatgctggcgctcatctcccgcctgctggactggttccgttcgctcttctggaaggaagagatggagctgacgctcgtggggctgcagtactcgggcaagaccaccttcgtcaatgtcatcgcggtgagcgcccgcccactcactcgcccggggctccgcagccaggagtccggcccggcgcttctccaaggcctgagttggggcccccctcggcgcgatgggactgatggcggggggcgtgcgaagctgggcctgtcatctcccgagggccagcatttggaatttcccgcgtgttggcggcgcggggagtagcactgagatcggcagcggaagggttaagtcagtgtagacattttccaagggctgtgtcctcaacgccgcgggggctcggaaagagttaaattgaactcgtcacatttttaaagcgcttggggattggggtttcccttgggtttgcccagtaggggcagccaaagagttaagtccagtctgtcactttcccaaagggtgggatttggcaaatccgtcagccgtacgagaaagcgtaagcattaagagcctctcttaagttg

SEQ ID NO: 104448 - DNA, 1062 bp, Homo sapiens
ataagatggatctgcagttagcataaagttaactaccctgcgaaagaggagttggtctttaaatggtgtttttcacttgaagagaaaagaaggtactgggcaggaacatagcttagcaggcctagggaatgggtggaaggaaaattgcactgaggacttacatagaatgtggtgtttgttcagcaatgattgagtagaaaggtgattgtttcgttttgcttgtttggttggttgggaaataaataggagtgaaagatttcgcctcgatctttatttagagcccaagagttgttgtgactcagttttagctggtagtggcttgtacacgccaggggagttttagaactgttctgaagagagatggcagcagttcttccaccttttcgatgactgttgaaatcctgaagattagctgtccgactggttaggttacacaagatgattcaaacacagctttcatgtttgagaaaataggtaacttgtgattcttagtccttgcactaataaagcaacaggaatgagtaagtcttggagaaaaagagattagcagaaaccccaaagtcctttgaagaatgatgtatataaggaagatttacctgcttgttgttcggctccttttctagtagtattattattaattttttttcttgagacggagtctcgctttgtcccccaggctggagtgcagtggcgagatctcagctcactgcaacctccacctcccaggttcaagcgattttcctgcctccacctcctgcgtagctgggattacagacgtcctccaccacgcccggctaattacttttagtagagatgggttttgctttgttgctcaggctagtctcaaaactcctgacctcatgtgatccgcccgactcggcctcttaaaatgctgggattgcaggtgtgagccaccgcgcctggcctcctattgtaatattatgattttttgcgcttggaatgactatctttccgcaggaatagaagagtggaatgtgtatctaataccactaattttttttttttttttttttttttttttctggtagagacaagatcttc

SEQ ID NO: 104449 - DNA, 1022 bp, Homo sapiens
gtctaacattgacttcaagcttttgtacaaataatgactctcgttcatttgccaacaaataactgccaaatgcctgaggcattacactaaagtggaaaatcacttttagggcttttaagtttaaacttaggttcaaattccagttttgccactatttagctgtgtgtatgtgaccttgtgaccttgacctcaagttttcttttctgtaatacgaggccagagtaaaatgagtaatgctgagctattatcattattatttttaaatagtataagccaattacatatggcttagctaataaggatgtgttgttgatgcagtcatcacatgtgattgaaaagcattcctgtcactccaacttcttactgcgcttactgcacctgccacactccccaccctgatgatagtaagtggaattttaggcagctactgaataaataatgattttactatctagaaggcactgcagtttggaacctgagaaatgtacagtgacttagtattttatgactgtccatcattttaagagttgagtttcactgtgaaacaatgtcgaaagcactgactggactaatggagtggctttacagtgcttactgtttcttcagtaatacccagagagagctgcagtgtggaggagccggtgaaagaatgtattcagcccatggcattctctgcagccacaccactgtactgccaggatcacttgagaaacagatgtctctactgatatataagcagacagctaaaagattccatacactgtagtttaaaatgattttagggaattattaataatattttaaaaaattgttactgaatttttttacagtagaagggaacatgagacaatccatatgatactattagtttgggagatgaagttgcaaaattgtgaggcagaaaaatgttaaaagtaggcactaaaggactaagaagttacaatcttggctttaatgtatccaatgacaggtgccatggtttgcttcctccagagtctaacaggcaaaatagtatttgtaaa

SEQ ID NO: 104450 - DNA, 1106 bp, Homo sapiens
acatacatatcttactaagatcatttgggtagctctagaaatccccctttttaagttcagtaatagaaacctagaaatagatttagaaagaaacttttttacagtttttttttatgaacaagcagcatttgtactcatagaagggcacacaatgacaagtctttttctcattttagttcccaaaatacccagttttcccaagaaagaagaaaataaacttctaaataaagttattttcttaattttaaaaagtttttatgttagaaacgcaaacattcaaaaagtagtacagatgtttagagaccaaccaggacaatagtatcaaggcctgaaaatgtgactggtatactaataacctcaacactcatgctccctacttaagaaccccacacagcctgcatgtgaacggtaatcatctttttatataaaaatgcaggtgtttattaaggattatggccgacctttgattttcatgggaaatatatccagataactttagtgacttcacaagttgacaaaaagtgttatttgcttgagctctctagcactaagatttcttttagtgtccctttttatgttgctgttggctcatcaatgtttctgaatatttgagtgaaactgctggttggttgacaagggatactcactagcaaactaatcacagacaagcaagttgaatttttattcagcagttttttggatatggatttagtagcaccgttattagaatgctgttaatgaaaggtagagtgatcatatgaaataatctttagagaccttttaaaatgactatttttcaggagtagaggtaagcaagaatgagttttcaggctcctaattgaaattgtggtttggagaacattttaatcctctagggttgtctttgtaaaggaagttgctgcagagtagctccctttgtattaacaggcagtagagttagttgtttcaagtgagttagaattttagaattggaacgacagcatgtaattagttggagagttcctatgccattacgctttataaaaagttatctagatgtgatatgaccagttgatcccctgtaataaaaacaattaattttctagagaatttttatctgctgtatt

SEQ ID NO: 104451 - DNA, 1033 bp, Homo sapiens
tttcagctcactgcaacctccgcttccctggttgaagtgattctcctacctccacctctgaagtagctgtgactacaggtgtgtgccaccacacccagctaattttttatttttagtaaagacaaggtttcgctatgttggccaggctggtctcgaactcttgacctcaggtgatccgcccgcctcagcctcgaaaagtgctgtgattacaggtgtgagccaccacgcctgaccagctcccacttataagtaagaatatgcagtttttggttttctgcttctgtattaatatcgctgaatcttttaacatgtactttttaactaaaatcctttgggaaggaattatgtctgtggttggaagtaaatccaaatttgcatataaaacagatcaaattattgatctttgcaaaattatttaaggattgtccatagtgttctgaaattgggagaaaatgaacattgtatatatgattcttgaaatgttactgtagtgaatgattatgaacatattttctagcactttaaaaagactgctgctgggtgccatggctcatgcctgtaaccccagcactttggggaggccgaggtgggtggatcacctgaggtcaggagttcaagaccagcctggccaacatggcgaaaccccgtctctactaaaaatacaaaaattagctctgcatggtggcacgcgcgtgtaatcccagctactcgggaggctgaggcaggagaattgcttgaacccgggaggcagaggttgcagtgagccgagatcgtgccattgcacttcatcctgggcgacaggagcaaaactccgtcttgggagaaaaaaagagagagtgctgtaaagggaatatcatatttgaatatcatgtatgtgtttgcaataaatattgtaaagaagaggaagataaagaatagaatattattatactttgtccctcggtagatgcgggggattggttccaggaccccctctgtatatcaaaatctgtacgtattcaagtcccgcagtcggccctgcacatatgaaaag

SEQ ID NO: 104452 - DNA, 1953 bp, Homo sapiens
tgaaaatttgcagtttttcagtaatgaatgtgcatgtttcaaaagaataggtttttttgttgttgtttttttgttttttttttggaaacagagttttgctctttcacccaggctggagtgcagtgtcgcgatctccactcactgcaacctctacctcccggttcaagtgattctcctgcctcagcctccaaaatagctaagatgacaggcttgtgccaccacacccagctaattttttgtacttttagtagagacagggtttcaccatgttggttaggctcgtctcaactcctaacctcaaatgatctgcctgctacggcctccccaaagtgctgggattccaggcgtgagccaccacgcctggccaagaatagatttttaatctattttgtttttcaaaaatcaaatctatggcctgagccttaatgtccattttgcccaattattgtggtttacagaagctgttcactttctctgtggctcatctaatgaagttccagatttagtcaagtgcaggtttctttatgcttgttaccagtgctttagttaaaccggaagcctcttgaagattaatactgtgacttgagactttaatgtagcccagtgtctagtgtgatgccctacggagtagacacaataataaaatgattatggatgtggctttcatgtgcataaaataattttattttattttatttttttgagatggagtttcactcttgttgcccaggcttggagtgcaatggtgtgatctcggctcactgcaacctccgactcccaggttcaagtggttctcctgcctcagcctcccgagtatattacaggcacctgccaccacacctggctaattttttgtatttttagtagagatgaggtttcactgtgttggccaggctggtctcgaactcctgaccccaagtgatccacccgcctcggcctcccaaagtgctgggattataggtgtgagccaccatgcctgaccaaaataattttatacaagaaaaacacctatgtggaaatgttggctacttatttacaggataatttcaaaaggttaggcattaatgtagaacaaatcagacgattaagacttaatagattctgaattgttgttttctgtcttggcattcaaatctggatggtgcatggtcctgtagcttttaaattgttatcataaagacatatgttttcaataatagaagtatattagttaacaggcaaactattgcacataaaccaaatctttgcttaagcaaaattttagatgtattgtaaatgtattaaatacggacttcaagtttagaagtggccccaagaattcccatattaagagcttgtttgaggtcaagtctttcaggagcactttgcctctaacattgtagaaataaatatatcttcccgatctttctttttttctgttacttcctcttgcaatcatttaattaaaatatctttattaagaattgccttgttttgatttaaagatctgggacataggaggacaaccccgatttcgaagcatgtgggagcggtattgcagaggagtcaatgctattgtgtaagtggtttttttttgtttgtttgcttttaaatcaatgtaggcatcaaagaagaaagtttattttagtatttccagaggctcaatttttatctcaggcagtgaaaatctttcttagctaatatcctagtgtaattcccaacatgggatttaaaaaaaattaatcatagaataagatctttatgttttttgtttatggagctaagagctaaggggtgtacatgttttactatcatgtattagtctctaaaaacagtctagttaaaaagtattaaagggtgctgagccttttcttatgacatagtttattttggttaataatttcaataatgtaaatcttacaaaaattaaaaatcaataatactagttgtcatcatcaaggcatacagagaagg

SEQ ID NO: 104453 - DNA, 4000 bp, Homo sapiens
cataaagatccatttgtctttaggatatgaacttctatcagtatccacagaggctttgtgtaattttttagtgaatttctttttttttttttttgagatggagtttcactcttgtggcccagctggagtgcagtggcgcaattttggctcactgcaacctccgcctcctgggttcaagtgatctcctgcctcagcctcccgagtagctgggattacaggcgcccgctgccgtgctcggctaatttttgtatttttagtagagatggggtttcaccatgttggccaggctggtctcaaactgctgacctcaggtgatcacctgcctcggcctcccaaagtgtgggattacaggtgtgagccaccgtgcccggccatgaatttcttaaatatttaaatttggttatttcacttcagatttacctttctcccattcagttccaatgagtgtggctttgctcgtattgtgcactgttgtccccattttaaggtgcagaggtgcttcttcagtagttgggttaaatcattgcttccacaatggtgaacagttcatgtttgttatagctcagccctgtggtgtttcgttaatgcatgttagctgggaaactggtagtgaatttaccctcatctttcaggcttggagaatagagtggtgcttctgatagactctcatgtacccttctgaagaagtgaggacaagaattacccagccccagatgtcaaaagggcatggtgtgaaccctgcaccagccttggcagtgacagcctcctctcccatccctgtgctttagtcacattgtatcactcacaatccatccagagctccacaatgtttcatgccttttaacattcttttgctgttttttttttttaacctggagttctgtggggtggcccccaagccccgggaattactgcatcttttctgtgtattatacttaaaagcgccttgagggcaaacaggggttattcctttttttttttttttttttttgccttcctggcaatttgcatgcaacacctgattgattgtgtgggcaacacataaaaggtggcaccagccgtcctatacacaacttaatttttaaatcagaaaacgcttcagtctctgataattcctcatattctcttgaagttcgggtaatggagtatggtaatgcagatgcagaaaagcagcagaggtcaggcatagtgtgtgccttgaattagctgccttttaaatattgtctctgtttgatgtttagttttttaactttaatgtcttcacttttcccctctatctttagatatcacacttcagtggcttattcagcattcaaaatctagaagaagctgaagcatctcctgaagtcttccagtccttcttggctataatcctagaattattgtccgttcctctgaagtaattcccagaatacggtccttcctaaaccccagaaattgcctttttcagagtttatttctcatgtgcactgctgaagatgaatatccctaatccttcataaagaatcagctagagttgtcatgataaagtcagcacacacaaaaaggcttcttacacatacctgtcttaaaccatgtgtagagctttaaaaacagaaaaaaaaccccatatacttatgaccatcttaaatcaagaaaattgcatatttccattctggtctttctgggccagatttttatattggttttcagtaaatgtctatctataatatttcattatagagtccagtagcttaatactgacactgacttgatacagcatgaagtttctagtgccacacacagtatttagaaaacctttaggcgtgaatgactcatgtgggatatatgtaaacataatgtttattttatctcacaaatgcatgtgaaatgtataattacatcttaggaatccaaaatggtctgcagagagtgagcggaggcaccagatcaatgttggttctttgcactggtgagattctgcctgatgaatattaaagatatcctgctttctgagaactctatcaccagatggcagttgggatatgggaggaactaaagcatcctgttttgtatctgtccagatcattatttctgtctcttgttttttcttcctggttcaggatacttttttaaggggttgagaattgaagattttccaaaagcgttcatgaatttagagcattccacccaatataataaaacctgttaagaatgtcagtctttgttcaaacatctgtttgttctatctccagtcattaaatcagtgctgctgcatgacactcttaactcctgactttttatatccagtcataaagttgactttcagcacaaaagatacttataaacaaataaaaaatttttatttttctctcttactgatgtaagctttggcactcttttgactggtgccattagacatcttgattattgtgacaactctagacctgcctgctttatctaatgtaatcatgctcaatgtctacaggttgtttaataatcagtcacacagagaactgaggaactgatgctgtttgtttgcttctatgatacagagatgtctaaaaacttcaaatggacatgttttgtagtttagcgacttccgtatacataaagggacatattaatactggttcatttgtaaattattattcatatagaccactgtagtagataaaactctatggtacacctgcttatgtgttgcctcacactgtgtgtgattttgtttcttttgttaagcagcacttatgtagactgcatttccaaatgtgttgagcactcagagtgtagtcaacagtaagttcttttaatgaatatcagttttaatttatagactgccatggccttaaaaatattctgtacaatatactgcactgtgttgcacagacactacttgcttttctccattcatatttttatgagtagaatctgggcttttaaatttctcttcttattctttgaagcatgttgcatactaccctggtgggatggatggttctgtaaatgaagggatatttaaacttgctactgttgttcaacaccattaatggtcagtgtgaaccattacaaagaatgtggcaacttgcttgtgcctaaaaggaggaattggaactagaatgtgtgactctgtggggactgcataggtttgttaattgacctatagctaaaccttaatgtgtttgtgtgtctatacattgctttccgcatttcaagacatccagacgctattaccaacattttcctgtgcattaacctctgcatgtgaaaacttttaacagttactgaactatgtaaatatgtgaatttttttatttaggtggatgcattttttgtctgtttactgctcttctcagctttattcaataaacttgcattttaagggttgtattggcaattttaacttaaaatgtgcatcatgatggaaggtgcagacttttttggaagtttccgagaggagggtctatagaccatttgtcagaaatcagatcagccctcaaagaatggggtctgtgggctagttaaaatagaaataaacttttaaaatatccacagaattgatattgtgattttttgggggcgggggaaatgctactacttgtcaacggtcacaatacaccaaatttaggactttaagtggcaagtgctagtaaaacattttatgtcccagtttttacaaatcaaaccaagaccctgctaagcaaatgaagttgcaagacatgcctattcactgacttcagttcagaatggaaatattttaagtaccgaacatgctggttttcccacaaaggcacatttttagcataaagctttttgctagtttggtatcatctgcccataaaataagtcaatacttgagctattggaaaaataattgtgtatatttttatttgtttagaaaggttcagttagcattttctccatacgcatactacaattctgtacagccaacccttagtggccagttggatgcatgatttcgcgtttatttccctggaacgtcacgttgatgtgtttttgt

SEQ ID NO: 104454 - DNA, 1364 bp, Homo sapiens
tgggttggcatttgggagaatgggttctttccttggccattaactgactgtgtgactggtgagttgcagaaccccctcatggctccttaagttttcccatctataaaatgaacaggagaggatttctaaccataacttctgccactgacaggctgattctagcagcctagaaatttgcttggtggttaaaaagagatacaaaaacaccgatttggcctagtgaatatgttaatattacatgttccttcaatagaaggtaattcaaaaatacagaaatatttacatgttacaactttaaattttagcacaaaagctggagattgcagacattttacagaatgatacagtaaatttattttgtttgaaggaaattctgtaaatataccggcttatattttgaaaggcatttacaaattttagaacattttccccagactgcagaaaatgtttggtatgcactccagaaaagtgtatatacctactaccaatttgagggtaggtggtttagagctaaggtttaatcctttataactgctgtgttgctgggtttttgggggtttttttgtttgtttgttttgagatggagtctcactctgttgcccaggctggagtgcagtggcgccatctcagctcactgcaagctccgcctctcgggttcccgccattctcctgcctcagcctcccgagtagctgggactgtaggcgcccgccgccacgcctggctaattttttaatatttttagtagggacggggtttcaccatggtctcgatctcctgaccttgtgatccgcccacctcagcttcccagagtgctgggattacaggtatgagccaccatgcccggccagctaggttctgctagaatttatccagagctttggagaaacctggaatggttagaaaatactactcttaaaagtaaaggggctggaggaccaacaaaaccattgtatccccttttggacttgggaagtagaacattaaccacttgctaattatagcatctcccttaaccaattcttatctacaattgtgacttaccctcagtgttgtacaatgtgtatcacacaatgtgctagcttgtttctgtggcttaagagaattcaccatttctatctactacccaataggtgaattagataactcttccatttgtatattttattctgtaagaaaaattcaaattgctcttatttgtcatactattagctaatttataagcgctagccctcattcaaagaagggttaaggatttatagaattcctatattctctggaagcatcagtaacctaaaggctagagcatggtatgggcatgtgcatgatgaatatttttgatgtatagttcatatatttgtttcag

SEQ ID NO: 104455 - DNA, 1083 bp, Homo sapiens
cagagacccgatccacccaaggccaggcggtctggggtcacgtctgtgtccagcgtccggcgggcgctgccgtgccgctctcccattggctggaagttccctcgcgggccggcgcggctcctgctcgccacgccagcccatcgggctacggaccgcccaggggggcggggcttgggagttggggcggggcccgggtgaggggcggggcctcggggcgtcgcggacgtcctggcggcctactgcgtgggagggagtcctgggccgcgccccgcgaggccgggcccaggccgggccaatcccgggccactgggcgggcgaccgtggggcctggccggcccgccggagagcctgggggttggggacgatgggctagttcctggtgcgtcacgggggagttccttaaaggggaagcgagccgggctacggggcgagcgcggggtgcggtggtcggcggggaggcccccgcgctttaaaataatgcccgcggcgcccgcgcgaccatgcaatggcgagcgctcgtcctggggctggtgctcctccggcttggcctccatggagtattgtggctcgtcttcgggctggggcccagcatgggcttctaccagcgctttccgctcagcttcggcttccagcgtctgaggagccccgacggccccgcgtcgcccacctcggggcccgtgggccggcctgggggggtatccgggccgtcgtggctgcagccgccggggaccggggcagcgcagagcccgcgcaaggctccgcggcgtcctgggccggggatgtgcggcccagccaactggggctacgtgctgggcggccggggccgcggcccggacgagtacgagaagcgctacagcggcgccttccctccgcagctgcgtgcccagatgcgcgacctggcacggggcatgttcgtctttggctacgacaactacatggctcacgccttcccccaggacgagctcaaccccatccactgccgcggccgtgggcccgaccgcggggacccgtgagtagcccccgccgcccggggccgcgcgcccacgcgcttccttccgccctccgcgccggggtgcagccctc

SEQ ID NO: 104456 - DNA, 1043 bp, Homo sapiens
cttaggctgaggatagttaggtggtggggagggaagctatgtggcccacttttggggtccagatacttgaggtgaaattcactggatgccagattgactgtcaacgtcatcgccctgtacgatctgtctataaatcccccgcctctggtggcgtggttgtccgggaaggtcaggcagtcttccctgttcaccagccttgtttgcaaaggctgagctccaagggtcaccactgttgacatcaaagtccaagagggcagtacacccagctaaggacctcttacctgtagggaaggaatgtgcattgccatagaccctgttagtccaaatagttgactcccctcccctggatgggagtggaggagttggtttgctcagtgtcttggcaccgtctggggcaagcattttccttcacctggaggaaagcagtggagtccagtccttaggttctgataaggaagcctatagactaaacggagttgggtttttaaaatggtgtggttatttacacatttatgttttaaattgcagtttgagagcatgatttctaccgaagcaaggggacatcccaagctaaattcaaaggactgagccttttcaaaattctaggaaaccgatgagtttttcttgcttaaccatagcgtttatacgtataagtgtattttctatctcaatttttttgagaaaaaatattaaattttgaaaaaaaagtatttggcctttccagattttttgtttgttttttgagacggagtctcgctttgtcgcccaggctggagtgcagtggcgcgatctccgctcactgcaacctccgcctctgtggttaaagtgattctcctgcctcagcctcccgagtagctgggactacagactcgtgccaccacgcccggctaattttttgtatttttagtagagacggggtttcaccgtattagccaggatggtctcatctcctgacctcgtgatccacccgcctgggcctcccaaagtgctgggattacaggcgtgagccaccgctcccggccatggtctttccagattttaag

SEQ ID NO: 104457 - DNA, 1047 bp, Homo sapiens
cagctgttacaggttaagtatacatgggaatttaaatttaaaaacacatatgtttgattttgttagctacataatcaaaaattttctatcaaaggccatggttttctccatcttttctgttttgaggtgaactttaaaaatttacagtggggtgaatgccatgaacatttgtacctggtgaagtaagtggagcgtttagttgtgcggttcagccagctggttacagggaaaggtattgagttcttgctggatgaacttaaaggtatcaggttaggctggagattgacaagaatatctacaaagaacaaatccagagtctgagctgcatagtgggctggcataaatggagtcataataatttcatgctgttaggccagtagagttttatggtgtttttttttcttccttcatcctcactcccacttcccccttattttggcaccttttgaaagaggatgtagcaattatttggtaagaaagaattaaaagtgttctaatgagtaaataccccagatcttagagaggatttgtctgactagagtggagagaagaaaccccacagttactgcaagtaatttttttttttttttttactgtggcagctcattaatttttagtgactgggcattgtaaaaaatattttaaaactgggtctattttagttatagattacaaggcaaagcacaataaaacatagaaaggagttcagtgctcacagtgagtaccttccttccatgggcctgtgcaggtggatagaatgacacatgccgcagatctgggtgtgactcaggagaggggagttacatgtggttctcctgattaccatctagcttggatgctacatgatgagggagctgttttctgatgaggtgggctgttgaagcccactctgtttctaagcggcagagcaacagagtgaaatatttacacagagcagaacattcttgagttggcagaattgggcgtaaggatctccctgtctcctttgagcccctcctgcaacccttgcactttttgtaccttttttggctgtcacttgcgcttgag

SEQ ID NO: 104458 - DNA, 1069 bp, Homo sapiens
gattccatatcctcgggtgggtagactggtttgaccctttgtgtttgacaattcactatcttcctgaattaaaattctttgcttactaatttatttgggagaaggaatgggatggaggtagatgagaaaagcagtgtccttagaagaatttggccttaaatatgatgtaaatattttaaaattcattcagcatttactgaacatccactgtatgaaaggcaaacagtgatatatctgacttattccttccccttaaagagtagatgttctgtgaagttcagtattcttaagtccatttacatgtgtgatttatattctctgctacaaagcagtgtggggagtttgtcttcatctctgacttgggtctgttttcccagagatcctcacatgggtattgcgggagctcagtgagtgttcttttcaatgcttcacgtggatctttcaaataaaggctgcacagaccagcaagttagctgctgatttaaatgccaggatctggaattagattatatatttgtgacatctgatttgccaagcccagaactcctctgggaattgagtcagccttttaggtaactgactgagaactgccagagcacagagccttcatgatgaaactggctgtcatattctggtagtgcctcctttcttgcccagtttgaggtttgtttaggtgctgagcaggagtgagttcatagtggttcatttaaaatttagaagaaattctatagtttgcctttgtctctaaccctaaagcctggtgcctgtgttaccatgaagaaaacctgctggaaagagaaggtttagtgaagtgttatagccattccctgaagacttgctcttattaataaagcaaggctctgctgttcttattgtcttgtttgtgtcttttaaatttaattcccgtattcacctcagatgtatcttggaaggcagagggcagactctcaccgtggtaagcttggtttattagctgagtgtagtctctgagacccggcttttcagctctgtggattccttgagttttgtcacagtctttgtctgttcccatccccaggtgaatctaaag

SEQ ID NO: 104459 - DNA, 1110 bp, Homo sapiens
gaatttatttatttttgcttttcaaagccacaaactaaattgagcagtaatccccaagggtcttgctctgatgcatttctccaggcccatgctgtaggacattactagagaagagactctttgtaccaaaagaaccaagcttttctgctcaggtgaaatccagcataggcccatactatatactgaattctcttatgtggcagggctcttaaacccaaagctcaaagtgctttctgcagaatactgtgaaatcctgacatattacaatggctgcgttaggaactttgatcctgtggaaaatattatcttctgctagagtctaatgtagataattaaaggcagtctgtctgcagaggtttaaggaatgagttaggagaaaaaattaatgttaattccgtttaaatgaaactaccagcagctgctggagaggtagagatctgtcagtgagctttcttttcaccactgaatgtgctgcttgggtttgcaggcgggaagcctgcaatgaaggagaaggagaccctccactctatgtcaacgtgaacatgttcagtgggcagctgatgaacacctggattgactctctgcaggcctttttccctggactgcaggtattttgccatcagatttcctaagaataaccaatcaccagaaagggcttctccctccttttctttcttttttaataccctgagcattctctgtctcctttggatttgggaggtcactgacactatacgtcttcatctctctgtttgagaaattagtctccagaatattgaacagagccattccacacaagtgcaaaaccgtgcttgagaagtgactgtgtgtgatttttgtttttgtttgtttttgttttgagatgaagtcttcctctgttgctcaggctggagtgcagtggcgcaatcttggctcactgcaacctccgcctcctgggttcaagagattctcctgcctcagcctccagggtagctgggattacaggcgcctgccaccacatccggctaattttttgtacttttagtagagacggggtttcactgtgttgtccaggctggtctcgaactccaggccttaggtgatctgcccgcctcagcctctcaaagtgct

SEQ ID NO: 104460 - DNA, 1032 bp, Homo sapiens
gcagtagaatattatcactgtaatctccacatacagagaaaactgtagtcagtattgaaatgtatgtacttataatcttttaaatatttttatatatgatgtgtgtatatatgtatatataagaaacatactctatatttcaattttgtgacatgcttttttttacctgctgtaagtttttttttttaagtactatcttaaataataagtcaatactcaaataataagtcaattctcaataataagtcaattctacaagtattaggactagaaatttaaattagtccttttacatttgttgccggtcattttcctggtgccacgttatgcttctggccagcaccccgccaccacgcccacaccctctaactcacctgataatttagcagccaaaagcacttgctaagtaaatttgcaaacaacccaggctataaaaaaggagagcccctcaatgtaaacatagtttcatatggtgttggatgactggttgattattctgataagagaatgtttctgcttcttaagtgaatcagcaggtgggaaggaagagaggcaggactgaccagatgattgttttgtaggtgtgggtacgccacgctgcatcacgtcattgacaagtccacagaagaccggatggagagcttctttctcagtgagacctgtaaatatttgtatctggtatgtgtgttgcaagatgaacccaggaatatttagtattgcttagagcaagcattcgcatagtcttccatctgacaggtacttactggctaaagctatgtgctggacattgtgcattcccaggatgcaaacgctgtcagaaccaaaggatattactatcttctttcatggtttccaaccttgttgaaaagtcatttgtcaagtaaaccaagaactgaacttatgattacaaactgtgggaaatcctggtaacgattgatacagaaccagtgttagttctgtatctaactacaggtggtcggggaagacgcctctgaggaagagagctgtgttcataatggcttctcacttctc

SEQ ID NO: 104461 - DNA, 1060 bp, Homo sapiens
ggtggataaaacttggtccctccctgtcagcatttacagttcagggtctaggtgtgtgtgaggttgggtgtagttctagaattccagcaggagaactcttaggtagcacatggaaatcatccagtgaacttttatagactacctgtgcttgggccttagtttcagaatttctgagtctctgcgtctgggcagggtatgtgtaggggagaggcaggtctgggcatctgagtttagatgaagcaggtgattctgccttgcagcctgggttgggcaccacagttgtcagtcaattccttttcacccagttgtcactgagaagcatgaggcccaagcaaattctactccctgagtagctgggacacgcccccatgattcagttcccagtgtgctacaattattggttgtatctttttctccgttccctctagctgtttgatgaagacaatccagtacacaagtctggaaccagatacatgttcacaacagagggacacattgtatctgtggatgagcatcttcgggaattgccatggaaggaattcttctctgaagagggagggcaggaccaagggggaaagtctgtgcacaggccgaaacctcatgagttaaaagtcatcaactccagctccaacgtgagttgctttttccaggggtgatttgcatatagaggaagagaagatactatgaattgcttagttgttcagacttcctgacagaaaattgatggtgtatgcagattgggagatttgaaaacacctcctaaagacaccatttacatagctgttgtcagggtatagggaaaccgcaggagcagcggtggcatcatcactgctggctgcaggtgctggtggggagagtggctacaggatcctggaaggggggagccttgtgggaggagcgagcactcagcaggagccacggctcagatctgactttcaaggccttgcctggagggagccggcagagtcaacatgtgacccctccccgctcccccagttgcctgctggagcatcttcttggctgcctggggcagaagctggaggccgagggagcctgttga

SEQ ID NO: 104462 - DNA, 5325 bp, Homo sapiens
gatctgccatttctttataaagtgagtgaggatgttaaattatgtcactggtcttcacctgagggtgattttgctcctcagggaacattggaacagcgtctggagacgtttttgattttcacagctgaggcgtaggagttgccactggcacctagtgggagaggcaaggggtgctgctgaccgtcctgcagtgtacaggcagcttccacaacagttacttccaaacgtcagtagttcacaggctgagaaaccctggattaagtcatccagtcacatttcctgagagagcaacatatgagtttttaattttccctcgtttttgtctttctagtgcaatcgtgtacctgatgagaggaggtactccctgcccttaaagagcatctacatgcgacagattgaccagatggttggtttgatttgatctgctctctgtgaggcctcatcttgaaccagaccttaacgaccaaacccagaccatgccaaagtccagtctgaaatgaaaggggacagaagtcttgctgtccatggtggtgtaggaatttctgtgcaacacctcaccacgtctggttaatccttgcacacttcagtgtttctctcctgttcaataaaatgccctgttaaggatataatttgaagtgagaagatacatggaaattgccctcttatgacatgttgatgttataagcacaatagatggggcatctttggattgatgttcacagctttatacttcagaacctaagtctcttcactttgctggcacctgctatactggagtattgctatgtctttaaaaaattttttttattatattttatttttttgagacagggtcttgatatttttttgggacagggttacctgggctcaagtgatccttctgcctcagcctcccgagtagctgggattacaggtgagcaccactgtacctggctagctacttctttgttagaggattgagaatgaaatttctgcaaaagggcccatggttcatttggtatccctatttaattgcattgaaaatgtcatcctttctgttgttagataattggggtcttcccctgatatccaaccgtgattttggatcacatgggagaaaaagtcatccagtttttcatgtttgcctcaagtaatctttacagtgttacaaattatttgcttaagaagaatggtcttaaccagaattcttaacagatagtctcttaggttattatgttatggtctaagaggttaactgacatcttttgggtggtattttgcattttgaatatgaacttacctgaggaactcccatagttccagaatcaggtgccttttagggagagaacaatacctaagattgtctgagcttccatctttctcatatttcctaagcaaggattctcacttctgaccatatttgggttagagttctgttttgtttctgttttctgtgtctagtgccaattagctaaatcagggagaaagaaatgatcacatgacttttagcatccttgagccatttctctgtgtaatacaggctttagattagtgccttatattggttttggtttggggcactggatgtcgcagctactgctatggtttcaggaggcctgtttagccacatggtgagaccgtggtgaaagggggatggaaattgcttggccagtctttgcctttcatcctgtaaaagtaagcatgtagaaggaggaagttgtgctaaaatgcctttgtttttttgttattattttcttagccagaacatctctctttgaactcacactgatacacacctgctactcttacacagtgcagcagggttgactcttagtctggcttccatgaagcgtcatgggtggaaacgcattctagtaaaaaaggtaggaaatccctaaaacttccagcctcacatagcacggttctcacctgtcactgttttcccacctctaaggatttcatgtacatcttttcaaagctagaaataagcactgtctaagtttatgttgcatttttagtcaaaagggagaaatcttattccttcttgaaaattttaagtgttatggttttatatagttcagttctttgagatttttgaaaagagtattttcagtaataaacgtgccatctctatctcttaaacatttattacaacaattgttttaaaatagaaaaaataaaatgcttctattttaccttttttcatttcagaagcattattctgtttattaacagtgtcccatctactgaatagaaaactttgagaataatatatatatatattttaaatgttttcactgactcattgaaaatgttaattacacacacatgcatgcatgcacacacgagcatacttgtacctttgtctctgggcaaacaggtgggactgttagtgacccatttgggaaaatagagcatctcagagaaggaggtgagttcttcctgcctgtgatttctcttggcgctcccctcctctcccgctctggcttctgtggcggcagtggtgggtaagcactccagtgttctcttaatgaggcactttgcctgtcactcgagcaagcctgggtgttccttcctcctcatgctcctggaatagggaatagggatctcatgcttgcaaactacacaatgctgcaggtgcttcccaggggccacaggctgtcaggaaacgtgttttatgttaagtcacaaacccacttgacttctgggtactggaattaataccagtgggtgagactgagggtgagtgagttagtacatattaatcctggttgttgagcttccagactaccccgtccaaagtttgatgctatgtagtcagtggtttgtggggctggatgccagaaggttctttgagccagtttcaaaggttacttgttttttttttttttttttaaagtcagaatgttaacagctgtgatatatcctgcagggcttttgcagtttcttctgttctgtgttctgaaatactgggtagagaatggctgaggaggagattaccagagaagttgctttgctcagtgctttgccccaggattgcctcaaatctgagtggacttcatcctttgcggcggctctgagcctggcccatcttcctattcccacgtgtagctagtgtctagtgtcagctttgctcagtgtggtggaaacattttgcagaactgttgtagaaagctgccttatagttggcttgacaaagcataattctctcataacaaactttcaaatcattacagtagcttagctactttagttgatgtgaccgaggaatcccttctagaatcataggtggcaagggagggtttgctagctctccatttgcactggccattgtgaaaaaccagcttctgtattcaaatctttccttcatttttttaaattttttttttggcagcgcttgtgctggaacttactcattgtaactgaatcctcagggcttttcttgttttagatcatggactgtgcacgtgacacttaaataattttctatgtatttaaagaaaaatgcaccaggatggtgtctgtgcacgtgactattagaggagcgtctgtagaagtacctggtttggtcagtgcagttgtgcaatctgagggccttgtttcctcctcccctttccccttctccccaccaaaggaaaatatccctcttaatgatttcgtagttcagtttactgaatgattaccacctgtaattcctctttggattgtgtagactcaacatgagacattcctttctgctttctggagggcaccaggggcctttctctttgataaattttttttgtctgttgacaaaaacaaaaatcttttttcaaatgtagtgctggtgaaaaggtagggctgagtgattaccttagccacagggtggctgagcaggaactttagaagaaaatcctgagctttcctgtccattcccagcatccagctcctattctagtgcctcttccctgcagggcagggaccccttgggaaatcgaggaggtgggacgggctgggccctgtgtcccaggtttcacagggctcagggttatgctcccgcttgaatctggacgtgaatctggtaaaaatatcaagtacctgtggaactccctgattctataccctcttccttctttctgcaaggcagaggaataatatttttaaaggttattttgttttagttttaaatagcaaaacacaagctgcatttttatttattttgcataagaaaggtaaatctttttacaaaaaaaagtatagagttggaaactctgggaaaacttacggaaatacacaaatgcttctctgtaatgtgcaatatgctttgcaactgtagatgatattttatgtttaatctgtaaataagaaatgtatttaaattaaaagggatctttttgtaaaaggaccaaatgttcttttataaatgtaataaggaatatcttgctctttaaaatttattaggatttttatgagtaatttttattaaaagatttctttttttgagttgtcatcttgtttcttttttacattctcatgtacattacattacatgcaagacaaatgggagaaaagtctctaaaggaagtgcccatctagatgaataaaaccttgctttttatagctaagccctaagtaatacctcccccatggaattccactacatttttgtatgtcacactcttccattaaatgcccctcacatgcaggtcagaactgcttttcatgacttttgtcccagccctggccttcccctctgcatcagcctcctttctcttggccactgagttcattgtctattcttattgccaattagctgagtgtatctgggatctaaaaccagttctctgcgttatctaagcaaggcgcttcatttctcctcacctctgagagcagtggcacttcacggtctgtgtgggtgcagaggcccatgggaagcgtgtgggtagagggttctggagggctggcctccctccctgtgtgttgccactggggaccatggtgggatcctgaggaagggacctgctcctgctttgtgacatctgtgtcccagctttggtcacagacaattttgatacgggtttttttttttttttatttgagacagagtctcactcagtcacccaggctggagtgcagtggcacgatctcggctcactgcaacctctgcctcctgggttcaactgattctcctgtctcagcctccctgagtagctgggactacaggcacgtgtcacgacaccaggctcatttttgtatttttagtagcgacggggtttcaccatgttggccaggctggtgtcaaacacctcacctcaggtgatctgcccatcttggcctcccaaagtgctggggttacaggcatgagcc

SEQ ID NO: 104463 - DNA, 1098 bp, Homo sapiens
ctcacagtatttggggtgtctcctaggtcctgcaggagcagtccgctttcttcagagggtctgtgggttcttgcagttgatctggagctaaaattcacaatgcaatcctctgcccatattaacattttaaatcttgggttgtcagctttgaacacttgagaaggtttagtctaatcacctttatgaacagaaaagaagactgaaggctagaaaagggaagttattttcttggataccaaaaaagaaatatttaaatcatgactcttagtatgattatgtctagtattgaatttatgatgatatctctgggtcacaggttattgctaagacgtgtcagaaagtatttgtagagtatacacagcttattccacttgcaatgagtttacttatttttaccagaatttctggtataaagataaaaaaaatcttaaaaatgaattaagaaaaaattatatgacaacatacaacttgggatagaagacttttgagaagttatttttattgaatgctataaattatttttaagtcatgatgcttgataataagcatgttacatttataaggaaatagtggcaatttcttgaacttacactggtcgagaagctacatgaaagatttccttcacatttctgctttagctagaaatgctgagaattaagcttcttcaatgaaagctcatctcattccttttccttagcgtgggagatctaaatatcccattaaaaaaaaaagagagagagagacaagggaaaggaaatgagagtataagactcagagcaattgcagaataggatattttaatgccctttgtaccataacttccagcaatcctatcaagagagatttcatgagttatagtagatggagggaagtgccctacggacagatgaggtctgcttcagactcagacgtggatttgctgtgtggcctcaggcaaattatttagcctctctaagcctcagcttccttaggtatgtttgaaatggtacttctggtgccttattttataggttggtggtgaggcttctgtcagaggatccttgtgaatatgctataaaatagtaggacatgagaattagaaattacatagctaggcta

SEQ ID NO: 104464 - DNA, 1132 bp, Homo sapiens
agcttttctttccatccaggcaatggggagaagagcacaggggagttcagtgactcttacacagcagctgttatcgccctttattatttcagcccaacaagggaagctttatcagcatcttccacggtcttccctgggcgcaactggtggagttcaaggtagaaaaggctgtgagattatgtgaaccatctcccatacgacatccctaggggttgaaaactctccaaggccttcactcaagacccaccgattcatcaactatttttacttcactcagcgtcgacgagaaagtggggatatagtggtgctcagaagtgactgaatgcgggagttgagactggaattccaaaaaactgcactgtccgcttcccacctggactgaagatcagtagccatttctttcctttaggcatactttttttcccttagaattgaaattcacctttattaataataaaaaacacaaattcagaagtaggttagttcactcacatattatttcagtgagtattattgcacagtcacaccaaatagttcatttctctttgttacaaaaaattatttgtttgtagctaaaatatgttcatgcatcattccttctactcctaccctcaaaattccattgtcttttaaattccattttcttctttattgtatttggagttccaggtggtatatctgctgttactcacaaacaaattacttttctatggcttaacagaggcataattgaatataaaaacaaggtctataaagtaatttcagtactctaatacaactctgatttcataatgatagagtaaaaagcacaagagtgaaaattcaagaggactcaatagccatgtaaagaccaactggcagaatgagtgagtgttagtacataaaggcacatcagaaacagtgccttgttgtttcccacttttcctaaaacatgtaatgagaggtaataaaatggaggcatttaaaatgtttctgcagcttttcaagtgattcttcaaactttctttactcatcaacattaatgtcagggattagagaaatgaaatagctacaataacattcaaaataattttatagaaaattttatttatttaaaaagtcttcattaaaatgtgttttcttattcccaaat

SEQ ID NO: 104465 - DNA, 1027 bp, Homo sapiens
agagcaagtaatagagtcattatttcactgatcctcacccaatttcaggaaaatcatatccctaaaacagcaattctgactgataaatttttccatgtctaaacagaaagaaaagtgaaattatgggaatcctatgatagattactatacattgtgtgcttttaatagttcaacactggtaatgtttgataatcaagagtaaattaataggctaacatttagaaatgtatactttaataagtataaagtatataaacaattaggtaagcttgtggagaagttgaccaagatacataaattagaaaatacaagtgtccatctaaattttctatatttcatttttttcataatatttattaaaggcgtttaatgtatagtttctcatctgccattttgggagtcctttattgtaaagacaattctattgtttgatgacaaacagcaaccaccatggttattcaggacctccacattggataaattcaatttcttcttgagacacaagtttgcttctgtatttctgaggtaatgtttttattatttctgcagtgtctggtggaccctgatacattagcaaatctggtgatgtatcccttagaatgttgtgaaattacagaagagtgagatggtagccctgctgatctcaaagcttctgatacattgggtttaggattgtctcttctgtcaggaaaccttattaatggagtgtgtggtttgactacctgaacgaccctactggcagacgccatcttgctgccaatcgtcacccctgagaaggggcagtttccagtcttgccttttaatttatgaaatttgtgacaagtatggacttgaaggagcatttccaaactgtgggcgttttaggcccacatcttgcatctgtacatctttgagaagtacacagagaaggactgaagatgagtaggtctgaatgggatcccagcccacacactgcttcttcatgcagttagctctttcttaagttcaggaacttaagttggaacacctattctgaccagaccaacat

SEQ ID NO: 104466 - DNA, 1034 bp, Homo sapiens
tctatgttacaaaataacaatagatcaggactctggagccctgcattttgatcctggttctgctaaaaatgtggctgaccatcatcttgcaattcaaatttgtcatgatttactgggggtgagtgataaacttgccctgcatatcagtcacacatcccacctgatggtgcaatggggccgttcccttctttgacagattaataagggagtggaaggcacacatgccttagtcctagaaaatctgcatgtttagctccatcgcaggggcaagctgggtgatttgaacaagatactttggagtctctgggagatggggataatgatcttaatttcccctgtcttacacagtgtatccacttgtttgtctctgtctgtaataggcagaattctaagatgacctctaaagatctgggcccttgtattattccctctccattagtatgggtggtacctttaacttgttctgaaccaatacaatacagccaaggtgttggaatatcactcccagaatactgttgtgtcttatgccaaaggtgaaaggatttttcagatgtgattaagatccccaataaggtaatcaaaagggaccttttcccaagggagcctgacctagatgggtgagccctctaaaagacagtatagaagtgagagacaggagtcatatttccttctgtcctgctgaccttgaagaagtagccaccatgagttctacatctgcaaggaaatgaatctgccaacaaccacgtgagcttggaagaggacctgaggctcagaggagacctcatacccagctgacacctggctcagaccctatgagcccctgagcagaggacctagctaagccaggtctgaactcccaacccatggaaaccatgagagaggaagagtattgttttaagctgtgaaattagtggtattgttacacagtatagaaaaccaatgcactatcttccccatcactcctggttctgttttaaagatttaattctcttggggtaaaaaagctcggtacctatttttaaaaagtgaaagac

SEQ ID NO: 104467 - DNA, 1036 bp, Homo sapiens
gaggcagtatttgataaacagttggaaagtgatatgtatccaggcagcagattaatgtgaggccaaagcatggaaagtgagttcctgctgcagccccctggaggtgtcacgttaggggagaactttgtctccaggagctgccaccaggaccctttcaaatcttgccattgaatttagcctggcatccaggtttctttgtgatgggtcccttttcagccacatcttccactacaacattctgctgccccagaatgtcactcattccctgaacatacttttcttccttgtgggcgtgctgagagggtttcctcctccacggccccaaatcccaccccttcctcagtgccctcctccataaaaccatcagttctgactaagttctctgtcctgtgaagtcctcgtgtggacttactctcctgctgaatgcacgtttacttttctgaatggccctgaagcatctacagtggctgtcttgcctgcttaactcctgtaccatcatatcctgtttatgctgaaattctccatgttatgctccttgagaacagagaccattccgtcttcccctttgggtgtgccctggaaccctggcacatgttatgggctcagtgataataatggatagaaaagggagtgggatggaatcgggaaataggagacggaaaggcatcaaaagaggtaagagcagctttgttctcctttctgacagggacaaggaattctgaggggttagaaagaaggaaagagaccctaagagcgggggatacaaaaacaaaacagctgtggaatagaggaggggagaccattaacctatttaagcacccctcagtgtggccccttcccattctgcaccaagatcagaactggcaaagtaggagtgggtggggggagtggggaggagacttcgtggtagcatttaggaggaatcttaagatgaaaaggaaatgaaagtgagagaaattggggaagccagcgcaccaaaccagaccctgaatttttttatgctttcaagttttattctccttcttcaagcttgtct

SEQ ID NO: 104468 - DNA, 1025 bp, Homo sapiens
ggatggctgcagagggaaggcactcctgcttggtccaattcagaaacgaaaaaagtccttgggggagtgtggcgggggcagtaaagatgtgaagaaggagtttagcacttcctaaaccatttcaaggtagagtccaccaaacccagcccagcaagaattgctctgggaagacccaagcagaggttagctggtcccttgtgcctttggggtatgcctcggggtttggtggatggggtgatctcccctcactgcaccaacttcgctgtggatgggttttggtctagagtggcccctgggacagaaagagaggtcattctgtccacagtacttaaaaaccaggacctggtattcatatctgcacaggaggaccataagatccagctggagttggattcgcagaggttttctttctttttttccactgaggattctgaggttaagaatgaggctgccacaatgcagcgtccctgggcagcattcatgtcagcatctatgtggatggcacctctggagtgtgcagggaacagactgtaagtctgtccctgcggccctgggagaggaaagttaagttctgtggagcacatagcaaagaaagagtttttatcaccactgctgtagcgttgccttgagcgctcagtggggggacaaagtttggaaggtgttttcgcagcaatactgacttccattatgagatgggaattataaaaataactacgtatgaactgaatgaaatcttttttatttaaatgttgaaataaacctaagcagtaggtattagtatctccattttgttgatcaggacattgaaggtaggcaatggggcaacaactaccagatggcaggatttgaactcagatctgcatgaatcccaatcccatgctcctaatcgttctgcagtacacagggctatgagctttcagagcagaacactgttccctgactccattccctgacagttcccaacctcagaggagctcgcaccgtcttctggttgctagggaccttcaaggtcctccaactcaggc

SEQ ID NO: 104469 - DNA, 1034 bp, Homo sapiens
acatatctctgctcccccaccgccaccacctccccacagtgtctgatacagtagatctggggtggggcacaagaatttgcaagttcctaggggatgctggtgtggttggggccacactttgagaaccgctgttatagactgtttaaaaataactttatacataagctcagcaaaactgatatcaccaattcagttcagttacaacaaaggctcatttgaattcctgggatgtttaaactcaacactattttttaagaaagaccaatgaggccattctcaggttacttcccctattaaggagctagtatggtcaaatggaagttctttgggactatggtaaaaggcatggagaagaatgctttataattagcatatcagttgtttcttgttcatgttcccaaatatctaagattggagcttgctcgtgagaacgtttccaacatttgtcatgtgaccttgtttgcagactatttcccacctgggtagaggatgtgtgaaacaaacctttcagaaatagaacaaatgggaagtttcttcctgtgccagtaaagtgttgccttgttccttattctaatggcatgagattcttaattgaaatgaaagattttgaatattggggcctttgcaatttgtaaacacctgcctcaagaaagctgaggaacattttagattcagctgctcaaaagctaagaccctgcagagttgtggggttccctcagccatgggtgtttaagtcatgttggcaaatttcttggatacccttccaaccaacatagaatttaattccttttccatgaatatggtcccaccttagtgactcaattctatagaacagaacatggatgaagtgatgctatgcagctcccagggtagtaataaaggcagtgttttcccctgggctctctctctcagtacacacaccttgggagccctcagctgacaggaaagaagtcttggtatcctgaagcttccatctgagggcaaccacgtggagagacctcggaggtcaaggaggtcaatggagggtccctgct

SEQ ID NO: 104470 - DNA, 1050 bp, Homo sapiens
tgtgatcacagctcactgcaaccttgacttcctggtcccaagcaattctcccacctcagtctcccaagtagctgggaccacaggtgcacaccaccacacccagctaatttttgtattttttgttgagatggggtctccccatgttgcccaggctgatctcaaactcccgagctcaagcaatcctcctagctcagcctcccaaggtgctggcattacaggcatgagccactgcacccagccatatttctctatttttcaaattctttccagtgagaatatatttgcatatattgcttgtgaaaatagttatctttaagactttagggaataaagaagaaagagaaaagagattctactgtggccaccaggccagcagacatggtgccaggtctgaatttccatgtcattctataaatagtataaaatctgctgacttaacttggtgtggaatggcatgagctggccatatcgcaggaattcacagttgggaaatcctagtgaaatggcacaaagttgggattcaggaggaaggggagtaaaggagaccaatccaggagagaaatgatcatcagacaaggatcaggttgacctgtggtgagctggcatctaaggctggcctgagtcctgccagaggagaaggggggacagtggctgggatggagaacacggaactcaggtcttggcattgaaaatggggaatgggaggtgaaggtcagaggcgcagaaggaatattccccaccctgagcctcctccagcctgaaccccggccagtagcccagaggtgagtggcaaagccacgtgtccatcctgtgtgttgctgcatggcactgttccctcctctggtgctagccactcaaaagcacttccagctcggtaccccgggagctccctgcttcatgccacaactcactgcacagagcaaggcaggcctcggcccacctgtcgctgcttgtcaggaaacactgctgggcctctggtctatgggccccagctgtcccaaaggcaaggcctggaggcttttacttttgaaatgcagctgcattttcctc

SEQ ID NO: 104471 - DNA, 1020 bp, Homo sapiens
atggtccacagctcatggggagtcatcaaaggtgtgtgagcacatgagtgacagcagcagacttgcattctgcctgtgctgtggagaatggattccagggggaccattcagtaggatattgcagtggtgctaggtggaatatagttagacctgaacaaagcaggtgaatcgagacaagtggaaggatctgattggtggggagaatcaacacaagactcccaggtgtctgacatccatggataaaaaggggcccctgagggagcatctgggagaggaggggacggatgaagccttgcccaatggacatgttgatttgaggtgttcattatgggtcgccaggtgtctgggaagcagaggaatgtatgggcctggaaacaaggagaggaatctgggctggagacttggattcggatgcccacacatgtaggtggtaggtaaagctgtggctgtgaatgttgtcatctcagaagacaaggagtaaggggatggattgacaaaaaaggccttcacaagggagactggaaagatacagctgtggaggcaggagaagtctcagaacttagggcttaatacagcgtgcatggctgggatctttgcattttaaagagagattggggaaaggatagtgctaacaccaatagcgctaggtttgtaatggtgaaatctgggggctctgtgggaggaatatagggtaactgcctatacacatgacttaaattgtgtatacaggcagttaccctgtctgtttgctggcccagccagttgtcagcttgttggcagcctctgtgatacctgagtgcctgtttgggactcagggaggccccagtagcatcaggaagccagctgcacttgttgttgactcttagcacgcattatacaccaacagcatggctgaagtagaatccagggttgcaggatgggcaaagagagagccatctatgcttctcaaatgtcttgtggctattggacctgtgaagtaagcctcttcccagagtccttttctgtttctgctcctcctta

SEQ ID NO: 104472 - DNA, 1027 bp, Homo sapiens
agacatgctggcctctttcctgaatgcttggaatttatttttcaccttggaaacagaaatttcacatttgacaagttaaacaatacgacaaggccgtctgtttactcattcatccatttattcttccgttcatttattcatatagtgttaaacaatacgacaaggccatctgtttactcgttcatccatttattcttccattcatttattcatgtagtatttcaaagcctctgccatgtggtaggtattgtgctaagcactggggaattcagggttgaagagatgcctcccctggccttaggctgaataagggagttggttaattaaacagctccagtaccgtgtgatatatgtggtggtcaaggtatgttttcaagcactgaattggggaacaacaggatacagggactctcagagggagtaatgaatggattatcagaggacatgaatttggtgtagaagtttattatcaggataagagagaaggatatatgaaaagttggggcgacatggagagcacaggaagtttggaagatgatgactggcatgactagagttcagggacaggatggaggatgagaaggaagaaggccaggaaggcaggcagggaccaggcccttaactcacagtgagaagttgtgggagccttcacctcagggcatcagaagtcatttaaacatttcagcagggagtaatgtgatctgattcgtgttttaggttccaaaaggtcagagcagagagaatggatagggagagcggaaactggaatgaggaaggcaaatgaagaagagtgtttgagctgggacttgaaggatgcacaggattgactgagtaaggatgagagggtgtggcatcccaggcaaaagggatggcaaaacttccagtatagaaattgggaagcagtgggaggtcaaggtaccagtgaagagatcaggctgattagaatccaaggaaggtcataaagtttggaagtgggtggcacgcattagggggacatctgggggctcagaagcctgtagaaccaagt

SEQ ID NO: 104473 - DNA, 1074 bp, Homo sapiens
tcatgacagcatggcaatttcattccctttggcagtaactggtttaggcatgaccattcagtagaactatggtcatggagatgtgagaagtgttctagtgggcttctgggaaaggcttccttattgtcaaaaggagacaaactcaaggatggaaagtctgttctttttctggacatcattgtgtctggatgtgatgctgccaagggggcaaccatcttaccaccttgaagggagtgagtccaagggcagagcctcagactaaagatggcagagcacaaagatggagagaattcacgtccttgaagatggcattgagcagctgaatttgcccatctggctctggaattcatatgttaaataatatatgtctttaatgttattttgagatggggttgtctattacatgcagctgagagcatcataccctaaacaaaggaaaccgagagaggacattcagaggagtatcacacacccgggacttttactgagtgtgaacgtccctcctcaaaatggatccctgctagtgggacagtcggccatcttcttctgccctcaaatgttttctagcctatgtccagatcggggcaatcaactgggaacctctctattttagacaaattcctttttttctaagaccagctggaattgcacaggagaattattaactaccacttaatgtattaaaatctgccgctactcagcccgaggtcttgctacacagagctggccaagtgaggagctgctctgttagcaaccaacacctacaggcaaagtgtctgcctttgagactttaggtttcatgttgacttttgaaagccctctgtctcttccagtgaacagcacacaagcctgtcattgtagcttagttttagttggaagataaccatctatcttttctggaagataaccacctatattttccagttccctctgggacctccaagagtgaattctgggtaaatcaaggagcctatatttaatgttgggccagctaacatacccttcacatttactttaaattcatcaagcacttaaaaaaaatacactgtggttaaaagacaaacttacttttat

SEQ ID NO: 104474 - DNA, 1731 bp, Homo sapiens
agcattttagataagggatactcaacttgtatttaagatctctgaggagaatggctaagaaatacttttatagtgtttcacacccagtctttggatagcagctggatacattttctggcaagattctagagctgctcttactctagtgctttccaaagaagccagctggcttggtgtcaaatgaatagacagcaaggctgacatgctattgtaaatgtcttttcttgaatggggttcaggtaggcagcaagcagggagttttttttggtccccataatataactttggaattacaagcacacaattgaaaccccaggattccacatgatgtttatttccatttgggtcacataagaactgcatcacagtcttaaaagaattgtatcatatcttttatgtaatagctgattttgagcagccctgactctcatgcctaataagtcttcactgcaaaatgcactttctagggaacattattgaatgagctattttaatataactatttgaattttaaagagtatctactgaaaacattttggcaacataaatattgaatttctgaaagcatgacatctacatagaatcatttgttttctatttgcaatacgtggtattgtgttacttaggttaaaaacctaaagaagggggtggggctaagagaacctatggtggcacaatgtaaggcccaaatctgattgtcaagagactgaccttacccactttgtcacagttttgtagaaatacaggcttcatggaagcatatttgtctaaatgtatttggggaccattgctgatttctatccagaaagggaaaatagttgaacaaatgctaaaagtcataacctggtcaggggctggtttttgttttttttctagcaaagtaaaagaatatcgtagtgatgaactgtgggatagttctgttttaaaccagctaagctcgtccttcatgcaagatatagtcagagatccagacttctgtttgttaagttgtgatgggcaaaagtacttactaaagggtgctctttagtaagaatggaatggaacccagaagaaaggggtggtatacaaaaagcagtggtgagcaaatatgttggtaaacacactggcaagttttaagtaaatatagatttaggggtggagagtggagagtggttaaaacaaggtggaaataaaatagtagataatcatgtgggacatgggagatcagaatatcaaggcattctgaagctcttggtattagtattgtttgggaggcatcgacctactttgaactcttaagaatccattttaaggttttaaaggcaactcttagtgaacacctgtttccagaaaatgggtttcaggaaaacttggtaaagccacggaggcagaaaagattagaaaaacaaggaaaagcacagtgaatagaaaatatgaaataagatggtccaataaccccaactatatcaataatcactatccctataaatgattacactgaactcttaagagtagctagtattaattaagtgtgtagtacatgccagggctaagggcttagccagtgttaactcagtcattgcaacaaccctgttttacagataaggaaaccaggacaaaggttaagacatgttcccacaataatatgtgacagtttcttaggttggatttttaggaaacaatctagctttatgcagtttacaagaaacaatcatacagaaagcaaaaaggtaggaaaagataccagacaaa

SEQ ID NO: 104475 - DNA, 1056 bp, Homo sapiens
agagcagtcctcaccagacacggaatctgccagtgccttgatcttggacttaccagcctccatacctgtgagaaataaatttctattgtctataagttacccagactgtggtattttcttctggcagcacaaatggacacccagaaactgatgcatgcatcttctgactcctttgattccaaaatacaaaatattagaataaagttatggaagtcagcttatgctagtaagtgcctgtgtgtctgccaacttcccaatagtatcaagagaagctggacaagtcagaatttcatatcacctatccaggatcacctccataaacacacaaacacacacacacacactcacacacacacacatacacatacacacacacagtgctttcatttgtcacagaaagattccacagtgcattaacaatactatttaatgattgtataacaatccatctggatcgtgtgccattttgcacagacattctacgcttggacacttacgttacttccagctttttccaattacaaataatttagaaggcatcatggtgcatatagttttttccatatatatgattacttccttagattacattctcggaaatggaattattgggaccttagcttttaataaaatatatggccaggttttcaaaacgggacaccaaagtattctaaaggaatttttttctctgggtcttaatgggttttaagaatcacattggagttcatcagtgtcaatgtcacagcaaatgcaaggctttcatttctgttaactatcaaagctgagagtccaaaattgaaagggactaaaacaaaacaattctatggagttacaagcaaacaaagaccaacaatacttttcatgttctaatgtaatagaaagttagataggttctaattatccctagtttcaaattagagatatacaataggttgcgtatccttaatttgaaaatctgaaattggaaatactctgaaattggaaactttttgagtgctgatatgacactcaaaccctcactggagcattttggatttcagattttttggattaggg

SEQ ID NO: 104476 - DNA, 2284 bp, Homo sapiens
cctgcaatactagcctgtatttaagaaattaggaaaatcttagctgattcttcttacctgtttgtatggcagccacctcgttctccaacactctgccaaaagtgagagaagtgtggcccatctttggaggggcatatttttctttggaattttactttcttagttcctttaaaacctcaggtctctgaaggatcaaacagagttaagattttgttagactgtctggctttttcttgttaggatgggagcagctttttgtttgccgttttttcccagccctctacatgctaaacagaagcataaaactcctaaattttaattcagaaaaaggggttcagagctcatttactatctgtgatctttgctaactcactaattcataaagtggaaatactaataataacaattatgaattcatcaacagaatagaggattatttcgaggttttaatgaaataatatgtgtgaaaacacttgtaaactagaaactgctgtacaataatcattactttccaagatgtcatttcctttttctgtcttcagaaacgatcttcaagacacagaaataagtccaagacagaatcgccgcacaagagccgctgaaagtgctgagattgaaccaagaaacaagcgtaataggaattaatgtgggcttttgctgacttttcaaatgcattgattagaataccgtacttttggttgccacagatagattttctatttataaatgcccaaggaaagatgctaaattctaaatattacggttagctgatattcattcttttctgcttttccagaggggaaaaatgttacaaaatatccttacttggtcagttgcctcctgcctctaaaacatctctctctaaaaatactgacatttcacacaggtaccagctttgcagaggaggtagactctttggcactttggcacagggatttggtttggtttggtttggtttgataattaaatttcagaatgtccttaggccattctccttctcttccatggagaatccagcctcacaaaaggattctttcaacttctttattgcaagaaacagttgagttaaatgtttgtttttggaaaggcgggatgtcagttcacatccttggtgtgtgtaagtaccgatgcacgccaccaccatgcctgtgttacagcagctccatgatggttgttgcccgaggttaatgtagttgtttgttagacctgtgtcttacacatttctcagagtaggatattagtattataatttaaagctacgacagtcacaaagtcacaataacttagaaacattgcgcatattcttctgaaatagcacttaaaaatgattagtgtcagtattttttcacttgggtcaatcaaatctgtaacactgaatccaagctattaaacaaaaagtatgcaatgaatgaattttgtaaatgaatagagagtatcagtttacaataatgttcttaaaacagtatcctctggatagttgagtatgggttagaaatcattgaaatggattggtcagaaattgctatctgtgtaaaatgtctaccagtagccagatgcttccagagttcttaatgcctctctggcatttcagagccagcatcccccaactcccacccctctgccatcacccaacccaaacacatcagctttcaaatgagatgatagtaaatgcggcaatgttaagacaagaaatttatgatttgccagattcaacatttatgacctccccttccaaagactgtctccgttgaccttgtctttttggtatgccttggggtttctgataatgtgtggagtctcattatggctgagagtttagtgttttcacagtgaagtgcagacatttgatttctttatgagttccctgtgttagaaatggctatagaaaaatttgtcataataatttcatttgcatgaaatcctgaggggtgcattaaggaaactaaaagcaccacttaccaaatctatcggcagaactgatgtgaggtaagtgagcatgtcaaacaaaataggagctcacatggatatatttatgtcactgagttgtcagaaattatgtcaaaatgaaaactgtttgtttcatgacaaattatatagtctataaattaaactggaagtaattattactttaattgcagcaaaaggagtttgtgagggagcggtgagacccaagattgggaaagtaggcacatgagttcattcagcaaatatttggttatctatgtctgtcactgtgctgacactgggaatacaaaggtggccaaagatcatctagaacaatggt

SEQ ID NO: 104477 - DNA, 1044 bp, Homo sapiens
agagaagggaatgaaaaggttgggttaaaacagcttcagctttgtttaaattggagtagttctctccaaggtaaggagtagcaggagctggggtcttgtgaatagaagggtttagaacaacttctgttgaagtaggggtggcagggaatctcagcctccctggctagtggaaaatactaaagatggtaaaatctgcctcagtgtttttcagcgcctttggcctttgctcctcctctcctaatggaaactacatttggctctctctttccttgcccacccccactctccctccttcctcttactggtaaccactggtttgctttctgtcactatagactcatttgtttttttctagaattttatataaatgggacgatacagtcttcttgttgtctgtcaatactgatgtacatatccttttagttccagttcagacatcataagagatcttttagaagaagaggaagcctgggaagcatcacataagtgagttctcataatcatgaaataagcatgcactttgacctgagaaattatacttctatgcagctgattttcaaacaaaattatatttttgctttctggtttaaagaagtagtaatcctcatgcaaggtaaagattttcagtttactacttgtttctatatatttctgctaagaaatggaatcctatgtaataactgtagttatgtatcagatgttatttctgtatggataaattgttcttatgggcaattaatacagtcatgcatcacttaacaatggggatacgtcctgagaaatgtgatttcattgttgtgggaacatcagagtatacttacctagatggtatagcccaccacacagctgggctctagggtatagcatattgctgctaggctacaaacctgtacagcattttacagttaggcatttgtaacacaatggtacctgttagtgtatctaaacctggaaaaggtacagtaaaaacatggtattataatcttacgtaattgccataatgcagctagagcgatcttttcaaaatgcaaatctgatcactgt

SEQ ID NO: 104478 - DNA, 1649 bp, Homo sapiens
acagaaatgggacctcaacttaactttgtctgacaccgaaatctgagggttttttctctaactaacattaccagtcatacatttgccgtaggtatttgacatcttacttttcagcttcagtagtaaattctttactagtagaatgaaataagatgctacaaaaggaatatgcgaagatagtgttttactttgctgaagaagctgtgctactttccgtcagagaatgacaagagtgagatattacagaaaaaccagcttggccaaggtgtgcatgtgtgtgtgcatgcacacacacagaattagcttacatttctgcaactttgacctgaaaataaggctaaaagctgactaaaaggtgtgaaaaataaattgcaggtgttctaaataagcctattaatatcttcctggaccaaggttgggaattccatcgaattcaagattcgattttgaatctttgccagtgagtctttctcacgtgtaatctatatattaatatccactgtagcctggaccagtagggacatcagagagggccatttgaatgcccttccataggggagctgtaacgttcatgtaccaaaccttacattcatccagcttcttgaagcgtggtcttccagaatgtttcaagaccaaatagtagacaagctgaaaaagttcctcgttctagactttaaagctgcagttgtgtaggcttgtatatgctctgaccccagaaatatcagaatgagtaattaattttctcctttggaagattttttaaatgtcttgaaagaatgttaaaggaatttttgatcctcaaggcatattaaaatgactaagacttcaaaaatattaattgcttttatccccagggaagcgatctgagtgataattttagtaacactgactgctatacctaagtgtctttttgtaaaatcctatttgtgaaactatgtttaattttaggaatgtggtttttgagcagatatggtaataagcacattacttgaaaaaggaatgagcagttctgtctggtattttaattgtattagcatcaactgtgtttttcagtggtgactagaattggaacagcagatatagcagataatcctgaaacttcattttagataaaattctgaacctcccaaattttgtatcagtccatttagtgatttggttatcattcaggtgagtgcctgaggtggggcagaaggaaagataatgggaattgaagacaccagggagctgtgcagcctggctgggcagtgacattgaagtcacagaggaagaggagattgcaggcaacttctgagatgtgttttttgttaaccacctctaacatctgttttcactgaggtagcatagcaaaaacctcttagatttatgtcattagtgtactgcaaatgttttcctttaacaaatcagtgatttgtgctggtgatttgaaagcccctaggtaaattgatcacagactctactaggttagttgacaggcttggccatcctcctttcttagctagaatagtagagatgctttgtaaccttcctgtttaaaaaaaaaattgtgtgtgttgtggagcacaggggggtgttggcaagaagcttactttactctttctccaactctgtgacccctgccaggccccagaactacgtgatcctccgca

SEQ ID NO: 104479 - DNA, 1034 bp, Homo sapiens
tttaaattaatctcccagagtttcagtttcctcattgaaaaaaatggaataatagctttttttgtttgtttgtccctctaacttccctggatgagtctacaaagcaaattagatgatcatatattgtgaatgctttgtaaatagaacgtaaacttattgttgcttggtttcatctcttgttaaggattttgcatatattagtaagttatttttattattttctcttaagctctcttcattttatctttctttagttctagtggagagcagtgaaactcttagccttgttttttccagaactgtgttgatgtttgtgcgacaaaaaccttattgataagtaggcaggagagcgtattcttaactctggtaaaatcaatagcatttgatttttctgctaccactattgaagcagcacaatgtggcaaaacaagatgagttttgcattcccattcctgtttttctacttactttaatttctctcagcctttgtcaagtggggagaaaacttagggtgcttctgtgaattaaagctaatgtgaaggctggatgtggtggctcacacctgtaatcccagcactttgagaagccaagcaaggcgggaggatcacttgagcctgggagtttgaaaccagcctgggcaacatagggagatgccatctctacaaaatatttaaaaattagccagacatggtggtatgcacctataactactcaggagatgtggtgggaggattccttgagcacaggaggttgaggctgcagtagctgtgattgtaccactgcactccagcctgagtgacagagcaacaccctgtctcaaaaaaaaaaaaaaaaaaaaaattaaaaaagctaatgtgtacaaagtaattatcactgtggcctgtagaggtagttgctcagaacatgataattttcgtcattgtcataattgaatgagttttttggaacctggaactttactattctaatacgttagccaactgctaaaatatttggcatataagctattgtttgtcttacagattactaaaaat

SEQ ID NO: 104480 - DNA, 1002 bp, Homo sapiens
aaaggacagcaagagcatttgaagcgcccctgttttggggcaggtaaggcaatgattgagtcagtcgaaaaagaaattaagtgacttaatctcatgatcctaatgaatggtaaagccagttttctgaattcagatataatgctttcttctgcttttttttgctgttctccaaatctcagaaggcactgaagccagattaaaagttaaatgaacaggtgacatattaaagttacaggtttatgagtttccccactccactgttttcatgtagctccagaaccttagaggataatggaagacagattcagtccaatgctgtttttcagagtagaatctatcatgtttttaaagttaaaaattatcagtgtacatattaaatacaagtttttcagatttagaatttgttcttctgaaaataagagtcctgaatgtctcctggacagaaaaccctggttctgggggttttaggatccagaagacagcatgcccagatgggcttgggttagttcacttgatttgcacgtgaaagatgtgagggtacaggaactgtgtgggttggggtggtcagaaaagagggaacagatatggctatagcaagagagaatttttgcaggttgttttttaggactagatctaaacattttaaaatcagcatttcaactaggattcctggataatgggaaagtccagtgttcggaacagcatgtatagcatgtgacctcttttctaaaagggggaggaatacttatatttgtttggttttgcataaagaaacactagaagactacacaacaaactaatgaaagtgattgcatgttggagatgagaaaacaggttggatgggaacaaaggaggaagtgggccaactcagtatacatcttttatgtcatttgattttgaaccatgtaaatatatcaatctactttaaacaaacaaacaaaaaaaaaagagagcaagtactgtttaaaccttactctttataaagttttggaaatcatctca

SEQ ID NO: 104481 - DNA, 1684 bp, Homo sapiens
tgaaaaaaatttaactgtatgaacttggcaaggttttttgaagaatttgttatgttctttccccataaattctctctgtataatcaaaccttgacaattgtatttttagtgtgctttgttgaagaccacttgcctctacaagtgcttgatgagtgatgtgtgaaagctctgtttctctgtgaggaaacacatgaaaggagctctgtagtattattagcacatgtagcttgcatgtgaggtacctcctcagttcctgaaagttaaggacagcacagatgaaaatcccagcagcgttcatgatgagtgggagaatcctgggcactaaagaatctttcacagatattcttccactcatatttgtagaaaattggccatacccatatgccacatttttgtaaacactgcatccttccagctttttggggtctttatttttatctgcaataagagaccttgaaatctgagaatatgacaaagaatgcacggaaatgtgatgtgtattggatcaaatggaaatattccttatgtctgtttagttgtccttttccatagagaataattagattctagttaacctagaaaaatgtttagaaaaatgtccagatagattcactatcatataatagtagcaaatattgtggttgtcttattagttgaatctgtagtctttttttggttatacttcttatgttggtttgtcagtgttctctgatctatgaaatatgcaagaattccttagtgatatgttaatagaggcctcattagaattacaagattcttcctgcttctggttttaaaataaattttatttttaaactaattaatcttggaaaaacatgggctggacagtataattagatagcaccattgtagtgttaattcttgctctctggctgtcactagagttctggaatctatgtgacatatacttcaactttactaagtgcacatggcagtattaagtgttgcagaagtaataggcatacagaagttgtagattttaaggtactcttaaatttattttttcctaggacaggaagataatatgacctcagtaacaaaccacttttctcaatcaaagctggactccccagaggaattggaacctgacagagaagaggattcttctagctgtattgatattcaagaagttctttcttcatcagaatcagattcatgcaataggtaagaaacatgcagtagttgattattttaaatatctacttcatatgcacatgtagatagataggcagaaataattagaatgtagctttgaggcatggcatggtgtgtcactcttacatttcagtccccttttactgctgggtcttcttcacagtgataacaaggcaggatttgggaaggtagtgcagggatcacagggtgagtttggtctctactctatagcctttatgtagatacttttcctaccgttggaaaagaaagcatgatagacagtgaaatttttgtcaagacgatgagtaaaggagataaaaacaactatattggaaaacagaaatgatcagaaagacatggcgcataggagggttaagaaatgaaaaatttaactgagtaaatagaatagatggggaaactttaaaaatgagaagtttggtaatgagtcattttgaaaagatattttaaaaaatatatagggtttattttacacacacacacacacaca

SEQ ID NO: 104482 - DNA, 3306 bp, Homo sapiens
tcttccttgtgcgtcacaatttagtgttttctctttttgcgttaaaagataattttcaaaaacaactaacatcattctcatatggatgtaaaatgaacatgtgtttttattaaagatttaaactcattagtagagagaagactgatattatgaggtgatcaaagaaggagccaaagaatcatcacatttacagatgaggaacattgaaatgaatgtataatgagcaaaaaactggcttcttccacattggaggaggaaagtcaattgaacctccacccaacaggattttgcatatctatagacaagaattattttccattgctctcagttatctacaacatacagagttataccatagctcaaaggcagtgaatggctggaatcttgggagagtagatttagacaatgccatagttcaactgaagcacaattttttccctacacccagtaaattccctatgccttagtattatgctaaggaaaatggaagaaaccaagtgataacaagtacattgttgatttttgtatgaaaacagtgtcaaaattttgttttaaccatttgtagtatggttctccctaaaaattttataggatttatgacattactttggactgtggcctaagtatttaacgttgctagataagtaaactgtgacctcagctgcatggttcagaatcacaaatacatgccctaaagtccatacagtaatgatgactggctgctctttattgaacagattggtacattaataatgatgatcttgaggtcagggttaattatattcaaaggtgttaaaatggtagtaaataaagattagagttagtatagtatcgtaagataaggtagaattggttgggagagatcttagaatcttaaaggggctctactgggaaaccggccggaaatgtgaagaaaaaaaggagagctggagtagacggacattcctttgttatgatgattcaactttcctagaagcttctattttagattcagcaaatactcttagttctcttgtatcttggaagttagaatggtatcatttgtatatatttaagaaagcgggcatctttcatgctcttatgattatgtaaaagcctttctagagaatggagtttgggaagaaacctagagtagctaactaggaatatcatgtttccatatttgtatttgaggaagggagaagataaaaagaaggttccatgacactccagccctttgtattcttatgcttggcagcttttaaatttattgcaagtgattcctaaggatgctgttcttgagcaagcttgtacacctctgttttttgttttttgttttttttttttgagacagagtcttgccctgttgcccaggctggagtgcagtggtgcaatctcgggtcactgaaacctctgcctcccaggttcaagtgactcttgtgcctcagcctcctaagtagctgggattataggcacacaataccacacctggctaatttttttgtacttttagtagagatagggtttcaccatgttggccaggctggtctcgaactcctgacaaatggtccacctacttcggcctcccaaagtgctgggattacaggcatgtgataccacacctggctaattttttttgtatttttagtagagatggggtttcaccatgctggccacgctggtttcgaactcctgacaagtgatccattcacttcaggctcctgaagtgctgggattacaggcgtaagccaccatgcccatcccttgtacacctcttgatattcagtttgtcagttgtagatggttaactttcatagtcctagctttactgagaagatcttttgaatttcaggtaaaaaacataagagtgaatttcagcttctggtggatcaggctagaaaaggatacaagaaaattgctggaatgtcacaaaaaacagtaacaataacaaaagaagatgaatctacagaaaagctatcttctgtatgcatgggtaagagactataattaaaaacagacatatgtcgaatttcattatttacttttaatatgaaaaaattaaaccaaagaaatttactttggagttcttagttctttgaaatgagaaaaagtatttttagacaaacttcatgtagcagtttgtaaactagatttattactatggggaaagtggttggaagaatgtcctgaagaaacaatctctttttgtctatcgtcctttcagttaatgataaatcataaatttctttgttatttaagcttcaggatgttttctagatatagaatttattggtggagatcctgtaaagagagtgaattatttttgtgatagaacactggtgtttactttggatgaaatgttctgccaaacagtctaaagttaacatacctggtaggctaatacagagcacgttccttaactttgatccattttaaaatttgaaattgatattttaattctattgcctgggctttggaccagtgaacaaaaaagaatcataatgggggaaagtgcgcaagaaaattgcttattatgtttttctatattgtggtaaaatatacataacacaatgtttatctttttaacccttcataaatgtacaagtcattggcattaagtacattcacaatattgtgtaactatcaccactgtctatatccaaaacattttcatcattcccagcacaaactttgcactcatgaaatagcaactcttccgtcccctctgcctcatagccctggtaataacaattccactttctgtgtctatgagtttgcccattccaggtacctcatataaatggaattgtataatatttgtctttgtgtgttggcttctttctctaagcataatgttttcagagtccttcaatgttgtagcacattttaaaattttaaaatattttaaaatttttgattaaacagtattccatagtatgtatatgtcatattttgtttatccatttatctgctatggttatttccaccttttggttcttataaataatgctgctatgagcattggtggtcagatatttaagtttcagcttagagtgcgatttctgattcatatgctggttctatgtttagaaccttttgaggaatcgttaaacttttccatagtggctgcattatcttacattcccaccagcgaagcatgagggttccaatttcttcacatcctcatcaatgcttgttattttctgatttttaaattttttaaaaattgtagatgtgaagtggtatgtcattgtggttttgatttgcatttccctagtgactaataaacaatttgtgcataaagtgctgcctcagtatgtaactcat

SEQ ID NO: 104483 - DNA, 1092 bp, Homo sapiens
tatatgggattttactttggaaaacactgactccaaactcatttcttgatttaaagtagaagaagtatctcagtggcatcactgtagaagggtgtgagtcttttctactcttgagagagcctgtttttagtcttttgtaccactgggttctgggttcttgggcagacccagagacactctgactgtaagggctggtctaaagaagagtagttaaagtgatcagggagtaaagggcttgatttcgttctaaaaaagattacatttaaacttagagaggcacaaaggatggtatgattcaggtattcaaaatctggaagaaaatgagttgattgaacgtgtacttagtcatggacactcccacgactagctgagccacttaaaacttttaagaggaaaatccaggacacatgcccaccagaactgagattttaaactctgcagtattccttgccaaatggcagatcttctaaaatgaagtaaagaagtaagtgggaacaatgttactagtcttgatctgttgacatttttcattttctgagtaggggttattggaattctctggctaaagccagagtagtggctgccatttacttttggtttccagcctagctgtggggtaattagatttaaatctgggattttattacttcagaagataataagtcattaagtctccttaactgttaatgtgattactttagcaaatttcttgactaattcttaaatctccagtctttatgtgtacagtggaatggccttagtaggaaaatagcttagacctggtctaactaaattatgtagatcccatagtactgtgtcaccctcgcctaatagaaactacataatgatgatggtagtgttagcccattgattctaagcagccagagaaatacaagataattatcctcaagtgcgtagagtgaaataggacctcaaagaaatcacctagcttgtgtcctagataggatctcacttgtttgtaaagagttagttttttccagtgatctttacggccagcatatatttcttttgctgacactttaattggtcttttatttaaaatatgccatacattttatagcccaacattag

SEQ ID NO: 104484 - DNA, 1275 bp, Homo sapiens
tgatcttttaagtctgaggtttaaaaagtggacctagaggcttaacttactgtgttttgtattattgcattttctatacatactgcttttctataatgacctggagaagttagattggaaaggagagaaggcagacaagaagatcagccttactaatagtcagctaagtgtcgttagtcttctggtttcaaatattgcctgttgtattaatgaatgtgggatattaaatattgaaaatagaaaatttattattttgttaatatataattgaatcatgttgcattttctactgatgagaaaaaataatgagtaaaatgtataccatttctggtatttaagggaagtacataggaatgattcttcctaggtctatataaaacagatgagagatcattttcctctattttaaacactcacatttgagatttgaaggtttgtaatatttccctttttgtcattttggggagatttttattaaggtctttttttgattattttaggtaatggtttttacaaaggaccaaacagaaaaggaaatagatgaaatccacagtaaatatcgtaagttgcacgactttatttaatttgtaaagagcttcagttgctgtttttcatcttaagtaatttttcagaataatgttttatattaaggttcaattcaaacttttgttaacattacttaagagattgaattttaattgggtgtttacttagtgactttttttgtattttatatgcctgctttttgatttttatgactagcattctactttgagcttatcactaagcactttgcaaatattaattagctgctctcaaagcatttctgtgaaaagaagctgggattaaaatggaaacattcgggactctatcctgtcctcaggccactcagtaacaatacttctgtataggatttcaatgcttctatagcttgcaaatttgtgccaaaaatagttttcattttattgcttgttagcaacctcccaactttatcacttccttttccttaaatggtcttcgtgtatatctttcccagggctaacacattactgttttgtcagatagctgttactctttgtgtggtggttggattttagtttaaatttaagtgcctgacgaacagtagatagttaatagatgttcattgaatcagtattcccaggcatggtatgttttaattgaggtaagataatttttttctctcttcatttcttaaactctgaagggccaggttctgtagtgatgtattgtgggagggaggatgaagcacacctg

SEQ ID NO: 104485 - DNA, 1315 bp, Homo sapiens
tgaattaaaactcactaagaagttcctgtttatggaattgcttaagtcattggtacttttatgtagcttgaattttagcccactagaatttctagcatgctttaaagaggtggaaaattgaataggtctatgtaagtgtgattctaagtgaagtcctcacagcatattccacaagcgttacatatatgtcttctaagtgtgcctctttaggtctgacctctttttgagacccaagtctctcacttctggtgccacctaggcccctgtgtctgaatgtcttaccagcacctcagatacatcatgtcagacactcaactttatccacaaacttgatttttctctcccctttttaatctaatggttctactattttcccggtcacccaggtgttgaatcagaatttatttgccattttacatgaaaagcatttgataattcacaataatcatcaggtatcttccccccttttcagttctgttcacaaaaggaagccgctgcccaaaactgtatataatttgctctctgatcgtgatttaaagaaaaagctaaaagagcatggattatctattcaaggaaataaacaacagctcattaaaaggcaccaagaatttgtacacatgtacaatgcccaatgcgatgctttgcatcctaaatcaggtaaagtaataaaacagtgagttatgcttactttctggataaagcaattttgtgtagctcagaaattataaaccatagaaaaatattgtaaataaatacatttttgatagataagacgtgcaaatgtgttccttcaaaaggtacctagagtatgctatgataagccagccttcctctcagcctgccttccaatccccagatcccttctcagaggcaccccattgccagtttctcatgtgcctatctagggagaatgtggtggggaagagtggatctggagagcctgggttacagtgcccgtttttcagctttgtggcttggtgactgtgggcacgttacttgatatctctgtacctcagttttctccttcataaaataagggttataataactacccacttcataatgttgagtgaaataaatgataaaaggcatgaaaagtgcctaacacagtaccttagcaagtagttagctttcagtaaatgttgccattatgattattgtacacaaacatatatccttttcattactgtttttacaaaatgatagtattctgtgtagtgcactatttagtggttggttcttttcattaaaccacacacatacattggagttctttctattaacatatagaattgcctaatttttaaaaacttgg

SEQ ID NO: 104486 - DNA, 1064 bp, Homo sapiens
gataataggtgataattcagagagatttggaaaagaagaggagggaagctgaagaaattaatggtatctgagaagtggggatgaaagaatgatttgcttctatgttcagtctgttttgaaggactttgaagagtattttccaaaaaccatgttaataagacagagccatagtattattttttgtgattaaagaaaatacatcacttaatttttatgagtaaatttggagtgaatgcagattctgagggtcagattcatactgttacaacttacaaaagctaacatataagacacaatggtgctttattaaggtagacatacttgagtccaaacctggggcagttttacatgcacagtactcccacctagtgggtaagtttgttaatgagaataaaatttagatttttaggttgcttagtggtgatttggagtaaatgaatagtcctaaggattatttcccataagccacgagagtttgatgaactgcttttctctttagaaatgcatgagttgggaatatagaagctgagtatattcttttggaagagtaaggaatctgcactgattatcttgcatggactcccctttttctagatccatccatcagttcgaatacatttctgatacatcatttctgatgctgtcagtttgtttgaagacatactcgtccatgtgtaattaagttctaatagtggtttaaattcctgcttcaaagaacactatagtcctgccagtgctctgtagtgaacttataagcactacctcctggatccccctcttagtgtgttaaaggctttgagaagtcctacattaagggttactgttaggttttgtttaatttagtaatcctaaatttatttgaccgccaagcctttctgttctcatcacttccatcttacaaaactggtgtttgtggagattctgaagacaacactgggccatgttcttctttagttgtatcttggccacggagtcaggtcatagagaaaaggccctgtgagttttcctgtctcctccacaatattctgacaggccatctgctgaatgtgagtggcagcccttaa

SEQ ID NO: 104487 - DNA, 1043 bp, Homo sapiens
gttctctgtggcctaaagctgatttcctttcattttgttttattgacacattaactgccttttacgttagatttattgctttgagttatactagaagaaactttggtttggttgtcattatagtataggtcctgtatttcagaaaacaaggttaattgggaaaacagcttatgtcagttaatttatgatgtaaaattggatctcttaattgtctgttgtgttctttgtgcttcaaggaatcatctgctgcagtttgctttagagtcaccagccaaatctcctgcttcttcctcttcaaagaatcttgctgtcaaagtatatactcctgtagcctccagacagtctttaaagcaggggagcaggttaatggataatttcttgatcagagaaatgagtggttctacatcagagttgttgataaaagaaaataaaagcaaattcagccctcaaaaagaggcgagccctgctgcaaagaccaaagagacacgttctgtagaagagatcgctccagatccctcagaggctaagcgtcctgagccaccctcgacatccactttgaaacaagttactaaaggtaggaagttattttcatatgtggaaatatggacatcttttcatccacatgacataagaataaataggcagcatctttgagggggaaggaatggtaaaggacaaaccagattttaccatatcacaaacctcagacattgttgtagatatgtttgttctctttctctctcagaaacaggaattcaggctgactgctacaaaaaggaaacaattttaattagttcagccttcaagtatggcagtagctttctgttttcagcttttaatctttcttcccctcattcaacatatcagttcccatttaatcttgaaaagctctttttatcttattttaccaccacttgaatgcctcctcactgttctgcctgccatataaagcctgtgacaatttgaggcctaacctagtcatcccgccttattgctcacctctctgtctcagaagtcctgctctagcctccccactgttcctc

SEQ ID NO: 104488 - DNA, 1044 bp, Homo sapiens
aggaggatgggtcagacattttcaaaaacaagattatgacaagttgattattgtttttgacctttttccatctgttgtttgttttttctagactgtcacagagccggatctgaaaaataaccgcatattagatgaactggtaaaaagcttgaattttgcacggtatgatttaattttgtgactaacctctaactacttttgccttttatatgtgttctctctttactttgtgcacctttggattagggaatgcagggttgcatattttatagtcaaagaagggaagtaacagtcattattcacacatggaaaatttactagagtaagattttcttcctttacttaacagaaattctcctgtagtatagaataattaagagttaaaacgcagatttgaggacttccttacttttgggtgctctgaagatactccttttcctgcccaagccctagaatcagccatttctccaaggagctcctcttcttggagaatagtatttagagaccaggatctggtgctgggtatgcttgttgctactggggtgtcattgcttctaggccctctcaatggacagagctaagtaatatatgtatgttatatatatgtatgtactaactcatgtatatacacatatctataattgattctgtctgctatatattaatctgttaattcttaatcggatttattcagcatgtattaaatggtatggcatttgaaatatgtaattgcttgtactttataaagctcagatatgcaactttacttcctgtcaaatgcatgaatgtgtgaaagtgagtttggtcacccaaagggatatgaaaaggcatgtttcaatatcttggattacttttagttttaatcatgcaagtcaaacaagaatttttatgaaggacgtactggtttagatagtggtcaggtgcccctgtagttaagtgtaatcatgtgttgcttaacagggatgtgttctgagaaatgtgtcattaggcaatttggttgctgtgtgaacatcatacggtgtacttacacaaaccaacatggta

SEQ ID NO: 104489 - DNA, 1042 bp, Homo sapiens
attgtgtgcctgcttttgataccagtttcctcttttgactagacagtttctggagtttggctttaacattctttgatttgattcttaacttgtgtggtggcaatggccacctttcacccaatagtgactataggctaggtgttggagtctgaagaggaggaggcttggagtaagagctggaagcgcattagaagtggaacagaagtacagtagcccttatgtgaagggatgacaatatggcacaagaatcggtgtgccatcatctttagctgtctaaagcaatttgggcaacctgagactgaatgtataagagtcatatgagagaagtttttatttatttgtcaagatcccttgcagtttatctggagttagcttttgaatttgtgtatttgacaaagagtttgattttttttttaggggatagagaaaaagttttgtgacaggacttccaattttgatgtctttctgatatgtatatatgcatatttgcatttcagacaatagatgatttgctgcggtgtggaatttgcttcgagtatttcaacattgcaatgataatacctcagtgttcacataactgtaagtatgttttgttcctgtgagttagtaaattgcgatttttacatgaggtagtgttaatttaacaccaaagatatgtgcacatatttatgtttcacctttagctcttctatcttgtagtttttcagaaggtctttttcactgccttcctcttgaatattgaaggtttttacaaggcttctatattttctacctcgttcctctttgatatttttatgattcttatagcatttatggcagtaaaatttttggtcacaataagtggttctttatttgccaagtgttttttgacgttaagtttcagaatttttgtttttaacaggataacagataggtggttccaccaagtagtacttgatatagaatttcaaagtttaaaaatctgtaacaataagaatattgccccagtgggagaattctaccactgactttattacagacagttttataccttaactgctat

SEQ ID NO: 104490 - DNA, 1064 bp, Homo sapiens
agaggaaccagtgtgggaaggggcctttatgtggggctttcttctctgttggagtcccttggagtgccttgttgggtatatttctctgtcattcaggaggcacgaatgtggaggacttctcgtgacctggtcgtgatgtggcattcagtgcatgtccacagctaatggaaaaacacgaggactcgggtaatggttcttcctctcagtctttctattcctaacttttcacacatccagatggttccacactagtgcaaatgcctcactctcctgagaaacccagaaagaagagtggctggctcacaaccatggggttagcccctgctgggctgggagtcggggtggcggccaggaggaaaggcagaaaggggtgagccgaggtgttgcctagctgattttctgctgtgcagagctaatgctgacatttcatgtcaacttccccggttctctggggtctcctctcctctgagcagccacatagaacattccccacatatccaaagctgcccaggggagccgagagaagggactttgctgtcaggtccaagccctcctgacctccctgagattgatctgccagtgtcctgctgtccctctgggactggccacatggccatcgctgccccttgttgacacctcctttctgtgtgagttgtccccggccaataacaaagctgttccttgaaccagaacaaccagagtgcacttttccttccttagacggaagtagatcctggctagggtttctgcccaggcccttgttcccggcagtgtgactgtttacatggtttggcaataggtttgattctgattgcttcagagtggctggtctattttgtttcctttggtttccttcctccccaaattgtgacaggaaaaacagaccaaaaccaccctaggaaattgctggttgcctgtccccacgtgatgataaatgttgccctcttctggatatcgtttctctaccttacgaccaaacgcccgtcctatagagtgtctgattggatcctctgtcgcgtattctgatggtgcctgctggtttgacgtggagctatcctgtgaaa

SEQ ID NO: 104491 - DNA, 1436 bp, Homo sapiens
cttctggggaacctgcctacgaagggaagctgcttagcagacaggaaggacctgactccaggtctccagactgtgctgaccccagctccctctgtccccaggacatcgagaagaccatgagcacggctctgcacgagttgcgggaactcgagaggcagaacacggtcaagcaggcgccagatgtggtgctggacaccctggagcccctgaagaacccgccaggccccgtcagctcggagcccgccagtccccttcacaccatcgtcatccgcgaccccgatgccgccatgcgccgcagcagcagctcctccaccgagatgatgaccaccttcaagccagccctgtccgcccgcctggctggcgcccagctccgcccgccccccatgcggcccgtgcggccggtggtccagcaccggtccagcagcagcagcagctcgggcgtgggcagcccggccgtgacgcccaccgagaagatgttccccaacagctcagcggacaagtcgggcaccatgtgacctgcaggatgggccgcgccgccgtggcccgctgtggctcaccacggcccagggtggccttggtggcttccacgtgcttcccagtgaccctggccttggagggcagaggtccgtctgggagggtgtgtctgtgcagagctgaggcccgggcgctggctgcagctcacgtccagccatgggaatcccacggacctctcgcgtgtcaacagacgaccagaggagtgctggagctccagcagccccaaccacagcattccctaacatggaggcaaaataccacatggcttctcccgcatatcgtcactggaaacttcctctctcgacattctctctacatacgtatatgtgtgtgtatatcgatgtgtgcatatatacacatgtatacgtatgtacgtgtctgtaggtgtgtgtatatatatatatatttatgcatctatatacatatactagatctggacacacgcatactaagtgtatatagtatctcctttttctttttatgaaacttagatttacctcagatccatgccaccaaacatctcccaccgagttatttggtgggatttgcagggacttttctgggagaacttaaaggcccatagtaactgcgaatgaagcaatataccactaacctgcagaaaaacacaaacaaaaacagactcccactgtctccagaagtcgtggccttccagaacagtctgcccctcaaggaagggtggggcaggcagtacccccaagcaggctgctcccagaggtggggaacccttcataggaaatccccacccccgtccaccccagagaccctgcccttccacccggaggccaaaggccaactgtactcccaaaggcatgggagaaggttggcgagaagacccctgactaccacatccttgtgtttgtgtgtagagacgggggatagtg

SEQ ID NO: 104492 - DNA, 1051 bp, Homo sapiens
tattagaattttagtcatttagaataaacttttaaatttgattcacagaaaagttgccccatacccagtttcatttggggtgtttctcacagtactctgagagatatttgcagccaggaaagtgtcccaggagatggcaagagaagagggaggtttgagctcttttttattgtgtgtgtaaaagacccttctgttcctctcttccctccacactattccctgctcatctttccagacctccatactacaagctgtattctagactgcagaggtctgaccctgtctgagccctgtatcacttgctcagccagtgtttccagaaccccaaaaatcctgttcctgtacagggccctgagccaatttcaggtctaggatgacctggaaacaggggtcagagatgagatcccaagcatctgccagactttggctgataggtagcttgagaagtggtgatttattcgatgttcatttcctgagcaaccactatgtgtcaggcctgtgctgcagctggtgtttgtaaagagtttaataaaacatcgtccctgcctgtgtctgtcaggactcataagtaacagaaacccagcttaaacctgcttacttcataaaagggaatgcactgttcgggaacctggaaaacttaggtccagctggactcagaccttcacacggcatcagcagatatatgccccgtccggctctatgccagcttcactcttaggtgggatcctcctctcaggggcccccactgtgctccaggcttccctctacccaggtccaagagggcatctccctgtgggtttctcacaaccaagtccggagagtcgactctgattggttcttgattaggccacacctccagcccctccctgtagctagggagatggatgctctgattggccaggccaggatcacctgtgatccctggaatcaagagtagagctggctcccccatccacgtgggttgatataggagatgtggcgagcgaatgtttgttgctttgctctctgaggatgaaaggcacgctgaaaggcccctttatgttacagaact

SEQ ID NO: 104493 - DNA, 1015 bp, Homo sapiens
gccagccttgcttcccccctggtgtgcccttaattctgacatcaggtactgcagtaataggatgaggacttgatccttgagcactgagaaaatagtgttgagttgggacaaaatggagggggaggcagagaactcttcaaggccagactccagcacccccccgaggtggttccctctccactgcccaagtgggcctgccaggcctcctgagcccaggttcctttccagttgggtaagaagaagagcatttctttaaaataatcatagctatgcctttttgtgcatacagttgaagactctctattgtaactgtccgtggagactttaggattagcagttccttgcttgttttcctactaatctgatggtactaatattctggcttgagtctgtaatcggtgtttgcaatgtctttttcctgtggtggttgtcaagccccataaaactcacaatttttcttttctcaaggattcaggacaagctataccgcttgtagtcgagagctgcatccgttacatcaatttatatggtaagctggatcttgggccagtgttttcagcaatctgcagaacaggtgctaggctgttctgataggaaatgagattctaatttgtcctggaagacttcccgtcacagctctgctttggagggggaaagtactgcacacagcagctgctcttctgagtgctgcttttgagcctgtgtgttgagggatggagatcatggtgagaggatccaagacctaggaaaactggagagtagaaagggcatggacaagagaactcaaccctatagctctgtgctttgagcactgaatggagtttgccagtaaatcagctaatacggctagattataagctccatgaaggtattaggttgatgccaaagtaattgtggcttttgctattacttttgaatggcaaaaaccgcaattacttttgcaccaacctaataatgatgtctgggatttgttaaccatggtgtcaccagaacataactggtgcttatccactcg

SEQ ID NO: 104494 - DNA, 1007 bp, Homo sapiens
gtattcaatccttcaactattgagaatggaatttaattttctattataattcacatgccttctgaaagaacattgaactaagagtccccagctttgaaaaaccacacctgtgaaaagtttttttaataaaataacatcactgggacttcacaattatggtggtctagagggacaaggaagcatcccctgggttcataatcataagtaaatgttgctggagtttgttttatacatttcttggaccctacctgaataaacaaacccctttcaaaatccttgatgttttttcctcctcctctcaggcaaaaggagaactcatttttataagagccaattttgaagcccaggaggttcacctctgggacaaggggagaatcctcttcttgtttctgtaaaataagcatgacaattacctacttcatgagtttgtgaggaagattaaatgagccactatatgttatgtttctagagcactggatggcacatagtaagcactatgtattacctatgattattagcattaatgttagcatattgctcatacagcctgttcgaccaggctgtttgctcagttctgggattctggtagatttagtcagcatgtcaggtagcagacaattccagctgtcgagatgctgagaactggacagatgactctagctagaaggcacacatcctccaggagcctggatgggacaagtgctcaccccagagatggacctgctgcacaggtggaaagagccgatggcgctcccctgaaaatgggcatcatcagtggcttttagtgaaagtaaaggccccagttctgcccccaagctcatgaaggcattctgactcaacttccctttctcctccaggccttcctcagcttttgtattccttaatgccagtgtaagggtcaagaggggaggaaggagagcaaagccaagtggatacccaagaaaagcaacttagggtgtacggcagggaaacatgggaagctgtttggaatttggcatcaggtggaa

SEQ ID NO: 104495 - DNA, 1113 bp, Homo sapiens
tacagaggagaatgaaaggacagaaggaattattgaaaggaagaacagaaggaatgaaggctcagagacagggacatcctcagtttgcttaggtctttggaaatgggtgatcagtcaggatacttggaaggaatcaactcttatctgacagtacttgacaagtagatattctgttgagttaagtattttcgtaatagaggggtcctatatataagatgtgactataaagttatctgactttattccttctgaccaacacatcataacctagtcaaccacatgagtgtttgcccctttgagacagtcaccttgggaagccaccttcttacctgaatgtgttggcattgctgcagctgctttggtcaatcttctttagagcctggagcatggcctttaccagtggggccaagactatgtattcaaatggacaccttgtctttggaatagaaagctccgtttgaagctgagctttgcgatgccattggaggtgcaaaatggcaagaggaatatgctacagtggggctgttccactggctctgaaaagagcaccccagcagcgacagcccagagcacttgagcagtggcagcgctgttggaataagtgcatcacctcctaaggggaaaagttggaggaataatactcatttgactgggaaaaaaggtgtgtttgttaaatactatttcattcattcattcattcattcattcattcattcattcatttattgaggcagtcttgctgtgtcgcccaggctggagtacagtggcacaatcacggctcactgcagccttgacctcttgggctcaagtgatcctcccacctcagcctcccgagtagctggggctatacgcatgcaccaccatgcttggctgattaaaaaataattttttttttttttgtagagacaggatcttaccatgttgttcaggctggtcttgaactcctgggcccaagggatccttcccaagggcctcccaaagtcctgggattacaggcatgcgccactgcacttggccttactattgcgttgctttatagtcacactgtactcatcacataccatcagcacagttcaataaactcatactgtgcacctactatgagctaagtgg

SEQ ID NO: 104496 - DNA, 1143 bp, Homo sapiens
cccatgtaccaaggctttgggccaggctcagattgcgcgcagctgggcacacgcatgtgcataggcgtgcacagactctcctgccgtccacaccctagcttggacctcacgggcacttggatgagctgacggaaagtaacacacgggcaacttctgctttctcttcagcttgttcaacattcccttttgcgctttttcctgagcagaccagagccagtgaacactttccactcagcagctgatagcccaggggctgactttacttccctttcagagagcttagatccataagtggctctgtcactggccaggttgtttgcttagagcctatttcatttctatgttcctattaagagatattgcactgcctagctggaattcagccagtggcccagaggcctgcacttttccatcacacggcagtagagcgctactttttgcctcactttctgggcccagggacctgagggcattctttcttttcccacaaatgctttccagtggccccaaatcctgggaagccctcatgtttggcaagagcaaagatgaactcccaactctctcctgctccttgggaagggagttgggcaaagtcttggcaacctctggggttttcagtttcctgggctcaggatggggagacggagggcttggcagaagttcagcccgtacagctgttcctctgggctctggcaatttggaaacatcaggatgattcacaccaggcaaggcccttccagcacacggggcggcagatgtgcagggtcactttcgaagaaccttttagaaacgaacccattataatttttttttcttttctggcgagagaatgttgtcatagtctcaaaacaacagaagctgtattttacaccaaattctgcaaatagtgaaacagatgggggatgaattgagctgtccctcacttcctcctaattcctagaactcacgcagagaagtttgttccagcagagtgtgggagaggagatctgtaatcaaacacttggccaggtctcagggtcttccctcaggggaaagttgagggtttgtgtgttttgttttgttttgttttgttttgttttgtgttttaaataaagccctctgaagtgttgtcttccacaccctccttgacctagggcctgggaa

SEQ ID NO: 104497 - DNA, 1048 bp, Homo sapiens
gaaaatagaggccaaccacaagtcttagtttaggttggcagggacagtccaaggcaaagtgatagaggggcatccatcaggtagggagtgggaatccagggcctcagaggctggcactgacatttttcagcagacactatttgcaaggaatactactggagtgtctggctagggttctaggtccagagaaggaaaatccatacatgtaagtcagggtttggccctcgagggacctgacaactaggcttaaagccactcaatgcattccagtggcagttggaataaaatcccagctgctgtcacggcacatgaggccttataccacttagcttctgcctgcttccctgacctcatcagtcattctccctttccttactgtgccgcagccatgctgagcaaatttctgcccttcaggactcaccaagcttattcctgccccagggcctttgcatctgcatgggcaaccaccacccaaatcagggggtagagcatttcagtcaccctcaaaaattccctcgtgctcctttgcagtcagcaccccacactctactctgatctgatttctgtcactgcagattagttttgtgtgttctaggtagtaagggctggggaactttgggggctgacggaaataaaagctccatatcctgctttgagtggtggttatacttgggggtagacatttgttaaaactcattgactagggggtaggaggggggaagactcagttgcagtgagctttttcttcattctttccctctaaattttacccatcccgacatttcagtattgggccagcgggtaaagggggtgtggaggagtttgggtagcaaagagggaagaaaaacagtgagaatggaggagaaagggagagagtccaagagtggagctcagggtgtgggtgccatgggggcagcttctaagactagcattaaagaggagggttggtatttataggcacagggcagggggctattcctcatgagccagttaaccaaaaggtaggaccatatgagttggtggctacttgcatttttgaaattagatg

SEQ ID NO: 104498 - DNA, 1055 bp, Homo sapiens
cacagtcactgaggaacaaataatgcagagaaaggattttccagtaaactccactttttttcttcttaaagttctgtaagggaggtggtggtggtctgttccgggggtcctacagggtataatgatggtggagataaatgctaaaggccacccatcacttgctttagagaaaaggcttgtctctatctggggctaggaaggatgcagaggagactgcaaggccaggcattttgttcattcatttattcattcactcactcaataagcctagtccttatcacccagtccttatctgctcagcccttagcaccttgaggcaccctcctctttaaaacatgctagcatgggtgtttatgcacatatgtgcgcgcgcacacacacacacacacttgcatacatgcatgtgcagtttgacatgcaccacacactagcacatatgcacattcacgtgcttgtatgtacatacacatatatgcaagcgtgcgcacacatatatcccactccacttcttttccctcgaactcccatcagcccaacacaatatagttcttgttcatgtattggcctgggagaaaaaaagggcagaggtaaagaacgtggaccagtatggcaatccttctagaagaggcaaatcaaaacaaaacaactcacaaactgtaagccccactgtgttttcactgttcggctaaaaatgtgttcagattttcaatatatttctatattatgaaatgcatgtgtgtcagtaactagtgaacgtccagtgtccccccacctgtctcttcctctgtgttcagcagctctgctccaaactgtgggctggccttccaagcccagggctgcaggagaggcccagtgactttgttctttgccatgtggggagggcctgaggagtgtccattcatacccagtagcagctggtcacaggtagaccctaactggagccatgaatcactctacctttgacttgttcaagccttgattgattgtgtatgggctcagggatgtgacatcaactctgggccaacaggcaaatcttggcaaaggtgtctccctcc

SEQ ID NO: 104499 - DNA, 1051 bp, Homo sapiens
gggaaatgatgtgtagggttctccaactcatatgatcagggaatcccatctgcaaggaacctctctctgtgggtttgtttcatggacatagttgaggaatttatgttgttgtagatcaatgaaatttatgctgatttctgtaccccttctgaccccacccgaaacattcctgacctttcgcttttgaaaagagattggtaaatgtagccagcaaacttctcccccgctgacatttgttcttccacattccagagcaaggagattggcctgcagatgcacgaggagctcctgaaggtgaccaatgagctctacacagtaagttctgcccaggctcactgctgttttgggattgggtctctgtcttcatcaccagagctggagggaagcaaaacagaggtctggaatgaccccaggccttttttgctgcgttttatgctgagtgacagtgggtcatcgtgtcaggatgtaatgactcacagccccagcttctgattctgtacatctggggcagggcctgggcttgtctagtttgtcaaaattcacgagagattcaaacgacctgccgctgtggggcgtgttacctgcaagaacagagggcacaaagtcaaggccgggggagtgtgagtgtgaaggctcctgaaggcagggatgtgagttttggagtgaggcagcacaggctccagcagaggcccctccttaccaactgtaggaccataggcaggtgggcagtttgtctgggtctcagtctgtgcatctgcaaaatggagcacggttccgaggatcacgggaggtcatggggtgagcctgcattgccatctccaaggcatagtttcataacatcacagtgtggtccacggctgactttgttacctgcttggagtcaacatctaactgtgcttgagatgagttttagaatccaagaaggtgagcaaatggggacacaaacacatgaggtgatgatgcaggaactttcagactgtgctttgaggagcctacggcttcctcaagaggaatgtggggaccccatggagagatatggggagtggggtgg

SEQ ID NO: 104500 - DNA, 1068 bp, Homo sapiens
gtgatggaactggaagcttgggaatggaggccacactgctcgtctctcaggggctatgccaggtttgtctctgcttctgtctgctccactctccagcctctgtctctgcagactggcttcctccccctgctcactttgcacttggcccaaggtggccgtcagctgggcctgcgtggctttagggcttgtacctatcataactgccctcaactcttgtgtcttggttcaaatgttagagagacagagagagagagacacagagagagagagaaatattggctggctgaggccagcctatgagtggacaccctctcccatctccaccttggatcactatccattcctggtccagtcgctggagggagagggctggatcatgttatgccaacatggctggctacccatacttcccctttctagaggttgtggccaagtcaggcacatgtggatgggacatttaataaggatttaacaaggacatttaacaaggattgagcacctatgatgagccaggcaatgttctaggtacaggggatacagcagtgaatcaaacagacaatgatccctgccctcatggagagtacattctactcagggaggcccagctgtgcagaaataaataagacaccattaaggcagaggttggggatctagaacagcatttccataggacacatggatgatgtggggaggagcaggaggggctctgcccaggaacccggttctatccttgtcttctctctcccttgcagcttcgacagttcctttccaactggattcccgttgcctgcttctgcttatctctgaccctgtcctgggctctctgggctttcaaaggcagcaatacctttccttacttcggctctcccttgagctccttgctggccacccctagacaattcaaccctaccatgtctgacagccacttccctccaacctgctgaccctgttgctgggaacttcacagtcatccttgcagacttgaaatgttgggatgccccttggctctgctgtttccatccagccagttatccagttgtttagagtgtgttcctcacatctgtctct

SEQ ID NO: 104501 - DNA, 1074 bp, Homo sapiens
ggaggccccaggccctgccgccttagcttggagccgcaggttggaagtgatctctcccacgagagtgggcgctgatgcctgtgttgggtttggcccggacagactggctcctctcatgtggctccatccctcttgatctcagccagggcagcctggacagactgaggcctgggccagatgatgttaacagcgattgttcatgtttattgaacactgactgtgtcccaggaattgttctacctgtatcagcccacatagtcttcataatcacctaagaagcaggtacggtgacctccctctttttatggatgcagaaagtgaagcacagacagggtaaataactttctcaaaatcacagagctgataagtggcagagctgagactgaaattcagcctgcctccaaatcccgaccttcatccactgccagacactgcctctgctgtactggcttgccccttttggagtcatttacactatttcaactaaacctcaaaacaccctacaaggtaagtactcccattgttgtttccatttcacagatgtggaagctgagactcagtgaggttaatcacttgcccagggtccagccatgctgctgggctctaagagctcatgctccttagccttgcccacccttggtgcttcacccatggccagctccccacgctgtgtgtgcccccacctgccaggtcatccttttccctgtgttggaggtgttgccctcactgtggtttatctggcggggcttaatcccaggggcctgcaagtggaccagaaggagcagggatcactcaggattcaaaattgttggcagcaagttccacaggcagatgttgctcccagagccccaaatattaggattgaaatcgcccatgtactcctcagggaggaggattctttgcagttatcttggggggaggtgtgtaaagggggcatcttaatatcccattccctatttttgcttcatctttgcatatactgaggttatttttatttgctgaattgtggcaaaatagacataacataaaatttggcattttaaccatttttaagtgtgtagttcagtggcatta

SEQ ID NO: 104502 - DNA, 1064 bp, Homo sapiens
ccactgtccagtgagcggcttgagtgcaggaactgttttattttatgtttgcgccttcttttcatatcttagtaggtgtcagtgactctcaaacagatactctcctgaaggagggtagtgctttcactggcaatgacccaagaccatcatctggggcctgccagagtcaggcacagccccggcattagaactttgggctgtaagcctgtcctctgtgcttatgtgggtggtgcacaaagcacttgcaaacatctgtgtgcagtgctgctccattcggcctgctgaagctttcctgccctgttgccgctgaagcagggagtgtgggaagcgcccagctcagagctgggccagatgtggccatacctcccagcagtgcaagcagcatcactgcgccaggccagctgactcggctggccctggtgcacagtgcttaggggcttgtggccacgagccatgccccaccacctctcctgtttgccttggtagcttcccagcttcctctcacatgactgtttctgtttacttctccctctggccttcctgcctgcggcgtccctgtgccacctagagtctcatctaccgcactagacatagcctctgcaatggccccgcaccagggcctccttccagggcatatcccgtctctgtctcacccttctagtctgcgcttgcccttctcactccccagctctctctgttactgtcagtggagggtctgtgcactttgtcgttttgatcctatgacgttgtatctgtggctcttccttcaagtgcccaggagaggcccagctcctggggccagaaaggggttagtcttgaagtcttgggttggacatttcaccatggccagcccagagctcggctggaaacagatgagagacaacatgtgaggaggcagacaggagctggggatccaggctctgagcacctgagaggtttgggggaaggtattggtaatggattggattgtgtcccccaacaaaagattttcaagtcctaacccctgtacaggtgaatgtgaccttatttggaaatagcgtctttacagaggtaatcaagttaaa

SEQ ID NO: 104503 - DNA, 1011 bp, Homo sapiens
taatccacccaccttggcctcccaaagtgttgggattacaggcgtgagccaccgtccccagcccatgtaagaccctttttaaaattaaggtcacatttcgagttattgggatgaggactccagtccacctctttggagagttagagttcaacctgtaacaattttaaaagatggagattatcctggattatctagcggtccctatctaatcacgtgggcctttaaaaaatgataactttctctggctggagccagaagagcgggggcaccagaagggaaaatcagaaggttatgatgcgttgtaccctccctggctctgagatgtttgggcccaggcacagagaccggagaggcctgaggagcagagggcatcccttgcgggcagctagccaggaaacctcagtcctacaactgcaaggaatttgattctgccacagccaccattcatgaagaagcagatttttccgagaatcttccaataagagctcagcctgataagactctaagcaaaaaaccccctgagtcaacctggacttctgagctacagaacggtgagataataaacttgtgttgtgttaagtagctaagtttgtggaaatttgtttcaccagcaagagaaaacgattaccattaccttcccatttggctggcccttcaatgccttaaaccaaagaaatggcctatgctggaaatttctttgggtctcaagtttaccttcttgagtctttgaataatgccacccacctgtgcagcacgtgacacttcccggtacatttcacacataatttcattcaattctctcagcagccctgagaagtataggtatattatgcttcttattttacaaaggaggaaactgaaatttaaagaagtgattttgcttgaggcttcacagaactggggttgcaagccaggtttcctgcttccaaatcacatgcacttttttgccactgcccccggctgcctccgtgtctccagacatctgttgtctgaacacagtttctcctatcc

SEQ ID NO: 104504 - DNA, 1043 bp, Homo sapiens
ctccttccttgccatggcctctggcttcaccttgcccaatattaattaattgattgaaatgggaggaagtcgagggtgtgggcaatgcagagacacctggcttggtgccctttgcttccttaagcccctttacagaggggactcctgagagcagatggaaatgtctgcagggagtatttttttcaaagggcccccgaaagcattctgcctagcaacaaagagcctttcagaatgcagctccaagaggaggcgaggagcttgcaagctgagaaccgggaagggctggagtcgctgctacaactggctccacaaaagaggcaagccgcagaggattgagtttcatctcggggtacagctgtgggggctgaggggccggggctgggggttaaggctagggagactgagaaggtctttaggtgaacattacagtgtgtgtgtgtgtgtgtgtgtgtgtgtgtgttagcaaatttgtgttttagtactatatataacacaaccatgtggaaggacatgttcaactagtttcctagggagccgtgtgttcttaattaagaatagttttaattataaaagcaatgcatgcttgttataaaattaaaatattctagaggtatgtaaagtaaaaattgaaagcctttgccatctgccccaagtaagcactgttaacattgtgctgtgtattctcccagacttgtgtgtgtgtgtacaatgttttatacgtacataattaaacatctgtataatagatatgcaattataatgactaggttttcttgaatgcttactatatgccaggctctctagtaagtaagtgccaggtattccatgttttcatgacctcatttaattcttgcatctctgtgaagttagatattgtatacatttataatctgctttcaagggagagggatgtgagactcagtaaggtgcaaagaggtagaagcagagtttgacccaggcgccgtggctgcactgtgcacactcttccctgccagcactgtgcctgctatttaaaacaatgtggcatcagttcagctgttttt

SEQ ID NO: 104505 - DNA, 1043 bp, Homo sapiens
ccttccacagtcagcccagttcacagatggctccttcttcctctgaaacccctctttgaccactccagtcatgatcctccctgccccgtcttggtgctcagggtagctagtgtgaggggctggaatctggcctcgccaggtaggtaagggatagagaggctcagtgtggaagaggccttgcatggtgtccaagggcatgcagcctgtccatgggaggttggaatccaggcaggcaaagaggtcagtagtgattgtgaaaccacaaatgccccagtcagtggatggaatactgccaaggggactctagggcctatgacccttgggaatcatgtgggaagaccgaagactctaataatgtgggaagaccctaattttttatagttttagagatggggtttcaccatgttggccaggctggtcttgaactagtctggggagggaggatgggaagaacaaggtatactagggagatgaccaatacaacagccagcccagggcttgggaacaaggtgggatccttgctgttgcactgaggtttacattgtggaagccacagggtggggtccaagctgatttataccttctgagctgatttatacctgaaagggatggttctggagctgggggagggaggctcttgggaggaggggtgcaaggataaggagccaggctggactggataacctccctcttctcatctctcctgtaaagcacctagttcgttctttaccatttgtttgacccttagcctccgaatgccttttacactgtggccatgtcctcatggaacttccgagtggctctgcctaattcccattctaggctataaataccttgaaggcaggatctgtgtctgcatttctaataataataatgacattaacaacacccatttactgagcatttcctttggatgctaagagattacgtggatggttgattccatcctcctgttaaaaccttgaggtctacttatccctgttttaaaaccttgaggtctacttatccctgtttgacagatgaagaaactgacgctcaaaaga

SEQ ID NO: 104506 - DNA, 1318 bp, Homo sapiens
taatttagattgcttttgaaaagcaatcaaggagggaatgaagtgatcacacatcaaagggaaaaagatatggcaccaaagagaggcaatatgctttgcacaactggccatgtcaggttgctctgagctttctccagcacaagaaatatcagaaagtccatctgagctctcctagccctggtgtggccccattcatctttcttcgtgtccattctgtcagtggataagaaggtggagaaggcatatgtggcagatgattgctgggtggagacaggactcttcctcactcagcctcagtttcctcatctagaaaatgaaaaggtggattagattatctttcatgcccttctctctaggtctacaactctctgccaaagttgttttgaagacctataattgtgtaacataacaaatggacacactaattacctgcttctaatccataaggttctccttgctcagtcttcccttgggtattattaggaacagaaaggtgaactaatatttctgtatctctctcctgcttcaattatccgtgctattaattttggtcatggatttttcagttgtcagccttttgttttatttgggttcttacaaaaatctgtgttattgaagtataatgtacacatagaaaaatgcacgtttggtaagggtacagctagatccttgctttttgtgatcactgtcttgtattctttctcccctcaccccctcatcctacttccttctaatttgggatgggcacagaaagggtctaggaccagagtcccattccaaatctattgttcccataggcttctggcagagggttgtttgctaaatgagtttgggggatttgttgtgaacctggtttctgtttctgtagtcactgtcaagggtgaatatgaaggattgcaggtgttctgagggcgtctctgacgggtataagtcacgtcgtacacggccttgcatgggacatccagtgagcgagcgttcggtgaaatgagatcgagcctgagggtaagaccctggtggattgaagaggttgtgagggaaaaaggaggcagggcaggagagagaggcagagcatgccctgtcagcaagaagcaacacagatgaagctgtggcagggtctagatttatataagccaagggggctggtggtgtgcacaaaggggcagccagtaagagacagtggctgacttcttaagctattcttcccgggggaagaggcccagggctgggtaagactgctcgatttgtgattaggaggttggtgaagactgtgcttccttgaagaggtgaaaggtgctgtgtggagagagaaaggatgtgg

SEQ ID NO: 104507 - DNA, 1090 bp, Homo sapiens
cctcctcgcatagctgtggtttatttaggcccctgccacccacctgggcacctcctctgcatggctccccatttcacagaaggtgctgatgcctttcttgtgattctgccagcagagaaattgaggtcagggagatcagccaagcacacttttcggtggcttttaaggaggagcaatcagttagtgatcactgtgggcagagggctaaggggatggcttcaaggagagaaaaaagagcaatcggatggttcctgaattgtagaaatgaacacagtgaaagtaccaggctgggcttgggggtcagaacctccctcaagcccctgaacatcagcttccccactcaggatttctcacttcagtgactgacttcatcatccctccaattgcccaggccagaaatctgggagtcgtccttgacttgtctccctcaccccacagtctaattggctggcaagtcttgttgtatctattttctgtctcttgagtttagtcctttgccgtggccactgcccactaccaagggcccaccagctcttacctggactggttcagccatctctttccaggccatggtcttcctgcttcagctctcctccctcagctcccccatccattcccctctgcagtcggaagtcttctagaggtgtacatttgaccttatcatgtcagctccaggttagagcctggagttactataacgattacctccagggcgaagttcagactcattagccttccaggaaaagcagctcttcttgccctgcccctgtttgactctctgtgatgggggtcccaaaactaccttaggtttgataattcacttgagggactcacaaaaattagaaaagctgatatactcatggttatggttcattgcagcaaaaggagacaggttaaaatcatccaaggaaaaaggtgcataggtcggagtccaggaagacaccaggcataaatttccagttgtcctctcccgggggagtcacttggatagcactgaactctcccagcaatgatgtgtgacaaaacatagcagggaaacccaactgccccttggtgtccagggtttttgttaggagaagggagtcagtca

SEQ ID NO: 104508 - DNA, 1071 bp, Homo sapiens
acagttctcagcaggatgacttttaaaccaactttgcttgtagattttagtttggaaaacgggccacctctttgacaggcatgtcctgtggaacagctagaggcagaggctggcatgaaaatgccaacttttctttcctttctagcattgacatctgatgttagcagaatgatgaattcaggggtgacagatttctagaggatttgtgtcctctttaggccagtacaccctgtcatctatacgaatcccttttctaccctgaaaaccatcgttgaggctgatttaaaagggaaggtggcttttcttgtcgtgagtgaaaaagaacctggtatgttctctgttgtgcatctttgaatggggaggacgaaaactttggagaggtgtgttttagaaaagaatatgttgtttttcttccttctttaaaatggaaatcatgccagagtggaaaatgtagaaacgggaattagaagacctgggttttaatcctgtttctgcacctaactggctgcctgacctttggctgttcccttactttatctgggtgcaactttgctatcttaaaataagagtattggactagtttgcaaaatttagggtttttgtctcttatctttgcatttttccatgtttatgtcacctttattattttctgcatatttttcttgaaactgatccatctattctgtacaaattgttttggagggaaatgttacaaacttctgcaaataaaaagtcagcattgatgctgtatattggaggtaactctaagacaaaagataggctggttcagagggcacattttttgttatgtatattttgtctcaattaaaaaattaaaaacaaagaaaaagcaaaaataagagcaaagaaaacataaaacacaactattaaaacaaatatactgtatttactcttttacaactgaaagctttcatccatcagtggcagtaaatgatccaaagacgaccttctggctccaaaggttttggtacagatgatgtttctagtgcaaactagcacaccatactgcccttgccagagagccacacatctttcttaatcacaccgtag

SEQ ID NO: 104509 - DNA, 1071 bp, Homo sapiens
atacctaatttggagggccctgtacaaatgaaaaggtaaagccccttttcaaaaattaagagtttcaagacagtactggcacagcaccaaaccaagcactggctactgaatgctaggtagattgtaagtccaggaagctggccccgtggtttcttcccagaaccttgtataaggagagggagttattccttccttattaccccagtcttcctcatcactgcatgtgggaattgaacagcctctgaagaagaagatgtcttccttgactcagtgggcctatgtagagaaataataaaacacagataaaaggcacgacaaacattaaataaatactggttgcccgagacatgtagctaaggccatgtagacatataaagaatgttcaacttttttggaaacatctgaacataaatcagatgtaatgacagaaagccttgtcatccagtgttccttggagcaaataggctgtgaccagtctaattgttacagacttgaaagacagtctctatagaaaggcctgtgccctgtatgataacacagtttactagtttctataaagcaacagacaacctacctgcaagtcataatataatgaagaataactacaataggatagtttttgtatttcccaaatattctctggaatattatttttaagaaagagattctacctaaattgggtaatttgacaaataagttttggaaaggctcatattctattccctcttggagatacacaattcatattaaagtcccatggctgtgaaggaagccctttaaacttttaacacaatgttatttgattatgacacctcttttagaaagtaataactaataacaatgtagttagagaacagggattctgaagcatatgctttggaaaatgccggtgatgtacttctaaacttctgagatgcatgatctgggatcacaggatctgggtttcagagccactcacaactatagacaagttacatggtcttctggagtctgtcacccaatctgttaaataataatacccatatgacacagttgtgtggtttaaatgagacactacaaaatgagaagaaa

SEQ ID NO: 104510 - DNA, 1062 bp, Homo sapiens
ttctcatccttatctctaggcaaccacagtctattttctgcctctatagatttgccttttatgggcattgcatataaatggaatcacacaacgtctgttttttttttttgtgtgtctagcttcttttaataagcataatgttttttgaagttcatctatgtggtaacatagatccatactttgttccttttcattgctgactaatattccattttaggatatagcacatttggtttatcgcacatttgtcagttggtagacatttggattgtttccagtttttggctattgtgaataatgctgctgtggacatttatgtgcaaatctctatgtgtacataggcttcattctttttgagtgcctagctacagttccagtgtatggctctaccattatgcatttagccaaactccattggtggcaatttacttggttttcaactttttgggatgatataaataatgctttatcagccatctttgtacatacatctttgtatatatgagggactgtttttgaaggatatgtatttagaagggaaggttctgcatcagtggctataaacctttgaaatttcaatagctagcatcaaagtggtcttctaagagaagttgcccctaatttatgccaccactgtcctcacacacttgtcaatatgggccggaattaatagtctaatctcataagtgaaaaatctctcatagtcatttgaatgggaatgtctctcattattagaaaggttattgaccatttgtaagtccttttcttaattttgtattgggttgttgatcttttcctatggctttgaaataactatattttaggaaattggctctttgcttataagatgtactgtgaatttttttatttgtcagtttatcttttattcctccaaaaccgtgttcatggctgttgtgctgtacagatgttttacatttttaagtaatcatatgtgttaggagagaaacccctgtgaacattttacagtatcacttagctatttataatatccccagaaggaggtgaggaaggtaaaatattggtggggagaaacctgaggaa

SEQ ID NO: 104511 - DNA, 1173 bp, Homo sapiens
tcctttcttaaacaattgaggtagttcttctccctgccccgaataccctttgaaaagttggccaccctctgtagatccccttccttttgcggggaggagggagtcttaccaggctgtgaaagctggtctaaaaaccccagccttgtccaaggtgaggcccatcagaatttgacgtgcccccttggagggtcttgaagaagcaatctggcatctcaatgaggcccctgtggcacaggattgggccattaatagttaaagtagttaaatttctcacagcccaatgtattggaaaggcagcaatgttttcatttagaccttagggctggggtataatttaaggagagtggattttgatttaggaactcagttaacgagtgccagccttgtcaatttttttttattgtgtcgaaaagcacatcacataaaatttactatcttaaccgttttaaatgcacagttcaatgacgttaaatacattgataatgttgtgcaaccgtcaccaccatccatctccagaacacttttcatcttgtaggactggaactgcacccagtgaacaggaactccctgttcctcccccattccctggcaatcaccagtctactttctgtttccgtggttttggctcctctaggcatctcgtgtgagcggactcatacaatatttgtcctctgtgtctgctgtagtttagttagcgtaatgcttcagggttcatccgtgttgaggcgtgtgtcagaattcccttcctttttaaggcggagtaatatcccattgtatgcgtagaggccgcatcacgttcatccgctcctctggggagggacacttgggtggcttccgtggtgtggctcatgtgctgcggtcttgtcagtttttagccatggctcgggaaagtgacttggcccctcagtacctccgtttcctcatccattacatcggagcctgtcctctacgtgggactgaagtaagaatcgttgtttgtgacagtgcgtaactgcaacagtccatcgagttgaagttatttctgagagcactgggctagcatttcttagggtatctgctctgtggccattcagctttgccagcctgaagtgtaggaggaaggtgggagacggttcagagaaacgatacggagaggaccgggctgtggctgctccacagggtgttttgggtggg

SEQ ID NO: 104512 - DNA, 1022 bp, Homo sapiens
ccgggaggttgaggttgcagtgagccaagcagagattacaacactacactccagcctgggcaacagagtgagactccatctcaaaaagtaaataaataaataaaaataataaataataaaaagtaaaattaaaagataaaaaattcaataaaatgaaataaaataaagacagcttttatgtactcctaaatcagcggtgggaaatagtttctacctgatgtgccaactgtgctggattgcagtgacagctggcggtctgtgttgagaagtattctgaggctgtgtcagggtcagcaggagagtatcagatctgccctgggcttggggctgggcatggtgtatatggacggtgtgtttattttctctgctaagcgtttatgcttagattctgccatcatgctttaggtgacttattccctcattctctggtctctttttctggccacacttcagcttatcaacatttaaaaagccatctggctgccatctcttctccctaattcatttctagggtggatttgaccaatctggctggcccagctgtggtctctcctagagcattgtttcctgcaatatcttcccaaatagaggaggaccatttttggatctgcagtctgctaataaaccttccaaattattaacgggtctcttaaaatctggagcccaagctaagtaagcactgtctttcagaagtactctcaatggttcggaggctagcaggactaataatacatcccttgatcctgttaatgcggcttaaaggttgtgttagctttttccctgtgtttgtaaagccgaagctgtagtgtaccccctgctgcggatggtgagggcaggagagccagatgcagtgggggcaagatctcctcctgtcccctccctgcctctgtgactcttggtggcttggggggcctggggcctgcaggggtgacatatggccccaccgaggtccaaaggccacaggtctcattctgtcacaatgaagttgtctgccctaaaggtccctggatcactgtcagtct

SEQ ID NO: 104513 - DNA, 1045 bp, Homo sapiens
gacaggcatgacactttctttgcctgttatgtgtgtgtttctcccagtgtggttcctggaccacctgcagcagaatcaccttggaggaacttgtaacaaattcaaggaacttgaattctaggaaccaccccagacctactgaatcagaatctctgttggggggcagtgggtggaccctgggaatctgcattttacaagtgcctcagatttcatgaacttaacataattggccctggtctatagtaaactcaccagtttggctgtgtatcttttttttgaaagcaaaagaacatttaataattaggtagactattgctgagtgaggtgggaaaaataacacccaaagtgtgtgtgtgtatgtgtgtctgtgtgtgtatgtattacagttttaaaaataaaaaccctatgtccttatatatttagatatgtataaaaagagtctttggtttttgacgattggtaatgaggtttacccttggggacgaggggtggaatagggtggtagtgtcaggggacaggggaaagaagaccttttcatctttatactgttcaattttgattggcttctgaaaaaaatgagcatgtattccttttctgatttaaaattccacgaagttgacagtaagtaaggactttgttggcaaaattcctgctagagaggatgctcagacatcagctgaactgtaaaagaaagaaagtgacacctgcaagagctatttaaattatgctgaacttactgtggtgctcattatgtagtgtaaggatgattgctgaaatgaaacgtaatattttaccgaattattcccccacgcagtgaggaagtttttccatactctttcaaaactttgaaatatgggtagaagagtggaaaagttcagcttaaccttttaatttaccgagtttcagtcaggagccatcgtgatgcagtggccagagtctggggtttagactcataagacccgattttccatctctggtctgtcttttgagcgagtcacgtctgcattcttcattctgcatcttggcttcctcatctgtgaaatga

SEQ ID NO: 104514 - DNA, 1749 bp, Homo sapiens
ttctgtctttggcagcaagtgctaaagggagaggcttgtctagggcaaaggattcatcttcagcagctggagaccctccctgctggtacctgttccctggtctacctttcctttcctccttgttgctctctgctggatttcctggccattgtgatactttttggattccggattgcttgtctgctcctggcagatgtagcctgccatccccttgcttccgattgctggtgagagcattttcaaaatacagttaatgtagatcagtaagttttccaaccatttgtcaaatagaaagacctggatttctgtaggcgggtagagttctcgctgagagattcaagcttggcaggatgagacagttccttaggggaccttctatagcttatagtgccttaagagggtcagagaaatgacatgagaagactcttaccaatgaaacatctcagccaccttcagggacacaaaagaatggatgtcatgtctgtgatttaatttgtactaaagaatgtgaactggccaagcgacatggctgttctccaactcagtgtctcggtaggacacttccaagcagagttggcagtcacaatgtctttactttgatcagtggcctctccagacaggatgttttgggtctcccaaagatctattaccttggggaaactgaggcagaacaacagtcactctctggcttctgacgtcttatagttgattactccttgacctcttgctccgatcttctggacccttgatcatttgcctggttgtggttgtttgaatttatttgtcccgtgaccctcagctaatctagggctccatccttggcctgatcctccaggttcaggccccaccctgagcatctctgtcttgctggatctcgtacttggcataatatcaccattgaaactctgctccaaaaatggcagaggctctactgctgtctgccagaaacatagaattatgttactgggaattgtgtgaaagaaatgctgagaatgtggtgggccagttcacatagatttagcttaacaaatatttattgagctcctactatgttccctgcccgcacagactttataattctgtggggaagacaaaggataatttgtaattacaaaagtgttgagtgttatggaaggagtggtgcagtgtgcatgggggaatctatagcaaatggatctaaagggctgaaaatgctgtgggtgatttactgatactgatttgtaaagctgagttgtattgactaagcttacctcaccatcattgtttcctgagctctttaggatctagacagaaccatctttccatttagagaagggtcagaagtcatcaaaatatttaaggggtcagaaagatcagtgcttctaagagaaacacacaactccaggtgtaaaagataaaagtggttccagaaaggggattttataatagctctattcaggatggtaaataccatcgtgggatgagtgcttttaaggtgaaattaaagccaggaatcagctgaagaagattgaaacccaccttctcttgatagaattaagctaaagtcacagagatagatgagacaagaaagtggaatgtaacgtggaaggaggcagctgtgatgccctgggtggagtcacccagaccggggttcaatcacggctcatggtgaatcagctgaatgaccttggatgaaagtcattaacttttctgagttccagtttcctcatgtgaaagagggacataataacacctcactgtgtgtgtggg

SEQ ID NO: 104515 - DNA, 1224 bp, Homo sapiens
ttctttcactgctataaagaaacacctgagactgggtactttataaagaaaagaggtttaattggctcacagttccacaggctgtacgggaagcatgatgctgacatctacttgggttctggggagacctcaggatacttacaatcatggcagaaggtgaaggggaagcaggcacatcttacatggcaggagtaggaagaagagggggggggaagtgccacacacttttaaacaaccagatctcctgagaactcactcaccatcatgagaacagcaccaaagtgatggtgctaaaccattcatgaaggatccatccccctgatccaatcacctcccaccagcccccacctccaacactggggattacaatttgacatgagatttgggcggggacacaaccaaactatcagaccgttataaaaataggttaataaattatgacacagtgtagtaagtactgggacagtggtagaaccaggcactgtggaaacttacaatgaagtttcaactttaccagggagagctggagaaactcttatagaagaaggatcttttaagcaggattttgaaggatgaatagaagctctccaggtggtgaaaggcattacctgaagagaagacagcatgtgcaaaggtatgggggtcacaaaagggtcagggtacttgagaaatggtgaggagtttgaggtggctaaaatcctgagtaggtggaacaaaatggtggtgggagatgaggctggaaaggagaagagcttgaagttcctgtctgatcatcagatcctgtaagtctttgaccttgaagatggtatggatgagagtcgtatttatttgttgtggtaaaatacacaaacacaaagtttaccgtcttacccatttttaattgtgcagcttagtggtattaaatgcattcacattaaatgccacccatcttcataacttttttcatcttgtgaaatgcaactctgtacccattaaacaatagctccttggccgggcgcggtggctcgtgcttgtaatcccagcactttgggaggctgaggcgggcagatcacggggtcaggagatcgagaccatcctggctaacacggtgaaacactgtctctactgaaaatacaaaaaaattagccagctgcagtggcgggcgcctgtagtcccagctaatcgggaggctgaggcaggagaatggcgtgaatccggcaggtggagcttgcagtgagccgagat

SEQ ID NO: 104516 - DNA, 1060 bp, Homo sapiens
agtattaactacagtgaatttccttccttctccatctcctccatcctggcctagcctgccattacctcttgctgggaccagtgcaacccaaagtttctcagggtctcctgactcagagcttctcacccacagttggcattttgggctggatcatttgtggttgaaggtgctgttctgtataacataggatgtttagcagcattcctgacctgtacccactagatgccagtagcatccctgctcccagttgtgacaatcaaaaatgtctccagacatagccaaatgtcccctggggacaaaatcactcctagttgagaaccacagttctaagcggtctccctgcttcttttcttgtcccatagtctactctccccacagcagccagcagtaatctgtacaccatttaaatctggccatgtcacttccctgtttaaaacccttcagtagcatctcattgcatgagactagaatccaagcccctcaactgcacttagaaagccacgctgtgctcacctctttccctcccctggtcactctccccttgtcattctatccagtcatgctggcctgtactggtttctggacttctccaagcttgtacttgctttgggcctttgcacttagattttccatctttctggaatgctcttgccctggattgccacttgattggctccttcttggtattctgctttgaggttgcatgccacctgcagactaacccatcttaagtagccgaacagcaactctctattggatcagctgacctgaattcttagcagagcactaaaagctatatgatatttttcacgctttctttgtttcttctcttcaccaggactgaaactcaataagagctttgatttctcttgttcattagtgttttttggcacctagaacacagtgtaggatgtttagcagcattcctgacctgtactcactagatgccagtagcatccccgctcccagttgtgacaatcaaaaatgtctccagacatagccaaatgtcccctgggggcaatgggtgttctaggtgccaatggtcacaatttttgttgaa

SEQ ID NO: 104517 - DNA, 1025 bp, Homo sapiens
agtgtgaatcgctcagtagggcccatggagtttcctcaaacttacttgattgtgtagatatttttcatggactgggtcacaagactctgttttctgagttacattttagaatatgtcaggctgcacaattcatggatcatctgggtgctttttctttttgcctctggctcagttccctaatgttttatacttgtctcagagagcagtttgaagagggaaagaagtaaaacaaatgcacatctagttgagctgagtgatatcaatgtagtgctttgagttcacctaggaaatgtggattttgacatttccaattacagagtgctcaaccattgatttaaatggtaatttggaaacagtgcagccctaatcaatatgcattgcgtgtgcccatctgtgcgtgatggtaatggggtgcacactgctgcagcagagtgttccaggttccttgaatggacctggctcttccccctgggattgcatagccagtgctaggtgataatggcacagatgaacacagagaagcccatgttcccttgtgcctcagagtgaacaaatctcagctacaaacccaggtgcacaagaaatatatttttctttctttcttggtgactcagtctccatttcacatctctatcttttgtttttttgagacagagtcttgctctgttgcccagactggaatgcagtggtgcaaccttggctcactgcaacctatgcctgttggatttaagtgattcttctgcctcagcctcccaagtagctgggattacaggtgccagccactacgtccagctaatttttgtatttttagtagagacagggtatcaccatgttggccaggctggtttagaactcctgacctcaagtgatcctcccaccttggcctcccaaaatgctgggattataggtgtgagccactgcggccggcctcacatctttattctgctgggggtgacagaaataagtataagtcaatttggggtttccctccagggttgtgctccaagatccagggggacttaggc

SEQ ID NO: 104518 - DNA, 1030 bp, Homo sapiens
tgacagaatgaggctgtctcaaaaaaagaaaaagttttaatcttataactcatagctcagtgtttttgttttgttttgttttgttttgtttagatggagtcttgctctgtcttccagcctggagtgcagtggcacgatcttggctcactgcaacctccaccttctgggttcaagcaattctcccgcctcagcctaccgagtagctgggactacaggcactcgccaccatgcccagctaatttttgtattttcggtagagatggagtttcaccatgttgcccaggctggtctcaaactcctaacctcaggtgatccacccgcctcggcctcccaaaatgctgggatttcaggcgtgagccgctgtgcggcttcagcttttttctttgatatccttcttagttggcttgggctgctataacaaaacaccatagcccggatggcttttatttacttctcagaattctggaggctgggaagtccaagatcaaggtgttggcaagttcagttcctggtgacggcctgcttcctggcttgtagacagctgcctttagccatgtgctcatctggcctttccttagtgtatgcttatggagagagagaaatctctccctttcgctccttcctcttttttttttttttttttttttgaattagggtgtcattctgtcagccaggctggagtgcagtggtgtgatctcagctcactgtaacctccaccccctgggctcaagtgatcctcccacctcagcctcccgagtagctgggactataggcgcacaccaccatgcctggctctttttttgtatttttggtagggatggggtctcaccatgttacccaggcttgtcttgaactcctgagctcaagcaatccacccgtcttggcctcccaaagagcattattacaggagtgagccactttgcctggttggctttcttcctcttcttataagggcactaataccatcaggagggacccatcttcatgatcttatctaaccttaatcacctccccaaggctccacctgcaa

SEQ ID NO: 104519 - DNA, 1069 bp, Homo sapiens
ggatctgttttttttccagtctcaccaacagtctttttgccttttagtcctggtcaaaagcccagcgtgctcatcacctctgggcatatcctagggcaagaggagcagaaaaccctgctcttccctggtctcctgtctttggtttttcagttcaatgtggaaaacagtgacttacgatgtctcagccttgctgaaaatttagaaataagcgctttattggtcagagattttaattcacccaactgctcaatacaaaagcctagtttcaatctttgaatagactctttttagggagtttatgttttataaaatgaatttggccaattattattattttataaaaattaaggttgccatgaaaatgccttgagagagaaggggatgttgagttttggacagttcaggttttatgatattttcttggtaggaaatgtgcttatctcattttggaaggattgctactactgggccagtgaacttttcttcagggccagttaggcattaattgccctggctgatccttttgctttttacctttcatcttttattttaacaactaagcagcgagtaccctgagttttatcagaaatacaccaattaccaggcattcatcaggaaatgtgtccaaatgatcttgtctcttccaaatactaaatttccttgcattctggctaaaggagttacatcttattcctttagaattgacacccacaaggtcaggtcaggatatggctgtccctgaaaccctctggaatcttttcttttaaaattctgtgtgttaatcaccatcataattattgatgtgtgtctagggccctgcattttctatggctaactcccagacatcacttactcttggcccacacaatgtacagtagggttagtgtgaactcagtttcagagacaaggaaactgaggcccagttaatgttaaatgacttgcccaaggtcacaaggccgattttctcccaggcttgtgttccctgacacattgtttgcccgaagctgccccttgaaggattgatgtcagcagcagatggcagttttgtggggggactggcagcctcttg

SEQ ID NO: 104520 - DNA, 1073 bp, Homo sapiens
ccagtagagtgacaaaccatcatatagctgttgattccagaaactgaattaaattgcacagtgcaaaaaaagggaggatcttaagtttttggaagaaaaatccctaacccaagtgctaatgtttggagtttgcagaagcctctcaagacttaccaacccgattacttttcctgctgccttcccttttgtgagcgtttcttcccctttttgcttgcagtgagttctgctctcctgtaggctacaatgtgtcagttgttataaaatccgggaggcggagtctagtgacgtgagcagtgggggagagctcagccagccctgcagggcgagcagtccagccttgtgttcaccggagcttaagcgttgcagcaggaaaacttccatctcgctctcctggctttgatcctcactggacatcagaccagaggcaccgaagggagggaggatgcgagatgaccggccctttggcaacctgaccatcgacttagcagagccttcaaaagcaagccaggggctggctgcacgaccaaagaggcgccgcgcctctcgtggatgtgtgtgtgtgagtgatccagcgagtgtgtgtgcgtgtgagggtgtgtgtgtgtatgcctgtgtgcacagcacaactgtgtgcgtgtcccggtgagtgtgcctgtgcatgcgtgagtgtgtgtacgtgtgcatgtgtgtgtgagtgcgcttggttattactattattattatttttggaagaaaaatctttgaaaatctggggcaggttactgtgctcctagggtgattcttcttttgcaagaggagctgaccagggcaagctactagagccatttctcggcaagtaaagagatttttccttccagaaggagaaggatttttctccctgctctgcagccaagtgaaagagattagtccctaaacctgtgaaatcgaccagagctgtgtgattaccagggcttgagagaggactcgaaaagaaaaggagaaataaatcaaacagcctgtcagttcctttggccacgtcagaagatgtcatctcaaactaagttcaagaaagacaaagagatcattgctgaata

SEQ ID NO: 104521 - DNA, 1526 bp, Homo sapiens
gctggagtgcattggcgtgatcatagctcattggagccttgacctcccaggctcaagcagtcctcccatctcagcttcctgagtagctgggactacaggcacgtgccaccatgcccagttaatttttgtatttttttgtggagacagagttttgccatgttgcccagtctggtctcaaactcctaagttcaagtgatccacttgcttcagcttcctaaagtgctgggattacaggcatgagccaccatatccagcccagactttttttcttgtcattatttcccaaacaatacagtataacaactatttccatagcatttacattgtatcaggtatcataggtaagatagagatgatttaagttactcttgagaggatgtgtgtaggtcatatgtagacactataccattttatatgagggacttttgagcatctttgggttttggtgtctttggcggtcctggaaccagtgtcccccacggataccaactgtccataagcaaagtagaggtttatttgtttgattatagtggtgagaaatgaatgaatttctttctctgtcctttacaggaagaagttctaaaggattttgaagacttggctggaaaactcccatggtcaaaccccttaaaagtgtggaaaattaatgccagttttaaaaagaaaaaagcaaagcgcaaaaagataaatcagaattcaagtaaagagaagattaataatggacaagaagtcaaaatcgatcagagaaatgttaaaaaagagttcactagccatgctttagattctcatatcttagattattatgaaaatccagccatcaaagaggatgtatcaacattaataggtgatgatttggcatcttgcaaagatgagactgatgaaagctcaaaagaagaaactgagcctcaagtgctgaagtttagagtcacatgcaacagggcaggagagaaacattgctttacctcaaatgaggctgcaagagattttgggggtgctgttcaagattattttaagtggaaggccgacatgaccaactttgatgtggaggtaggtataggctctgactgtggtgattgaagaatgctgtcacagatttgtagaatttccagactaacccaatgttatgcacaattaaactgaggaaatagtagggtgtggttaagaagagcataggctatggagacagatttagatccaaattttaactccacaactgtataactttggactagatagtctctgagcctctgtttcaaatggagccaataatattatgtacctttaaggttatcctgaaggataaatgaggtacatttaaaatatttggtgcaataccttgcatacactaagtgctccatagatggaagccatcaaggttgagttgtctgttttctttttctttttcgagacagagtcttgctctgtcacccaggctagagtgcagtggtacgatctcagctcactgcagcctccaccttcctggttcaagtgattcttgtgctcagcctcccaagtagctggggcta

SEQ ID NO: 104522 - DNA, 2024 bp, Homo sapiens
tattatactaagaggacaagtcatataactaacacagttgtctaaaaaaaatttttttgattcagaattctaagcagtttactaactcaacttatttcatagacatgtaatggcaaaggtctggtttctaaaactacagctatttttcatgcctcaggatgcatgaaactgtttttgtttcatatagtccttctattttgtatcttttgcaagtgtttgactcatgagaccttctattataggatgggatccaagaagagaaactggaacctttatccagcttgcctacgggagatgagccgtgtctgcacacctaccacaggccgagctgtactacttactcaagacacaaaatgctttaccaaggtgctatacacattagctcaaaatcgcagcctgtggcaactttgggatctttttgagatttggggatgtttgtttggataagatttgttttctcttcccctgaggtttcctatcttggcagttaagaatcctagttgatgtaaaagtagattgtcaacctaattgttattttttttgtgtgtacacaggcgttatctggaatgcgacacgtatggcgaaaggtggatacagtctgggtgaacgttggtggtcttcgtgctgcagtttacgttctgatacgtacacctcaagcttttgttcatccttcagaacaagacggagaaagaggaactctttggcaatgcaaagaatgaagatgactaatagtacttgtacttcccaccactggaaatgttagcataaaagaacttggagaggaaaaaagtattaacaaaactgcagtctgcactctttaaacctgtttaaggctcttcatcctggttagcaaaaggtgtgaatgtaatgtgatggaatttaaaagttttatgagaccaggcacagtggctcacgactgtaattccagcagtttaggaagccgaagtgtgcagatcacctgaggtccggagaccagcctggccaacatggtgaaaccctgtctctactagaaatacaaaaattagccaggtgtggtggcgggcgcctgtaatcccaactactcaggaggctgaggctagagaatcacttgaacccagcaggcggaggttgcggtgagtcgagatcacgccattgcactccagcctgtgcgacaagagcgaaactctgtctcaaaaagattttataagaaagcagagcttttccttgaagctcttttgaagtggtagcttaattagtattttgttgaaaatactttaaagatgcctagtgaaaagcctactaaagtgctgtgagattggggtttagaacattttattttcaggctttatggcctattttccattgtgtcaagtgcaaaactaccctggcccaaaggaagggcagagaacataattacatcttaggccacatttcattctttgcagctttgctaatccagttgctcaagttctttacctcaacctgaaggaatgaagcattattacattttgtgaatggtgttcagcctataagacgaagtctcacaagacctataggaaagtttaccatctgccttaaatattaaaatatccatctgttattcacattaatacacagaatgaaaatagaggtctaggaattatcaaaggtactgcaaaaatactgtatagaacttatttgtaaatagcacatacattgatagatggggtgtgggaccaacaaaccaaattaaaagaaattgtttttctttcagtacactaaggtgtgtgttttcaaaaccaaacacaaacctgtcaagagtatttgttggctagtttcttaaaaggccaagagaaaaaaaatgatatatctttggaaaacttttaatttgggagttatgtgagttgttactttctcctggatcacgattcacatttaattgcttttccagttgcaacaagtccttcttgagagttttgtggaaaatggtgcttccctggaacaaagagtagttgaggtttttttgtggaactcatcatagtattgtttattttggagcctctggc

SEQ ID NO: 104523 - DNA, 2116 bp, Homo sapiens
agtttgagcaattttcccatagataacaccaataaattgagggctgcagagaccacttaagtggttctcttaacagtagtctagacatgacgtaatgagatttggcttaggagtgacaatggtaaggaagttaaaggattcaggaaccaaataccagttattgagaagaaagaatggcctcaaaacatcacttctcaaggaagccttgataccctcacccttactacactgtatcctccatttgaatgttgtcaagagctcttctcacaattgtaaataataattgtgtaattttgttttttttttcctactttaggttgctccttgagggcaggacagttcttatggctttatccgttgcgtaagcacagagaggtctgcgaggtcaaaactattgtcatgatagcaagatgcctgtctttttcatttattctcacggtgtgcagaggctacatgatgtgtgatgacatcctcattgatgttaatgaatggtgctatacttgaattttctaaggtgtcattaggtaggtttaggtatgcatacttgtttttagaaattatttttttcctttttcccatttttagaaatcaactcattttttaggttatgccttcagtaatctttgcaacctcaatattgtgtaatggttactttaaaatactgtagttttctttgtgcctaagtataaacataagtacattttgttgttttgtttgcaatagtggtttaaatattttcccaaaatatccaaatttaaaaattctacaactttagaatttaataaatttattctaaaatatttatatattttttcatttaagaatggatcggcttaaaaagactgcttctcatttacttactggctataccatctgtatactaataaaaaacaagatttgatttggaaggactgactcaaactaacgaaaatatgaaacctgtctttctgctttggagatatttacctaatcatgttctgcagtagaataatttagttcttttgtctttttttggagatgaggtcttgctgtgttgcccaggctattcacagctgccatcatagtgaactacagcctgaaactcctgggttcaagagatccttctgcctcagcctcctgagtagctggaactataggcatgcgccaccaagcctgggcttttaaaaaaattttaaaaagaattttgagacaggatcttgccatgttgctcaggctagtcttcaactcctagccctgagtgatcttgctttgggcctctcaaaatgttgagttaataggcgtgagccaccatacccagccaaaaatttttttagagatgggaatggaatgatcttgaatagtgttggtgccacctatgttgtggcatcattttgaaaccaatcattcagagtgctttttttggtaaggcattattttttaatgcaggtatgccactactgggaaaaaaaaaaaaacaggttttaaagctagaaatgaaaagctacttaagtatcttaaaggataagttactttattatacactagaaacatacacaatagctgaaaaacttaaaaaatctcacactgctgaatgtctctgctggctgaagtgtaagtaaaagatcatagtagtgccgctgttgagtgataaagcaacttgtcattaaagatgtgtgtgcagacatggattctgagttaatatctcatctgtagaagtatatatttgtcccttgctttgggattggtttctggacagcactcccccacccttgctggccatttgccaaggacaccaaaacccaaggatgttgaattcccttttataaaatggcgctgtatctgcatacaacttacacacatcctcccatatactttaaatcatttccagatttcttatacttcatacaatgtgaatgctatataaatagttgttacattgtgtacttatatttgtactattgtattaaatattctcaaatattttcaagcacatttggttgaatctgcagatgcagaacctgaggatatggagggctgactgtgctaatacgttatcaatggatgcgtgcataaacatggctggacttgttacttggcttgtatttgccaggcatcagcaccaactagttaaagatac

SEQ ID NO: 104524 - DNA, 1036 bp, Homo sapiens
tcagagacagaaaagtctttgtcaccaagaagatatactccatgagagagcagaaacaattcatcaggtttaaccctgctctagataaaataaaactatctgattcaatactcacacttctctaataatccaatacattatcccatctcaagaagagagagtcacagataagaaaaaaaaggcttcttgagaagtatgtgctctaatataaactaatatgccactaagaaagcaacctgcaaagtccagtaccagacttctggatttgtgacctaacaaggtgctctacaattaacctaacagtcaaaccagagtgttgtaaaagagaattatgtaattatgccaaacctccactcacaaaaaatatatggaagtaacctaagtttacattttgcaaatctcacacacacactagccctgacaaaagtttcaccagctttctcatccaagtacaagcgtgtaatatacttaataaatttgtcttataagggtaagaaatagtatgtaactacttgaaaaggagataggtagctggttaatttaaacaaaaagcccaaggaagtaaggtgcaggaaaaggataactgcaatgattagtacaggaaacccaaagaagaactgaatggtgggatagatgtactcagagaccatgaggcatcagtttcctctatgaatagaatattaggagatgtaggttaaatgggaccctgaagtctctcccaaaaagccttgtttatatgttttctgagcttaactattacttgagaatcaatttcacgtataaaccaacaaaactaacatttattgagcttccagctctgtgcttaggcactgaaaaatcactttccttaaggattgcaattaagcaggagaaacacaaataaggtgaacttctcttgttcgaaagaatatatttcaacattccttttaaaaggaaaacctgacctgcaagtttccaaaaatattaattactattcctctttgcctctcaaaattcccattctgttattttttaggaggaggaaaaaacagttcat

SEQ ID NO: 104525 - DNA, 1132 bp, Homo sapiens
gctttttcatttttcactattttccacatactacacacacaaatatgacctctctcctgaagtcacatggaatgaattgcagttacccaaatcatagagacgtcatatatctttgtggggtggttctttttggaatgctacccttgctgcttttaatcctgcagattcaaatgtcatctcccctttggtcatgccttccatggtctgttgttctatgacccaaactgcccttttaaaaaagcagttttcttctgactcctgagcagtttgtactgcgtgggtcatagtaattctggggttgttgtcattgctgatttaaattaccttaactattctgagctttttgaaggaatagtgtcttgtactcctgagctcctagtatactctgatgtctagccaactttaagtaaatggagtgagcgacatgtaaatgtctttatggtttgacattttattaatcttgagcattggaaaagtggctggtatgactaaagaactgaatttttattttttatctaatttgaattgcaactgtggacagtatagctgtagccccggacttgttctgtggattacagaatacgtggacattgatggttttctctttttactgagcagtaaggaaataaaagctgaagctctctggcccattacatttcatttaactgcttgttttgttttatttattatatatttagctgaaagctaagtccaacaaaccatttttaaagatgtgcctgccttggacaacagtgaaagcaagcgttaatgagtttggatttcaaaaaaaaatgcataatgaattttagggaggtgagattccattaaactgttacaggagctacatagttaaatatatcagaacttgaatgaagaataggtctgtgtgatacaaatgaacccagcctaaatttctgtcctacaagttttcacttcctggaaacacttgattggaggagctctaagcatcatatcttgagttatagaaaacaatcacaaagtaagttttatcctgaggaattataataccaacattttaacaccaaatgctttttatattgctaatacagtatcttacacattttaattatcttttttttttttttgagacggagtcttagtgtcacatact

SEQ ID NO: 104526 - DNA, 2534 bp, Homo sapiens
gtgcgccgcagcccgggcccaggccccggcagcgcctgggacaaggtaagggtccgacagaaaagagaccgaacctcacgatcgggccccaggggagggaagggtcacctcctccgtctccccgcgctcgctctccttgggtcgtgggcctggccctccccaagctcttaggaggatgctgccacttctcacccccctcgccgccttgcacacaccgttgcaacaccccattttcccagggagagagatccccctctaatctaggcgacccaactccccctttcatgtttttcctgggtcaggacgcttcccctcccccaacgcctcttcaccccctttcctgggaactgcctactccacgtttacctttcccttgaggagaggcctcttgctgccctccgctcgaaatacacaggcatactttttttctctccccgatcccccactccctacccccgttctcgcggccttgtgacagacaactctgatcgctctgggggccgcgatctcccctccgtaatcttcctggacgccttccctctcgttttctggcttcccacctcagatggctgcttcccaaaggcattaccttcgccacccccaccacacgttctctggctccccgtggcgtgtgccacagcgtgtctgagatagcctcgttgaatgtgtagggttcgagcctggagttgagccagattgtgtcgttttacttgccttgggcgtggagaacgatcttgtgagaatatcttcaaaggcagaaaaatattccctttatgaattctctttccctctgcgtgtaagtcgggaatgtgaagaggagtgtaggaaagagccctggttcaagtaggtaaatcgcatgagagggaaagttaaactgttgggaaagccccttctatgctaattgattctatagagtccttgcttgtctcacttcttgggcgtcagtggtctttctcttggatatggatgctgcagtcagctctgctggtctgggtcaggggtgcgtgtatgacctgcattttctgctttctcatgttacttgtgcaatgtattcaccggtaactcatttctttcccagacctctgggttccactgggctttgtctatatttaagttcatttctccagtttccttcctgcacataggtactgaacgaatccccaagttctgtgctaattaccttcatcagttgactaaacaagtttttagatgacatatttgtgaccaaggtcatatttacatttctttgttggacagatgttacatagctatacttgtgattggggaggatccagctgagtggagtgtgctgagctttttaggagagtgtgtactccctatttgaaattattttttggttgttaattttatattattaatgtttttaggtcacagaaagttctaagtggtaattttagatgtgtgggatctgagctaggactaaagcagagaatacccacgtaatcagaggtttctgggctccatagaggacgtagggcttttttttttctattggatttcttccagttttctcaggatcattagttctcttctgtagccaaaaattctggcctgttatgggattagagtctttaaggtttactcagactgtcattatgtgtagaaaaatgaattatgccctttggtaggacatgacacaaggctctgtttctagctgcaaatttaaattagattgtagagtgcttgggaaattggctttcaaaagaccaaagcttaatcttcactcctaaactgctggcttaattaaaatggatatttagaatttggtaaatgttgatttttctaataaaaggccttggtttaaaagggtgaccttaggattgtttctttcttaaaagcataattccagcccttctggcatggagcactggtccaaaaaaaaaaaaaaaaagtgtgtgtaaggagtgggggtggggtaaagagaaggttgttcctttgggttggatcacaggggtgagtatacaaggcagcagcagctgctggctctggagctctggttgctacgtgagaagcttgagtagtgctggctgctgtctccagggaaggacagcagtgcagcgtccattaatgctgctggctgcagggagcagcacttaggcgatggctgcttcaggactaagaagaaaccttgcttttctgggaattttcactgctgagctggtttgctttttattggtggggagatgggaattagtaattcataatctcctacccatttatggatattggcatctggaaactggatcatggttaaagcctttctttttttgtttgtttgatttgatttttgttttttggcagatttttgttttttatctagacatttgtgcttggataggactaaaagttccattagagttttaatttttcaatcagtttaaaaacccaagtaataattttaagaatctttctgataaccacaataggaagaaaataacaggaattttttcctgcagctcacatatcatgccttcctccatctctttaatcatagaatcaattcttattatttt

SEQ ID NO: 104527 - DNA, 2081 bp, Homo sapiens
ccttctgacatcacaaatatatgtctttggccataatccatctgaaatgtaggacagaccagaagaaatatgcagaaatcgaataagtctagttcaggatactgagaagatggcctctgagccccttaggtgatctcccctcccccacaactcctgaacattaggatgatctctgattaagcaaaacagtctgagcgtggaaaaacttgaaggagaaccaccaccaccaattatatgcaatactggacatattcctgtgtgctgtttttcttccccaagactcgtgtatcctatacttttttctctcagaattttgatttgttcattttcgtgtaaatgtacttaaatctcacaaacatctataatttgtagtatcactctggcatttgtggcagagaaccaaaaagaatggaaatgagttttgtcattcacaaatgtggctcacattgttttcccagtaataaaagcagaccaatgaaacagaacctttaatggatactattttaggaggttccaattcttattactatcacatagataagatgcaatagcagataaatatgatttcatgtatactggctgtttgacatacttagggtttaagataaaaatgtttgtagttttttactctgtggcttaagttgctatataaaataattgcttttacactcgaatttcctgttgtttggaaccttttgtgctcttgatattatcattttttagaggatcatacaggcccttttcatagaaggatttacttaagttatacccttgaaaacttttttatatcttttgatactgttttgtgtccaggaactgactttctgaaattattctggcttttctggggagaatgactatttcatttttacctttgaatggggaaataataaagtgcaaagtacagatttgcagataattacttttgctttatcctctccatgttgaaataacttatgaaaaattaggccatagttaacagcagtcaatgactattggatacattttatcagaggggaactggatcatgaataaaataaaattttaaaaataatttttggctgaactctggtgattcatcagtttaatttgaagtcagaaggtctagcagtgaattttatttataaaaattgtatttcaagtgttgaaaactgaaacttcttgaccagtatattttgtttgaggcatcaaactttgcaaaatgtgcatcgtatatttagtgatataactggtagtcatttgtaatttaaagtattctttcaaaggcactctttagaaagtaatgtagtgtacccgtgatgggcagggattggtaccattccttactgccaaaaattccaaaatatgtggcaaaatgattgatttatcttgtgggtgggattctgggaagttcatgaaaggtggagagaatatagtttccttcacttgtctatatacattttgttaaataagtcttaggaaaactgttttattgtatctttaattatgaattgcgtaaaagatacccagtaactttggggggaggtgctgttagaaagcattacattggagagaattcccctaccctgggacaaaatgcattctgtctttaatacttagcgaagggaactatgggataaaataaacaatgaaggtaagctcagtctgctttatatgtgccctcactgagcaaggaatttgtaatcgcatcgtgcctcattcgtttataccatcatattgattttgtttgctgagtacctgagggaataccttacttaatgtaaggtcacattaagtatgtttgatatgaagacagggaaaggaattttctgcttcttggagtaatgtcttagtatttttaaaacacttaagtttttacatcaggccagttttgcctgatgctcatgtctgttgctttggttgggctgctgctttctcttctgtgttcttatgggttcgttgtggtataaggattcccacagctttcatggcagtatgaagtaatgagaagcattgccttagccatgttagttacatgtatacttttggcctatgttatgaatcacaaaaagcggtagctataggaatgtatacaaaataga

SEQ ID NO: 104528 - DNA, 3376 bp, Homo sapiens
acctcccgaggagacccgttctagagctgaattctcattaagaaatggaaaagaatactctatctgaataaaaacacattgtaatacaatgtgtttatttgggttgggattggacctgaacatgtagaataatttgtttccctttatgaaatagttgctcgtagttgtctacaattttatttcattaagataggtagcacattacagctttcatgtgttgggttgccatatgtaaaatgctaactgaagaaaggctactttttaatttcagcctcatccttagttcctggagaacctgatatttcctggagattactccctcccccaccttttagtttaggcaacctcttttgatacatttgtgttcagctcgcatacaagtgggatagttgcatccagtttattaagacttagtatgaatcatagagttggaaaagatctgttggttatctggtcctttaaaccaaaatcataatgaaatattttgaaatttgggtccctattgaagttttcattaaaatgttaaaggatcggtgttctgaacaacatttttagttacttttaaaataaatgttttgcgtcagttctttttttaaaaataaagaatttcatttataggcaaattagctggcaattatttgaattgtgataggatttctcttttatgaaggaatatatgacaaggtttttcaaaatgcttaatatattttaaaagactttaatttttagaaataattggtttgaacagttttccaagagcacatttgttgcttgggttgaggtaccacctatattgcaatgttactaaactagccttaaagttttcccttctgtctatactgcatgcaacaataaagggaactggaatgttaatttccatttatggattagcagaggagatgttttaaccgattaataaccaaaaaactgcctttcgtacacgtaatattaagcaagcctgaccaagttttgtgttatttctctctgttaaagaaaactggatgtgttactacttaacattatattgttatttaatggtcttggcagtaatgatataatatttcgaccaaaagaaattttgagtaattaattattattgtaattagttggaagtttctcatcagtaaaatagcaacagcattaacacaaaatctagtgagctatattttatattactacagaaatttagggtagtcatttctttctttataatttattcacatggattatttccataaatttgtgggactaaaatagaagccatctagtcaagcaccagtctccataccagacagttttctctgcatgtgctatgacccacattgccagtattaaacatcctttacaccctcccccttcccagataattagaaatctcttcagggtagcttccattgctcctattacctggatcttgctagaggctctaagaagttcctggtaaaagtgagacagtaagggaccacattttgattccaaaggttttgataactgttagggctccccaaacagctaatctcattttcaccaagacttagccagcagagggctggaatggaggtgaaacacaagcactgtacctcatcttgcctgtgcagctgctccaccttatttcctgctattattatctcacaacgcctcctcccatcaaaaagaaactaggacaaagggggaaaattggatgggctaatgtgatttttattatgctaggttgtgggcttgtttatatgtacttaaatacaaagctaatttgccccattcttaaaagtctttagtgatagagattttgtaacttctgtatcttctactttctttcttgataaaccatttcagattctcagccttacagaaagaaaggttttaagcatacttaattttcgttggccgttcacagtcattattaccaccagatgccactgtattattagcttgaagaaaggtgggctctcttctgtacataatatctgcaatttgttttggaaaatactaatttgtataaatctgatttatgactaaaataaggttaaaaattagacctctatgtatgtttaccctattaccttagtgggggtgaaattaattagctctttgaacataaatttttcatgtcttagagttcttttttcaagctgcataatttatgttcttcaagccatttttatcccataccacccccacaaagggggaaattttattttttatcatttttattgtctttcaatggtgagattttcgccaccccactcctgaaatgtgaagactcaaataaaactgagtaatctaataaggtatatgcgttgctgaatgtagtaagatgattgtttcatcattcttagatattatgatctagtttgaatctggtttccagtatcatgttagcatatttaatactgttgatatgttaattttaatacatgcccaggtggatctccttgctttctatttgtgccccttgtttgtcgttttgtatgaagggggtttttgttgttggattttcttccccatctctgtgtcctgttatgttctttggcttatgtttcaaaaattctgtttcctaccaccaacctctgtacatgccacaacacatacaatttgtactttcacagtttctgtgaagtaggatgatctgcagttaataatcaactgtttgggcattcttggtatccaaggaaggttttacttagaaggaagaacctggaaggacctgttggcaattagactacttctgcgtttattttacattttcccttattaacgtaggctgttgagagttgacttgttttataagagaaaccagattgacagagaagacccccaatcagatagagttattttaaaaataaatgtgtttattatggtaacatttggggtagaatctaaagggcatatttttaaaaaaacttttagttctaaagacaaaagagtttaacctaaaacagaacaaagagaagggcctttgaagcagtatgattgattatatgctgaatgtagcattagaatgttgtatgaaagcataaatttttattttctcaatttctatggtacaaactactatgcccatggaagtatgtgtttatgcccacagcctgaaatatattcggtggaatgccttaaaaaagaataaatctggccgggcgcggtggctcacgcctgtaatcccagctacttgggaggctgaggcaggagaatggcgtgaacccgggaggcggagcctgcagtgagccgagatcccgccactgcactccagcctgggcgacagagcgagactctgtctcaaaaaaaaaaaaaagaatagatctgaggaaaatgtaagagcaagtctaaaattttgaagtcctttttgaaatgctattttttcctagacaaatttagtgtt

SEQ ID NO: 104529 - DNA, 1799 bp, Homo sapiens
atccaaaaatatgaaaattatgctaacatcatatacagatctcagaagttgctgtagccagccaggcgtggcggctcacacttgtaatcccagcactttgtgaggccaaggcgggtggatcaccttaggtcaggtgtttgagaccagcctgaccaacatggtgaaatgccatttctactaaaaatacaaaaattacccgggcatggtggtgcgagcttgtaatcccagctacttgggaggctgaggcataagaattgcttgaccctgggaggcagaggttgcagtgagccaagatcgtgccactgcattccagcctgggagacagagcaagactgtgtctcaaataaataaaaaataaagaagttactgtagatgccactcttacttaaaccctaggccatgtgtggagtcccaggggaagacatgtatttttagagaaggaaggctctaggtaggtgtaaccttcctcttacagtttatcatgaacagttagtatgaaaaggaatggctggaagtttgcagtagtacaccgagcaacaagagaaataaacatatcccacttcatgaaatgactatgccagccaagggagatgaaaaacaattttttttatagtacacctcatttttttaaaaacactttaatactaggaatatgtttctgtggcaaatagttacccccaaaggattatgtcaaatatctcttgtgaaaattaattttaaaattaatcttttggctgggtgcggtggctcatgcctgtaaacccaacactttgggatgccaaggtgggcagatcacctgaggtctggagttcgagagcagcctgaccaacatggagaaaccccatctctactgaaaatagaaaattagctgggcgtggtggcgcatgcctataatcccagctactcgggaggctgaggcaggagaatcgctcgaacccaggtggcagaaattgcagtgagctgagattgcgccattgtattccagcctgggcaacaagagcaaaactatgtctcaaaaaaaaaaaattaatcttgtgtagatagtgaccacgttttactttccttgggacagtcctggtttatacctgctatcctagcgtaattagtaatagcacccgtttcactctcaaaaatgtctcaatttggatcataaattatacgcttaccataattgtagaggattgtgagacttttagtcgctacctagcaacctagtttttcttgatagagctcttcttattctggagtctcctgtgctgcgatttatctgttgacctctctgaacccccatttccaaatgagcagtttttcgaatgtcttttttcttttcccattaggtggtagtaagggaaggagtaggtatagatttgattaattttttaattttttattattaaaaactccaattactacaaaatagaaaaatactttggagtttattaaactgttagtttaaaaggttccatttgatcaggataaggtccataccttgattggtaagtttgagtctttatagattctgttttttccatgtaggattcttgttaaagaaattcattattttgtggagttcgtactctggattttgaaggttggataatcatttaacacattcctctattaaacaacctccccccacctgtatttcatgtaaattactgcttagatagattgtaagcatattttataatagtactgtgtatttccattaagagttacataatttctgcttgtctgtgtaatgttaagcagctgttgttattcattgcctagatcaaactttgtggtcttaaaaattg

SEQ ID NO: 104530 - DNA, 1581 bp, Homo sapiens
tgtttgatatgttacagtctctggcagttactatttttgacattcaggttgtcctacctttgtctgttggctactaaattcttttgattcattcttaatactttcctcacttgtttccttgcttcctactattactagatgttctaggataattttgtacattttttgccccaaacctggaatcagccatttctgcagaaacctcttcattcttttaatgaaaaatggtacttagaaaccacagtatggatggtaggagtgttcattgctcttggtttgggccttgtttctagatttttcaatgaacaaagtttaaaagtattttatttctttttaaaaatatcacttggtattttaaaagctgcatttcaaactcagtgctacatgatgtttacgtaaacctaatctttctccctttccccatgcccaaaatctcagttttcactaacaccaatgtaatttctctttgttttgtgccacaatacacacactacagttttagtgtgacagaacaatatgattactggaaagtggctttttgttttgttttctcatgtctttttgcccttagggtatatccctttagagatagagatagtcatgcctcacttgatgaggatattttctgagaaatgtgttgtcaggtgatttcgtcattgtgtgaacatctagaatgtactaacataaacctagatggtacacctaagctatatggtatagcccattgctcttaggctacaaatctgtgcagcatgtgaccactggatactatacgcagttgtaacacagtggtaagcatttgtgtatctgaaaatggaaaagataaagtaaacatacggtataaaagataaaaaatggtacacctttgtagggcagctccattacagtcttatgggatcattatcatatgtggtccatccttgactgaaatgtcgttatgtggcacatgaccatatatagtcagattacagtattttgaaatcccccttagaatagttctctatggttgtgccaccagtttgatacacagtgaggttaatttgttacattttactttcagatttttcagggattaggttttgttttatgattatgtaaaatacttaaatggttaataagtgaaatttacgaagctgggtataatcagaaaaattgagcttctatcctagtgtcttccagctggttctctccctgtccctgtatgttagactcaacagagtcatcatgaattttcagagtgatgttttgtcgatacttccccttttagcagaagaagcatttaggttagttcatttactaaaactatttccttctagatttttcactaactaatatttttacactgtagaagaggaatgtggaaatttctgttctttcttttttggaaccagaatttcttggcttaatacaagcagtttgagataagaaactttctccagtaaaaattctctttttttttttcttttttttcttttttttgagatggagtctcgctctgtttcgcaggctggagtgcagtggcatgatctcagctcactgcaacctaggcgtcccaggttgaagcaattctcctgtctcagc

SEQ ID NO: 104531 - DNA, 1069 bp, Homo sapiens
ttggtcattgtcgatactagataatgaataaatggacttctttataccattttactttcatactttatttgaaacaaggtcttgctatgttgcccagctggccttgaactcctggcctcaagagattctcatgcctcagcctcccagagctttgggattacaggcatgaaccaccatgcccagcccataatagaaagttttaaattttaaaataaaagtattcatagacttggctatcatggatcctggtaaagtagactagtgaacataatcagatgtttcagtctttccctgttgatactgcttgccctctgagcccatttcctctcctgatcatcgcctgctatttccaatcaacagaaaaaatagagtagcctacatatataatgagtttatactaagagggaaattttaatattataaagaagtctatacagattctggagagcattcctgaagagaagattgaggaagcaaatggattaattaatgtaatagtgtgttcagtgtgcaataggtaacattttatgatatggttgaatttctgaaaaggtatcttataaatatcagaccatatttaaggagacttccacctctactgataaaatctgcccttctctctccccctgactttattgctgcccatctgtagttttgatcttttttctctaggattctttgcctagaattgccatgggccttctggatctggaacacggatgaaggaagaggatgaatgtttttcagatgttatcccttatgggagtaatttgtaaattctagcttcttcgggtggggggaggcggggtgtgtgtgtgtgtgtgtgtgtgtgtgtgtgtgtgtattatttatttatttttttaagttaattggcctcttccagcaaagagtatacagcagagacctagaagtttcattttttgtttgtttttgttttgttttgttttgtttttgagacggagtctggctctgtcacccaggctggagtgcaatggtgtgatctcttctcactgcaacctctgcctcccgggttcaagcaattttcctacctcagcctcccaagtagctg

SEQ ID NO: 104532 - DNA, 1007 bp, Homo sapiens
cacataggcaaacctgaacagtttgcaagttgcctacccttttctactttggataaaataaacctcttaaaatagcacttaacatagtaatatatgtatattaatagtagttacttcatgtttgttgaatgaatgaatgaaaaaagtagcaaatctacataatataaatcccaagacagccaggaattttatctggacctaattgtcttacatagcaccaattggtacttaataaaaacaaggctgggcatggcagtatgcgtctgtggtcccagctacttgggaggctaaggtgagaggatcgcttgagcccaggaggttgaggttgcggtgagctgtgattgcaccaaagcactccaacctgagtgacagaccctgtctcaaaaataaaaataaaaacaattagttataactcagatgttgctatctaaggtaagtagtaattactataataaacaagctatatattaacatcttaattttctttcctctgaactttactactgtaggtgtgtagtgaacttcatacaagttaatctttttgtagctctatttcttcatttctgtttgttcatcggttggagaaattttgcttaaattaatgaaagtaaaaatacagatattaatggctcataaatgtgcacaacccacttcatctatagtaagtaaaagtggctcccattttggggtttgaaaatgaagaagatctgaattcacagagaggaggcacgtgtagagatatgagaagttcttttcctactctactttggtacattggtctctaacacatgttctgagcctcagaacacagtagaacagaaccttcagaaagtgttgagagtataactctttaaagaggtttagtcagtctaaattatttgagggcatcatctttatttggtacttagaagtctaaaatcttcctgattgttgttaaggttacaaagagtctgtgtattgttggttagttgagcagtaaatacctttttatcattgttaaatgggtt

SEQ ID NO: 104533 - DNA, 3867 bp, Homo sapiens
agataataataataataattctgttatttatgatatgtagtcttatcctactgccactcccctcttctgctccacatactactaagtatgacttggtctctataatacgcactaattatgaagttttttacggagaaggaaattcttaatatagactaggattttttttcagttgtcttttaatggccttttattctagtaaacttagatttcttatagacatcggtttattgtgccgagctcagtagctcctagagggagtataaatttaggcaaaggaatcaaggaataaactggtattgtagaagagatgggagaaaaggaaatttttatttttgctttaaattactaaatcatgatgtttcctgtctctcagtgcttaccccaatcagtgtttctctcttttcttttttcctttcagtcccgaacccctaaaattctttgcttgcattaacttgcttcagattataagcctaattttactgttccaaatacatgaacttttcactgtatctccaagtgctcttttagagttcatctctttgttttccagtaactcatatttgtttcttcttatgcttaacacttctctctcatttttttttttcatgtttctcacattttttctttccacattatctgctgtagcaaacttgaaatatatgcttttggagaagagtaaaaacagtgtttagccatattcaggttattagcagcagctcctctttcttcacatatacttaaagggaccagaaagttatttaagctcttacttgctacaaatgctgttccatgtgctcctatgagtcagcacaacaggtattttttttttttttattgtacagatgagaaaactgagactttgagacattctatgaattgcctgagctagttggcagcagtgccaggattcatagaaatttggagcaggaagacaacacaatgaagattttactttgaggaatttagggttcatctatgtaaagtgatttttctgaggtcactaattatgttgtaggctagaactcaagtctcctaactcctaatatagtgccttttttttcttttctttttttatttttttaggagatgggtctcactatgttgcccaggctggtcttaaactcctgggctcaagcaatcctcctgcctcagcctcccaaagtgctaggattacaggtgcaagccaccgcacctggcctctaagagtgctttttcctagcatacttttcttctcctaaggtaaaaggctgtttgtcatggtacagctacggtgattttacttgagatatttgactttgagatggagatgaagataagtatataatgcagctgccacattcattctcatacaaggtaaagtcattcaaaagataaatcgaagaactatagatgtatttaagaagaaattcagcctatatgtaacaacaaaattttgaataatcaagttcagaaattggatttttaaaaacttattagctactttaacccttttgaaatattcccaaaaagtgttttctcttcctgagttaaatttattcatttattgacctattaaagatttttttagtgcttcagagctattctgtatatctgttcattttcgttatttagtagtatatagaagtaatagattgggctgaatagatttatttcaggatatatcttagatatttgtgttttttcatgaatcccagtttaagggttattgctttcaaaaggaagaaatttggttagtcatgacttttggctagttgaagtttagagaagtgctttatacaggatcttttatttagtgagaaaaaaataactttttataattttataatactgtgtgaaaaacctgataccaaaacttctgaaaaagaaaccaggcctaggagatgaggattctagggaagattattaaattgaggatatttttaagttagattctaaattagtaaatcgtggctaataagatgaaaataatctgatcctttagtaagatctgaagtaatattgttgccctgcaaaaaagtggttgttatcagcataccttatatgtcagcctaagcaagattagattttctcttttctctgatagatgccaatatttaacattgacttttatctactttcaaaaatatctatgaaatatactttctgtctctgaattagagtgtatgtatatttgtgtttacttgaaatgttatagctggatgatagatttcagagcagtttttatgcttagggaagccactgcctcccaaaaaggttttcttatgagaatgaggaaaataagtataaattttcatatttatgttattactattgatgtgcttggataattgtatttataaaagtaaaaaatgttcagtattttatctgaaatttaataatggatattgtacagcctaaggaattaaaagaaaaaggaccctttgagaaaatggcttgttcttatgtatcttaatatatactgtgttcactttatgttttgtcagacactgaaattgaggaagagagattttggcgttctgttggtttatggagagagttgatcagagattgctccttggctgagttgctgtctgcataggctgttaacaattgtttctctggcagcagatcttgttcatcaggattgcatcatttctgggagaatggccaaggtccacagcctcaatacaaagactgtctgaagcatatgaggcctgttctctttctgaagcggcactcctcttcctgccagtcctcttcacaggattactgaagcagacttgttctgaatttctttcgttggattggttgtttattggacttttgtctgccagctgcttccgcctcacctgtctgatgcaatttcttcttctgaaatctgttggaattgttcataaaacactttttgtttgtcttctctgtgagtgaccagggagatcatacaggtcttgtgctttcagcaagtcatatagagaagagactgtcagaatgatgatacagagactgttggccatttctgaaaccaattaaaaagatggggtaattaagaaacatttctggcatgttctatttaacatccttttccctagaaactgtatgtaaatggcacctcctaaagagagtactcggtactactggaagatacaggctgtgtctgtttctgaatccaagaacttactagtgttcctgtggattctgatggattgttctggaaatagttaaattaataataaattgaaactgtgatgcattcatttaccccctactgtacactcacatctatttcgctgttttcctcctttcctttttttctttcttatttgctattgcttcttccttgatttactttatttcttccttccttttactgttactttgatacttttatttctctaattctgggtgtactattttaaatcgtttctaaaaaatagtttattttccagttttttaaaattagaaatcataaaacatcaacataaatgaaatgcatgcgttctaatgcttggtaactggaatcctatgaatagctcttttcatgtttatgatatgttaatctttaaggtgttaataactctggctagcgttaaatttgacttttaggaaaaaacaccagagacttaaaggatactgatcattttcccttcctttttggaaggtagaaaattaatttaagcgccattttttaagcatgtttccatttgaccgcaaatagaactgactcctttttatcactcttttttatagtaggacaagaaactagatggtgtggaatgaagggaaagaaaggagtaataaatatggacttgtaatttaatgggtgatgatggccccttgtctggctggacagttgtcggacatcgggttaaagaaagaactctgaat

SEQ ID NO: 104534 - DNA, 1019 bp, Homo sapiens
cctgggttgactcagtcggtatcatgtacttttcattcctttagtttttttagtattaataattgttctaatgtcttattatgaatcagtgtatcagtcatgactctctttgtagtcttttttgcaaaagtccttgttaacatgggtctttgacattcacattgactttattcccccccaaataaaatgctttttgtttcatcctttcaatgttttttacactactgtaaaactactaatgtaaagtcacacaaagaacacttgtttccctctgcaccatacctccaaatctcttaatctatttttgcatttttttatacttcagtaatttctgagtctttctgttcccagctttcactggtttatggtcaccatgtcaagctatcctcaccgctttttcatacacagttgtttagtctttatcatgaaactgtactcttcgtgatttcgggggtttttttgttgtttttaaaaagtagtcaacttttttagagcagttttaggttcacaggaaaattcatcaggagatacagagatttcccatgcaccctctgcacccacgcatgcatagcctcctcctggtttatatttttgttcatatctagcagcgtattattaccccacaaataaagttgctaagatgattgcatcttctcccaaaattatagttaagatgatttaaaagaaggaagagagtgttcaatgacaaaagaaggcactaagaaacagctgtttccaatcaagtataaacaacaaattgatctcttttaatttggaagaaataacattattgactgcttgtgaaactgcatttatttgtggcctaggaaaaaaacttaaatgaagatcttgaatttttaaagagtttaggtaaactgggatatttttaataaccatcctttatcttaaaacttgtttgctatatcctaggctgccagaaaattttgtttgggcagttttagaatggggagaatgtgttggttagtgagataggcagactcttcctttcccttcaactg

SEQ ID NO: 104535 - DNA, 3528 bp, Homo sapiens
tcatctgtttttttataatattcgttgcctagaaagaggaccttcaaaatcagtggtaccaaacttttttttcagctaagagcagctttaggaattcagagtttgtccaaaggcccaatccctaaaattatactctcaattcttgaagaatgtaaatgccaaatgacaatgaaggtaggccttcattatacaactttatatatattattcacagttttaaaatttttagtcttttgtatcccttctcttttaagttgtccgagattccccctgctcacagattccccctcttgtccttttacctcccttgtacccaatcttccttgcttacagaaaggaagtggaagccccctacctttcaagacgaagtggcactacaccaggatgtgaaagtccagcgaaagagacccaaggggcctagggggcagcacacccccagaagccaagtctattccaggcagtaccagggattagggtctgggctggaaaaatcctggtgttttgaatatgttcaggtccagttcagactcttgatcccacagccacttcttgagtgaggtgggtgttgctctaattcccctgtttctcttgccattttcacagtccctggggattcttcccccttcagcaaagcaaagcaactgtaccagatttctgggttgaatgacatccctgattaataagtggttttcttccttaaaacagaatattattaaagagcatgtatatttcttcataaagccacctaatataacttacctgtttactgagttccttaaagaggaagacttaaagctaccctgagaaatagtatataatattctggggtagtctaaaatgaaaagcagtgtttgggcttattcccatataaaaaggagaaaggagggttgggggtggggaagggttgattttgtttcttctagagcttttttcttcttttgtttttgtttgttttgttttgtttgcatgcaaaaggtatttagttatgtcagtaactgagacttacttaaccattttacaactctttccccaaataaagtacttaaaactctccctgcattagtaggtagccagtttgtattgtgtttataggtttttataaagtcagctactaacctggtactatgtagattgtctaactgtatagatagatagcattaacatttgtgagaaatttcaacaaagaggttaaaccaatacgtttggaattgctggataaaagacccagagcagttaatcttacaattggtgttttccccaaagtatagacatgactgcccgtaaatactgctggggagtctaggactaattccagaaataaaaatacttctggtctacaaatgtgactgcgctgtctctgttaacaccaacatatcctaggatttcctgaaacattttcattcatgatctccagacagatttgtgatactgtggtcataactagctacatagttatgcatttctgcaaagggaaagaatgtcagtaactagctacataccattctgttaaattattaatgatatttattaatgtttcatcatgcctatttcgctgttctgggcactttaagattaaacctggtattaagtgcagcatactcaactagatgtagacttcacttcatagaattttaaatctgatggcaactatatgcaatacgcatttatttttgtgtgtgtttgtaggaaaatttgtagatgtaacaagcaaaacaaagatttttctgaatttccaactctaccataacagaatttcaggcattttccaagaaatggcatgatagcagctgggttgcatgttgtacttagaacactgttgatggagtatatctgttgtgagcctggtttctgtgtatgtgtccaattcagtgataggagaagaaagcctgtaattacatttgcataaagtggttggctgctaaagagatgtaattccattattccaaacttttaattcatattttaaaatataaaaactagtatatatatcaaggaatattttaggaaatcttgtagttacctgtaagtgtctaactgtgtattcaatcagtaaccaatatggaaattgcagagtttcttcatcagaagatatgagtttaaattttatatttggcatgcacagcaatatattaaatgctgtgcttaactagaaagtattgtgcagtgtgatggccttttaacctccacaatatacattttatttttattccctagacttgcacatgaagtgcatatgttcatatttacccgtttggagatgggtaagatacaaccagcatagctccatctccatggccatctttgatttcatgcaactttcctttttcctgtccccctcccaccaaaaaaaaatccattcctaataaacagctatcatgtttcactccatgtgttcagtggtacaaaacctatataaaatatgtacagctctttggaatacttgtttatctagtaatgtacctagtaaattaacaatgttgtataaatttattactttcttttaactgtccatcatagaaactaaattataccttcattttattaatgcttgtctgcctttggtttcatttaggaaaccccacctgtttcctaatactcagagatgattgcctctcagtgagccatgttcagatcatctttttctcaagaatactgacctgcattcttgatgtacccctcccccgttcccatcttgcagacacttttaagtaataaaatgcatgcacctcactaacagagaatactttcctctgtctaaagttcttcacttagaaatttcctttgctgttattaataagatcctttctcacagttttggagcatataactgggtgagttggatacatatctcagaattttctttgatccctcacttctcaattgacattgcaccacattgaactgcacacttattcctgctgtactatatattgtatatctttaagcaggaaaaaatgacttgttatttcaagcgaacaatatgcattatttgactccctgaaagacccattaatctctaagttagagttataccaatcatcggagtttctaatttgtgaatctgtgttctaattaatataaattacaaattactattctattctgcaaagccatacaaactttatatttttgaattacccttcagtattccctaaaacctaaccaggtaacaatcagagttgaagttctttcttcccataaacctgatttttatcctttgccatcaaagcctttttattgtaaaggcttatattaattttctaagtttgaatacatgtataattctacaataatacattgcgcttgaatagtttattttctactcacaaagggtacaaaaagatactaaaccaagcttctcactaagcctggttaataaaggtctcaaataattttctttaaaggactgaatgtcattctcatttctgtagtggaaagagcatagactttggagtcagacagactttgtttcaaatcttagctgtgtcagtgtgtaaccttggggaagtcatgtaatctcaccaccac

SEQ ID NO: 104536 - DNA, 1820 bp, Homo sapiens
tcatcaagatgagaggtatgataaatataagatgccattgtttttacctgtactttcttcagggtatcctgtcttggtagtgaatggaagagggcctggtccctggggcagtgcagaaggcactttgatcatctcactcactgcaaatgtcatgtgaggtttcatggaagtattaagagatccaattaagaagaatagttctgagtctaaaccagcccagagtggcttctctaggggaaactccccgctcagctggtacgtttgtgtttgtcattagggacaccttgtatctcaggtgcctgccttcagacatctgcctgtactggcttcatgttacacacaaatccacatttaataacactcctactgttatttataggcttagttatgttaataagattgtttcaccgagttctttctcttatcctagtggctagtggttgtggaaagaggaggggttagaatgggaaatgaagtgttagtttaagggaagattaggtgttatgctatcatgcattgcttttcgcctttgtgcagccctgaatctgtggaggctagtccagcagttaatgagaagagcgtgtattccactcataattatgggaccactcagaggcatgggtgtcgaggactgccttatgctgtgagtatgcatttgtttctctccagaacagtgatcttcctggagtgtaatccattcttatacattgtgactttcttgaaatgtttatatgcagcatgacgaagttgccccttttgcacttccctgactccagcggacgtctagccctgcatcattgttcttgtttttatgtcccagttgaccttggcattttgttttatcactttcctggttgaagccaaaaaacaaagggtactactttcttctttctttccatatgtaccatactttaggggagagaggggccagtgtttggacactgttgatttaaaaaatcttattttcaggatcataattacggagcccctcctcctccgacacctcctgcttctccccctgtccagacgatcatccctcgttctgacctgaatggcctgccgtcgcctgtagaggaacgctgtggagacagcccgaactctgaaggagaaactgtacctacctggtgtccttgtggtctttctcaggatggcttccttctcaactgtgacaagtgcaggtaagatcctgttccatctaaatttaagtctgggttgctgggattagggtttcttacaagtagggaaaagctcaaagtattctttcttgtgtttgttaatgtagatgattccttagtgctccttggctcgaattctctgcactaggtgagaattgctgacaacaaggaatgagagattgatgttaaagctattgaatttgatatgaaatttaatgtcctggaaacatttggtaggtgggagggagggggtagcatatgcagagacacttcgcccatgtgtgctatgatgtgatgcatgctgttggaaggactactttaagtttattttccctctttaggggaatgagcagggggaaggttattagacttcatcggcggaagcaggacaacatatcaggtgagcggaagatgggttaggtccacaatttgacataaaaatattctgtgatctgaatgttcattttaagaacccctcttggccaggcgcagtggcttacgcctgtaatctcaccacttagggaggccaaagcgggcggatcacctgaggtcgggagtttgagaccagcctgaccaacatggagaaaccccatctctactgaaaatccaaaatagccaggtgtggtggcgcatgcctgtaatccc

SEQ ID NO: 104537 - DNA, 1049 bp, Homo sapiens
tccccatcccaggtatgaaattccagccctacctggcacaatcccgtatgtgttgcagcctcaagtctaggcttccactatccttacagtatctccccacctctcaaccccaaagtacagtctgaaattcttgtcctggttacatgcctcatgtctttgggttgattgtttttccttgtttcaaaaaaaataaaaatcaggaaacatctcttgtatggtctaggtttcctcagtgtcatggtcactttcctgtattctcagctaaaatgtctacgggagaaacttcttctggtttgtgttctttcttccccatcacagcaactttgttgcttctaggtgacttgttcatcccttgttaaggggattggtctttgtttccttcttagtttcaaaactggtaaatctgcaactttaaagtttttttttatttactttttctcttagtatcagaggtgcatataggatttaagagatgcatgctcttccctgttaattacctagcttcacagtagaaagtattaaaattagtctcagagttcattggccttgagctacccctattcttggtaatagtttggggaattccattgtattttttacctagagaaagggggacagaatagaacactagtttgtgccttagttttagtctcagataggtataactgtcattcttggtaccaagttttgtttgttctacttgttttcctccttgggataggcatttcgagagggatcccggaagtccttgcggatgaaggtaaggggtaatcttcgctgatgctgtgttttacttcactgtgatcttgcattttggtcagcttctttcctgacattgatggtctgggaatcttggactctgcttttcattagtttgtagttgttgccattcagttttcatagagcttttctccaaagtagattttcttggccattttctgaaatattttccctttctgtaatcagccttcattgattggtttttcattcattgctttcctagggggtaagtgacatttttccaaacaaaatgaggctagtgtgttctg

SEQ ID NO: 104538 - DNA, 1515 bp, Homo sapiens
ttcaagtttatgagtattcatattcctaaatgatacaaaagcaggatctttcctattgagagttatagggcataaatattaaaatctttagtaaggccaggcgcagtagctcacgcctgtaatcctagcactttggaagaccaaggcaagtggatcacctgaggtcaggaattcaagaccagcctggccaacatggtgaaaccccatctctactaaaaataccaaaattagccaggcgtggtggcaggcacctgtagtcccagctgcttgggaggctgaggcaggagaatcgcttgaacccaggaggcagtggttgtagtgagccgagatcacgccactgcactccagcctgggcaacagagcaagactccatctcaaaaaaaaaaaaaaattcagtaaggataagctttttaggattgctttatgtgcagcaccagtgtgactggtgttagcaaagattacaggtagcactttacctaaagtttgaaggccccacttagtatctatctttaaacagacttgcacatacctgtgaaagagttgggagaggactcagagctacagagcatcagaggcctgggatgtgtcttggaagacaaatcaatcatgcctttgctggatccgtctcttgcaagtggccaagtttgctttagcttcccctttatttttgtctcatttgcttagagaggggccttttaaatagactttggaggcagataatagccctaatcctggctactaaatgcttttctcttatcaagcaactatcataacttatctccagaagctcgaaacctttcaaaagctataaactggctctaccagaaaactgcacataaaccccatattttgcttacagttttgggaggttgacagcctcacaggtgtgttaaaatttagaaaaaaaaattactagtcattttgattcttttaattctaaattgagttataaattttatgctcagaattactagtttaaaactcctccagtgatccaggtgggagccataagaattagaaaaaattatcatttggatttttaatcccagtgtcaagagcagcttccctactgaagacttaattgtaaatcagggtttctcagtcttgacactgttgacagtttggaccagataattctttgttgtggaagggactgttctgtgctttcaagatgtgaacaggatccctggtgtctacccactagatgccggtaacactcatacactcagttgagattatcaaaaatgtcttcagatattaccaaatgtcacctgggtgcaaaatttccctcaattgagaaccactactctaaacccaactgaggtagagtctctaatgccttgaaggatgggacagcagagtaaacacacagtgagattagcgaacaatggctaatactgtgacagaggcttccagaatacagtacacttatcaagtgtaagtttaacaattgccacttaaagctgggaatattgtttggacactgccagtccccctagtctgtaagctccatta

SEQ ID NO: 104539 - DNA, 2994 bp, Homo sapiens
atgaaaataataagtgatacaaaaacatgcattctcctggagaatagtcaaaaaaccagtttgggctaacacttaacacagatattcagtgagtatgaaaaatttaagcagtgataaatttgaggtctctactgttcatttgtatgaagattttcttatgaacttgatgtcagtcctttgattagaaaattgatttttatgactttaaaatggtcataaaatcacagtgatgggatgaaactatgatccagattaatttcttactttataaatggagaaactgagcttccccatttaaagaagttattcaaggtctcacctctcattggtaacaaaagcatgatagaaaccagatcctctgactcccagtccattactcttttatgccacatcaattgccaagtgataaattttctctggaaccccagcttgtcccacccccattcccaaccctctatttatgcatggactttactaacctccctgaatttgttttctacagaattctccctctgaagcacagaatttagatgagaatacaactgagggctgggaaaatcggataagactatggactgaccagtatgaagaagctttcactaatcagtacagtgcagatgtacagaacgcgcttgaacaacacctacattctagcaaggaatttgtgggcaaacctactattttagacactattaataagactgaattggcctgtaataacacagttattggttcccaaatgcaggtaagcaccaaagggttgaggactctctaagtagctgaaattttaagaacccaggaagagggtaatggattggaattactgttccttccaaatgtacaaggccatggaataacagattagccaggtgttgatcatatgtaaccaaaagtaggttatattaactggaaactacctggatacatatttttaaactacctttattaataaaaaaatagatgaattgaggctgtgtgcagtgcagtggctcactcctataatacaacactttggcaagaagccaaggtggaaggattgcttgaggccagcagttcaagaccagcctgtacaacatagtgagaccctctctttacaaaaaaaaaaaattaaaagccgttgtgatgatacacacctgtaagtcccagctactggggaggctgaggtggaaggatcacttgaatgaatttgaggttatagtaagctatgattgcaccactgcactccagcctgaatgaaagagtgagaccctggctctatttaaaaaacagagagagagatgacttagtatgggaaattctatataccctaggtaggaattatgtaatatttatagaaagttaagcatgttctttctcatctttattttagagatagagtcactgaagtcttaatcatgtattttttttttttttttaatattttcttgccgtttctggggaggcaatttcactagatgtagcatgtctcttagaaaaattgagctttcatcacattttaaaatttctcatcattgatctaaataacatgtacagataaaacctgaaaatattagcatgttttccttaattatgaagtaatttgagtgtctactaaggtgttcttgctgttgtttaatgttattgctctggttttattcagttacagctgggaagagtcactcgtgttcaaaagcaccggaagatcctgagggctgcaagagatttggctttggacactcttataatagagtatcgtgggaaagtcatgttacgacagcaatttgaggtcaatgggcatttcttcaaaaagtaagaacgtcattcattgagcagtgagggctaaggtggacctggttgaccagtgttgttgtaaaaatcattctgtttgataagacgctcttgggagaaaaaaatcacaactcagataagctcacacctgtctgctatttgtagagaagtgcaagtaaatcttcaaattgttcaatgtataaaatggtgacacctcctttccaagccaagcattccttgctttgtgcttgttctttaatcaaaagcagacaaacgtgatgctttcccaagtttaggcgttgcaaaagactgctgctgcttctctcagcatatgcttcatatttggagtcatggggtggccttcttatttgtgttgagaattacaggaattttaattgtatccctagaccatacccctttgtgctcttctactcaaaattcaatggtgtagagatgtgtgtggatgcccgtactttcggtaatgatgctcggttcatcagaagatcatgtacaccaaatgcagaggtaagatatctgtagcaacttccctttgactggaaccatcaaatgacaagcttactgaagaagcagtgtgaaaacttcactcagataaaggtctgtagataatagtcgtgatatttcatcgtgggaggtgaaaaacaaaagtaatggtgcttttatacgacaaaatgggcgcaaggaaagagttttctttagagaaggcagaaatagaaaagagcaagttagcatttgctaaggagaaaaagctagactggataagaaaatcaagtgtagttatattaaagagattgccatacggtggaagtagatgttgttaggcctaactaagctatttggttgcagtttttttagattttagtgagtaatgttttatgagaggatctagacatttctagaattcattactcagagcaaccacatcaaataaagcaagaaaatccacagagctttacttactggctaaggaattttaattctctggtggagctggaaacagctataagatgtgaaagcggctgggcgcagtggctcatgcctgtaatcccagcacttcggaaggctgaggtgggcagataacaaggtcaggagttcgagaccagcctggccaacatggtgaaaccccgtctctactaaaaaaaaatagaaaacttagccaggcattgtggcgtgtgcctgtattcccaggtactcaggaggctgagacag

SEQ ID NO: 104540 - DNA, 1641 bp, Homo sapiens
cttgagcccaggagttcaagaccagcctagacaacatggcaaaaccccgtctctgccgaaaataaaaaaattagctgggcgtgtagtcccagctactcaggaggctgaggtaggaggatcacttgagcccaggaaacagagattaccgagagctgtgatgcaccactgcactccagcctagatgacagagcgagattccgtctccaataaaaagaaaaacaaaagtatttataggactctctaatgtctctgtttaacttattcagagacaatatcagaggaagttactgtactgatattttaagagggtgaatggataatgtaactgaatttcaagggtactgagacaggcattttggttgtttctttggagcagtaattataaagtggactgtgcctgtcacaagggaaaccggaattgtcctatacaaaaaaggaatcctaatgctacagaactgccactcctaccacctcctccaagcctacccaccattggagcagagactagacgtagaaaagcacgacggaaagagctagagatggagcagcagaatgaggcttcagaggagaataatgaccagcaatcacaagaagttccagaaaaagtaactgtatccagtgatcatgaggtaatcgcccctggtcaaatgatgatgctatggcatcaatcctccaaaggaagaggaacccgggttgccgcatggtttaagtaggggagctatagtaacacttagtgccctttatatcaatgtgggtttattgtgttcatacatttctttctgttttacaaagtcaaaaacatcctttgctggttttgcaccagagaataggggttagttatcatctgtgtttaccatgtggcctcacatgagttaacagtttaaagcactagagattgttatagagagttttaagctaccagaataaaacagattgattttttctcagagcttgagtacagctgaatattgcctctatcttaaaggaagtagacaatccagaagaaaaaccagaagaagagaaagaagaggttatagatgaccaggagaacctagctcatagcaggagggtgagtactgtctgacattactttgctccttctcattcctgctacctccatcatgtgaacctcttctgttctcttgactttgtatcatctcattgatttgacctgaaggttataatttgggctttttccgtaataaagattttattataatttttttatttatttttctctatacacacagtagttttgtagtgattattatctagtgatggtttgaagaggttgtttttttttttttttttttttttactaacaatctggtttccgctgggcgcggtggctcacgcctgtaatcccagcactttgggagggcgaggtgggcggatcacgaggtcaggagatcgagaccatcctcgctaacacggtgaaaccttgtctctactaaaaatacaaaaaattagccgggcgcggtggcgggtgcctgtagtcccagctactcgggaggctaaggcaggagaatggcatgaacctgggaggcagagcttgcagtgagtggagatagcgccactgcactccggcctgggcaaaagagcgagactccatctcaaaaaaaaaaaaaaaaaaaaaatctg

SEQ ID NO: 104541 - DNA, 2748 bp, Homo sapiens
ggttcaagcaattccccttccttagcctcccaagtagctggcattacaagcatgcgccaccatgcctgggtaattttttgtattttagtagagacggagtttcaccatgttggccacgacggtctcaatctcccgacctcatgatcttcccacctcagcctcccaaagtactgggattacaggcgtgagccactgcacccatcctgtttttctttcatattaaagtttcaaaataactgaccctttttgaaaagtttatgtttgaccttgcctttatttacaactattccccacatttaaaatgaaatattttatttttaatcttctgttttccaagttatatgtgtcatcttactggtagttaaatgaatttctgtaaatttccattaaaaatacttttataaaagctatccactcgtcctcatttgaagcttccttctacaccagtactatctctttctagaccagggaagatagaaaggtagaagccatcatgcatgcttttgaaaacttagagaaaagaaagaagcggcgggatcagcccttggaacagagcaactctgatgtagagattactacaaccacctcagagactcctgttggtgaagagacaaaaactgaagcccctgaatctgaagttagcaactctgtttcaaatgttaccatcccaagcaccccacagagtgttggtgtgaatacccggaggtcttcccaagcaggggtaagagttgaaaagacttcagcacttagacatcctcacctttgctaatgtcaatacctaacttttggaatttttaaaatcagtgttttcagctttgctccatatcacaataaataaggccattaactgtttaactggaaccatttcattggcctattttataaatgcttattagaaataacgcaaacatttgtcgctagcctctttagctcatttaagtgtatacatttttgtatttaaaaattagattttaaattagtgtttctaatccttatatttttcatcagtagacattctgaatgcttaaagtgaataggaaattagactgtttgctgataaaacatttctggtaagcatctgaccctactattgctacaggatattgctgcagaaaaactagtccccaagccacctccagcaaagccttctaggccccggccgaagagtcgaatttctcggtacaggaccagttcagcccaaagactaaagcgtcagaagcaggccaatgcacagcaggcagaattgtcacaagctgccttggaagagggaggaagtaacagtttagtaactcctactgaagctggaagtctagacagttcaggagaaaacaggccattaacagggtctgacccaactgtggtgtcaattactggatcccatgtcaaccgtgctgcatctaaataccccaaaaccaaaaaggtaagtcacaaatgcatcctttataagtccagtctggcaagggctgtcttagtgaaatgagaggacctataatccctagaagaaactaatctcaatattactagattgaaagttctaaaatgctttgacacaaaaggctggagtcatcctgctacctgtttccttatttttagtcagcttaaatcactgatagctgaaattattcctctcttagtgggcgtggagagggtgaaggaagatatccttgtgttctagttgctcaattcattcttactgcagctgctgcatctcctcctgtcctagtttctagatgacgtttgtctttatgaactacactgctacctcttgatttataaactaatgatctcttttttaccttagtatctagttacagaatggttgaatgacaaagcagagaagcaagagtgccctgttgagtgccctttacgtatcacaacggatccaactgtactggcaacgaccctaaacatgttaccaggtcttatccattccccgttaatttgcaccacccccaaacactacattcgctttggctcaccctttatccctgagagacgtcgaaggccccttctgcctgatggcacattcagctcctgtaagaaggtatgtctgtgtttttgtgtgtgtgttgtgtttatgtgtgtgtgctttatttttttaagcctaagattcctatcatcatgacataaataaaatgttctctagatagccactctgcccatgtgagtttataatgagttagttgttcagccataaatactgattcatcaagagtctgtgagactgtggtggaatgaatgtactgcatttttagtgctcagatttgtgactggtcactgatgtctcttctgagaacccttgaggttcctgagtgagagcacacagcagtggatgactgggtagagacggatatgttttgtgtgtgctcttgtgatatgggttaacatgtccatttatgattattgtgtgagattaggccctgggtcctctagaacactgttgcataaatgaaaaaaattaaattgttttgaatcaattcaaccgttattatccactatcatcacttgaaggaaattagaggaaaaatcctattgtaattggcataattcctgttccttgatcaaatgacaagtcggactgtttattccaagagaatacagaatctaccctaaaagactctctttccctctctgtttctgcctctttctcctctttccagttacttactgtttttggatctagtggcagtagcgtttggtggtgtttttggaatgctctttcttaattcccagaagccctgcatattt

SEQ ID NO: 104542 - DNA, 1055 bp, Homo sapiens
acctaagaacattttcattattcaacaaaattgtaataaaattctgaaaatccctcagagtataagttaatcagatagataagaaaaccctccatgggattatttagaacaatgtatatttctaataggctcactgtttcatatctcactaaagaggtaagggcctggccttgtaagttaaaaacttaccagtataggacaaattaaagttgtatctgtatagttgtactcagattcttatgctatttatttttatttttatcattattattctgcaacttctgaaaagaagaggagttcaggtatttgacagaacattttatgatatccctagagtttctaaattgaatcatagtttttaagaagcattttgcattttttagttcctcagttggtattttaaaaacatttataagtggccaacaaggctctcagtagtgtttcaccttgttctctctaaactcctcttctaaacacaatgtgtatagggcatttggtctccagacttcttagaaaaaccagtctgactgataatgaaacagtgtgctttgcattgataattaatatttcattttatacactggagcattatctgtaaatctccaaacatagcattgaaatttagttgaaccgggactcggtgaaaatctgctcagtgttcagtactgtactataagctttcttcacatacattatctcacttaccatgcatgaaattgggatcattgtcctaaatttatatatccagaagctttgtctcagaaatgtttggtaacttgtccaaagtgaagcagctaataagtgacacagccagatttcttctggtgggggatagtaggggttcacagggtctcactgttgtccaggctggagtgcagtggcatcatcacaggctcactgcagccttgacctcctgggctcaaatggtcctcctacctcaacctctcgtgtagctgggaccacaggcacaccaccacgcctggctaatattcatattttttgtagcgacagggttttgctgtgtttcctaggctgatctcaaactcctgagtgca

SEQ ID NO: 104543 - DNA, 1095 bp, Homo sapiens
ctcctttgcaatatattttaatagaggttcagagaagggagaaatgttcttttgattttaacaacttgctgagtaggtgcatctaaaattaacttattatccatgaggttaattgtatcttgttagatacaaacaaatgtccatgttccttttttatatgagtcctgaaatattgtaaaattatacaacagaacctggaggagtaggtttgattgtatttgctgtgtttcacctcatagctaaccatggtagcatctttcttctagaatactcctgttctgattttatgttccctttttgtagtcatcagatccagaatgtaaattattttacaagtacatctactagaccctggaaatattaaaaaattactcagataggaaagcttagtgaccccaaatgagtgttttctgctttgaaaagaaaaacttaaaggtggccataacaaaagatttttcactcctgagcctaatttttccatttataaaatgagtgctttggacaagatgacttctaagttctcttctaagctttaaggctatatgtatggttctgacaattcatctttacatcattattctgtatctaagatagttcattcttcggattttttattttgtttttgtgtttgcttttcagagacctggttgtatcctaaaatgtttacgtgattcaaattaccattgagagctcttttttatatccttgttcactcttccttccaagtgtttacaggtttacagtttcagttttgctttcatttggccagccacaatgacatttgtatgatgtaagatttttttttttttttttttttttttggtaaaatttttgtggattgtttcctaggtttctaagagggaaaatctatgagaattgctctctggtgaagagagtatttacttacctgtaatacatgttctctaaaggtataaattataataattcacctttgctcttcctattgggggagggtcttactcagaaattgatgtttatcaaaattcgatctgtcttatgtcagggcaggagagccacagagtggtgagcaacctacaactgtatatcttaagagaacacaattacaggtaagaa

SEQ ID NO: 104544 - DNA, 1388 bp, Homo sapiens
atgttaagatttcttcctcagtcttgccattttacaccatcccaaatggtatgaaaagttgaatagcagtcattttttattggtttttgtcttttgatgggatctcattatatgtaatccagatttcctcaagtttttcagttaaaaggaattgataggacaatgttccaatatgctgagacacaagacaataaaatgcttgactgtgtaactgaattagtgtgttgaattgtatcactcaccagttgatgtacatttaaaacaggtgcactaaatagttttagataattattgataattctctggttcttttcaattatagcgctggataaaacaagccttagaagaagggatgactcaaacatcatctgtaccccaagagactagaactcagcacctataccaaagcaatgagaatagtagctcttctagtatctgcaaagacaatgcaggtacgtatctaaaacctttctgattatatgaccaatgattgtttcaggtctgcataaaaaatttaagtatgagtatttctgatacaaaaagaaatggcgtgttttctaaatagttactttacatctgtctttacagaggaagagagagatctcaagtcagggatcagttttcccaggacgacaaagaaggactagacagtgtacagataacagcagaaatggttataaaaaaggttagatacatttaaagtagtaagtttaggaaatttatattcatatttataagatggggcaagggcaagaaagtggtggaacactaatattcaggaaagaattaaaattctgagtgattaagttgggtgggacatggttgagggagcaggggatgaatgaaataagtgaaaaattattatcaattgattgttttcaaaggggcttgtataattagcatacaatttttaaaagaacagccgggcgctgtggctcgcacctgtaatcccagcactttgggaagccaaggtgggtggatcacctgaggtcaggagttcgagaccaacgtggccaacatggtgaaaccctgtctctaccaaaaatgcaaaaattagctgggtgtggtggcaggtgcctgtaatccctccctaaacaggaggctgaggcagtggagaatcacttgaacccgggaggtggaggttacagtgagccaagatcacgccactgcactccagcctgggcgacaagaatgaaactccgtctcaaaaaaaaaaaaaaaaaaaaaaaaaaaacaaattttttaagacagctttaaatctaaagtctttgtgcatttttaaactagatgtcaatgaaaaatcatctgttccattggttttgacagtgacttgcaaaggatgtaattgaaagcacttgtgatatcttaatgtattttgtgacaatctt

SEQ ID NO: 104545 - DNA, 1416 bp, Homo sapiens
tgaaaaacttagaattaataataagagtttaggccaggcgtggtggctcacgcctgtaatcccagcactttgggaggccgagatgggtggatcacaaggtcaggagatcgagaccatccttgctaacacagtgaaaccccatctctactaaaaatacaaaaaattagctgtgcgtggtggtgggcacttgtagtcccgctactcggggggctgaggcaggaaaatagcatgaacccaggaggcggaggttgcagtgagctgagatcgcgccactgcactcctgcctgggcaatagagtgagactctgtctcaaaaaatatatatatatactaataataataataagagtttattaatatcactggatagaaggataaatatataaaaagtgtaaatatattttaaaaaatcatttatataccaagaaagtaaatgaataccaattttttttgttcccaaacttaacaaaactaagaaactgcctaggaataaccttagttgggtatatggagtaaactgttactgagaaatatttttaaagtctgaggaaatggaaatttctttttctttttttttttttcatgaatcatacgtgagcctttgataaatttcatgttcattatggaaagaatatatatatgtgtatatatatatttctttctctttctctctgtctttatatagttcccatgaaactgccttgtttttggaatttgattaaatgattctgaagtctacctttaaaaaaataagaaaaaaattgaaaaaataataatgaagtactttctcttgaggtgtaagacgagcttctagtatgaagctaatagttaaatttagtataatattgatgcaagaatggatgtatatatggaacaaaatagtcagaataggcctaaatataaatgtaaaagttggtaaattgtcatggaatttttagttaggagattgaaaaagaattagaatctagctggacacggtggcacgtgcctgtaactctcaactacttgggaggctgaggtaggaggatcactcaagcccaggagtcaagttcaacctgcgcaacacagcaagaccttgtcttcaaaagaactactaggtcctttgccaaagaaaattctaggcacattcaaatatatatatttttttaattcaaacttgggcctggcatggtgactctcacctgcaatttccagctctttgggatgccaaggcagaaggatcacttgaggccaggaatttgagaccagcctgggcagcagagagagacccacatctctacaaaaaataaaaattagccaggcatgatggtgggttgcctgtagccttaaggaggctgaagtaggaggatgacttgagcccaagaatttgaggctgcagtgagctgtgataatgccactgcgttccagcctgaatgac

SEQ ID NO: 104546 - DNA, 1029 bp, Homo sapiens
acaacaaaaaaaaaaaccgggcatagtggcaggcgcctgtaatcccagctactcgccactgcactccagcctgggcgacagcgagactccatcaaaaaaaaaaaaaaaaaagaatattaaaagaagaatatacgatgactaaggttccttctaggaatgtaaggatgagttaatatttgaaaatttaataatcgtcatttgttagcaggtcaaatgggggaggagaagtcataacacagtgacttttatcaatttaatgataaaataacatactatgatcttttaatatctagctgaaaaattgccagttgtcatgcatcatgaaaactagttaaacatcaaaataggctatcaaattatcccactattaccattattatttaatatagtctaagtaattgttagccaaagtaattacaccaaccccctcccccccacaaaaaaaatcaacataagagatataagtactggtaaagagggttaatgtgttatcatgtacaaatactattatctacctagagagttaattgaaaaactggtagagattaatagggtaactggataaaaaataagtatgtaaactttttaaatgttaataacatttagataacaaagggagagatacgttttattcatagtagtaaaaaaaaaaaactaaagaactctggagagtaaacttaattagacatgtggtatatatagatgaagagggacataatatgtgaataacaaagattatgccatgttcctgggtaagaatgcttctcaaattactcctgaatttcatctaacaccaatcaaaatcctaacttttttttttttttttaatagtatgagcatggtcattgaatgacttctatagttcattgctagaatagctaaaatattttggagaactagaacagaataactggaatttccctaacaattttaataaaaagtatgctggtgttgattcagtattggacaataagtggaaagaataacattcggaaataaacattcagaagataagcccagtatatgtaa

SEQ ID NO: 104547 - DNA, 1737 bp, Homo sapiens
aattttattgacaaggggtcaacattcttactatttaaagagcccttacagatgaagaaaaagaccccaacacctcagtagaatgcaggctgaagaacatgagccagcagttctcacaggactaaatataaactacacatatatagatattcttttgatttaataatcctacatgtagccatttgttctaatagcaaaaaatgaaaaaaaagttggttaaattttgataatactaatgttgtgcagtcattaaacctgaactgtagatttctattcattgtcataaaatgttgaccatgtatttctgagtgaaaatagttactgagtagtttaggtaaggcaagagtcagtgaagcaatgtctcgataaaaatttaccaggatattagcatgcgtttatttgtggatatgattttcaggttgtgtatgtgctgtataaccttggtaattttttgagtaaaggtgaaaaataataataataaaagatggatagatttgaccacataaaatttggaaactatatatgcaggaaaaagagaaaaagtaggcaaatgacttggctttctttggcctgtaaacttcttaagggcagacatcaggtctcttgttgaatacagtatcataataagtactcagtaaatatatgttgaatgaatgccttgtacattgatttgcacgtggcagatttcacctgtatcttataactcctttctacaactaacttcatcacttaacataattgactttgatagttatagtgttggacctagcagtacagagatctgtaagattccattgtttaagacccttgaaatattaaatatataaaagttattccgaatataagccatgaattacatgtttgtttctgttttatacctaggcactttttaaaaggaggaaagaaaatttagtatctggaacaaaaggaagatgtgaatatacttccaatctaggaatattaaaaatcctgagatatcagaaaggaaaaatatgcatcttcaataattttttgcatttattcttccctcttcatctaaacatctcctaccctagtttagtgcctcataattctttgctaactactgtgttaactccagatggtttcccagttactagtctcatactgaccattgcttccagataatcttcctggcccaaaaattttccttgaaggcctggaataaatgtcactccttccatccaccaagccttggggatatactttaacctattgattaagaatatagatagatggagccaggcgcggtggctcacgcctgtaatcccagcactttgggaggccgaggcgggtggatcacgaggtcaagagatcaagaccatcctggccaacatggtgaaaccccgtctctactaaaaatacaaaaaattagccgggtgtggtagcgagcacctgtagtcccagctactcgggaggctgaggcaggagaatggtgtgaacctgggaggcggaccttgcagtgagccgagatcgtgccgctgcactccagcctaggtgacagagcaagagtccgtctcaaaaaaaaaaaaaaagaaaaaaagaatatagatagatggggccaggcgtggtggctcatggctgtaatcccaacactttgggaggctcaggtgggtggatcacttgaggtcaggaattcaaggccaacatggtgaaaccctgtctctactaaaaatacaaaaattaagaatgtagatatatgggagcaagaatacctgt

SEQ ID NO: 104548 - DNA, 1966 bp, Homo sapiens
atagtctgtggtatataatcatcatttagaaaatacagcttttttttttttttaactaacacatagcaatatgatcacctttcttgatcatgctaatactaatgtgttcactttttttgttgtgtcgttttgttttgttttgagacagtctcctccctctgtcacccaggctagagtacagtggtgcagtctcaactcgctgcaacctctgcctcctgggttcaagtgattcttgtgcctccacctcctgagtaactggaactgcaggcatgcaccaccactcctgcttaatcttttttgtgtatttagtagagacagggttttgccatattggccaggctggtctcaaactcctggcttaagtgatctgcctgcctcagcctcccaaagtgctgggattataggcatgagccaccacacctggccctgtttctatttcttacaaattttaagcctcttgaaaatagaatgtatgatgaccatttttcccttcatacctagttcagtaatcagtaggtattaaatatatatacttttaactgtaaatgaataaaactgtatttttattctgagaatcaagtgagaaaggtgctttgacctaaatggtcactaaaatatttagtgtagtgacttgctttttaagtggatctaagaagtacagaaaataggattattctagtcaaaaagaatgtgaacctaattttttaatggttgggagaagtttttgtagaaatcatttcatgctttttaggtagaaaaggggctagacatggatcaaggaatcatataagaatagaaagagcttctgaaaagggacacacatatataagagatggtgaaaggaatttggatttagcatcccagtacctttagttggtgatatagcagtttagtagagggtaactgtaacacagtaacaaagacttttcagaaactcaatgtaaaagaaagaactgtagcagtggctcacgcctgtaatcccaacacttggggcgtctaaggcgggcagatcacctgaagtcaggagttgaagaccagcctggcaaacgtggtgaaatgccatctctactaaaaatacaaaaattagccaggtgtagtggtgcatgcctgtaatcccagctactcgggaggctgaggcaggtgaatcacttgaacccgggagacggaggttgcagtgagctaagtaaatgccattgcactccagccttagcgacagagcaaggctctgtctcataaataaataaatgaataaatgaaagaattttatattttgcactggtagaaattaaattagagatcagtcacatttgatttacctggagtttgggagatagaatgttttcagagttattttaagcatggtaattaaagagtttctttgggattttggttggattggaggagataacttaatgggatgaggcagaaaacagttaagagccattgtagattacagattaatggctttactgtagagccttaaattaatctgtggtttcaaactctcatccaagctttgtgtttcacagacttgttgagcccattaaagaaatggaagtctcgctatctgatggagcagaatgtcaccaagttacttcggcctctgtctccagtcacaccaccccctcccaattcaggctcaaagagtccccagctggccacacctggctcatctcacccaggagaagaggagtgtcgaaatggatacagcctcatgttttcaccagtcacatctcttactactgctagtcgctgcaacactcctctacagtttgaggtgatttgggtttggttgctgggagtgctggatatgaaaatcatcatttgtaccttctcatttcaaatataataccattccaaatgtttctttactatctttcttccccatctcagtaagagaatgggaaacctcagggtcattgtggcctgttacctggtagcctctcatcttggcagcccctatgct

SEQ ID NO: 104549 - DNA, 1054 bp, Homo sapiens
tatactttggtcaaaataggcctctagctgcctgtagtatctgttagtaacactagcctgagagcacagatgatattgattgattgtgtcttcgtttctaggcctttaaataagtgaagtgtctttcccaggttgtttggtattttcattgtggccttagcagagatttagaaaacattggggtatggcttatggcgaatgtgggttttttccactccaggttactttccctctttgttataatgtcttaggaatcagaagtagacaagaggctagcaacatgtattcatgagacaaatttattaccttcactgttggattaagttagaaatgtctgcctcagctgtttcaaaaagtaatcttgaatcactttagtgttcaggtttgggtgacagcaggtttcaatagaatccatgtatacttttttaaaacacttcatctattgcatgttactttgatttgtaattaaaatggacactgtctcttttttccttctcagaaaaatttgttctgaccactaaacacactctgctgctctgcccccttgtttgcacttctccagatgtgttttttgagaaaggtgaacattttaaccaatcttacgtttcctattcagcttttccaagtatgaggattcagaatacttagcttttatgagtaactaagaggcagctagcaacattgaaagcagaactgtattctttcttaccctagacctctacttttggagcagacctctttctgggtgagggaaaaaacctcctggttacatatcagttatctagggaaattactctttaccagattatttatgaaattctttcagccagataataaagcagctgattcaggcctttctaacttgactttgtctacttgcaattgactttgcagtttgcacctagagctttatagtaaggtatcatgagaggaattctccctggagggcataagattataggaatagagtgtcatactttatcaatacaggttttattataaatgtggaattatgaaaattagaaggaggccgggcgcagtggctcacacctat

SEQ ID NO: 104550 - DNA, 3857 bp, Homo sapiens
gagtggaagcaacattgggaggacaagcttagttagcctctcctttctaccagaataaccctcccctcctattcttgccctgagagccatactccacccgccatttcacacatacgtgcacctagatgtacaccacccactgtccatgccaagtaaaattcacagccaaaaccctgctttgctgaagcagcctcatttcccctacctcagcatgtgcctgccacctaggccacagttattcagagtctacattaggcaccctctccttacctcagccctagcacccctgagtcattgtcacactaccaccttcactctcttcacgtgttcccatttacatctttccattaagcactcactgctcagtctctgttatgggactgctgcctcacctgaaagtcccaaggtaaagtcctaccctctgtaggatacagggacctaagtatacacatacatgctttttctgctctgttgccaaaagtacaatggattttacaaaataacattaataggggtggctcaggtctaattagattatgccaagaaccaactctagcctgtgagctagggattccatcaatcacatttcctgtaactgtcattcaagaggaactggccatctccctaaccatgtcagcccccagcacactaatgtctccccctggatagcactgggagggcctgaggcatataagagaataaagaaatgtgacaagcagaagaggcattggatgaaggaacaaggtccatgtaaggaggaataaggggtagggtgcccctcaataacaaatactgtaggttgctaaactctcatctaaaatacaaagacgtataacactaaaatttcaccagtctaactctttccttgtatgtgcttgagatgtttacttacagcatgaaacattataaccaatttatccttaaatgctttcagagataccaggaagcattttaacaagtcattctgtccattgagatgagttctgcagttaaatatttcccctatgcattcttattcaacttccccgcccccgaaaaaagttatggctaacatctatgcttgcttttattttttgttttgttttgcttcttgacttcgagtagatgaataataacaagatgcttttccctcctctagaacatatcctcccctgagagttcccctgcgcataggcccgagtccctgtcacccgaggtagttatcacaccatctcaatcacacttggaggctgagagtgagtgttcatgaatgtgttcctgagtgtgtggggagggctggggatctgagtcagtggggtgatgggctggagggcggccactcagtcacagtaagttgaatgagtcttcctgtgtgactgtgactacacaggactgtcaatgtagatggaggaaaatgaaggtaggagcgtgtgtgtttgtgtgtgtgtgtgttgtgtgtgtgtttggtggggttggtttttgccgtttgggggagggggtggctggagttctattaaagaatagaatctagaagtcaagatgctgatatgtggtaggagccttgttaaagaaaggctaataaatcaggaaagttgagtcaaaagttgtaagagctgttttttgagttgggtggtgacttatgccttgttctagggttaatctaacagctctgtaaaccagatgttttgacctttggttgatagattgagcagcttcttcaggaagggaaagtcattctgtctttcagctttcctacattttctctgcagctccttactgggtgcacaaggaaaccaagtgagtccctggctttctgtcacaggccaccattctgcaatggttaggatatggttgctatacaagtgttatctctttaggatatcagtagagtggttttctcacaaaccctactgctgtggatatgtcaaactcagattttagtgctagagtttctattataagctttcagatttagtaacattaactctgaatctattaatacatgggaccttttttctcttgaagagaaagttagagtctctcagaaatagtcaactgaactttaaccctatccccttccaataaaaaattagggcataattcagtgacagtctactaagttctgaatcagtagtagttcacaggttaatatgaaactgaaaaaggttttattccactagtatattagagattttcttggtgttttgactctagcttgttaggaaagtaaagctctctctcctcagttgttaaagattctaagataacgtaatttgaagactgatatggtatggtatctggttttctggtaccattctttgtcggttagctgtagttgacctagtgttggaagtttggaggttatgataaccaaatagtaggtggggtttatttttggtacatttcagcatttcagaatctgcagtgatgagcattagtggtcttgtggtatgttgacgtacattagaggataaagaagaattgagtggccagaaagttgtatgagaaacacagcttctttaacagtgaaagtgagtgaagaactggttggttgatgtctttaatgccatcctcctttactgaaccagtaacttaagtacttgcctttccgtctaccttctccttcctccacctttttcccttccccccaccttccatcaatattaatttagaaattgataaccccggaagccagttatcttaagacaccagtctcatctttgttttgtgcatggggctaaggtaaattcctaattataccacttgtcccttagtgtagtacaaggtgactcagcaacctgatgaaaggctaagcaggcaaaatagtcacatttagccaattacctaattctaactttcccagtatttcccatccagaaagacttgaaagcaattttggaaaggccaggattctttagtactctggcccatgtacactgttgctacgtgggacttttacagaatataatggctttatctgctctacttccgtccctcttatctttccctgttcacctgtgtccctctcccctcctttctgccctttgactttttcctttctcccctaccccatgtctccgttgatttttattctttcagctttgtcaccgaaaagacctggatttggcaaaagtaggataccttgactccaacactaacagctgtgctgatagaccttccctactcaactcaggtcattctgacctggctcctcatccctccctcggacccacttctgagactggtttcccaagcagaagtggagatggacatcagaccctcgtgagaaactcagaccaggcatttcggacagagttcaacttgatgtatgcctactcccctttgaatgctatgcctcgagcagatggactgtatcgaggatctcctctagtgggggataggaagcctttacatttggatgggggatattgttcccctgcagaaggattttccagcagatatgaacatggcttaatgaaagacctctctcgtggatccttgtcacctggtggtgaaagggcctgtgaaggagtcccatctgccccccagaacccaccacagaggaaaaaagtaagtgtttcatgttatatcggcgaacttttcaagaatgttaaccaagtagtttagtagatattcataagtttctgctatgtgttccgcactactctcagacaagtgagacatagtctctgccaaatccagtgaaagacaggctgttttagtacaacttggtgaatgttgtaaatattcagcaaatgtaaatgcctgtatgtgccatatacttgctaggcaattgagaggttagaacagtgaaaaagaaattttacctattatttagtgtgtcccaagttcgaggcactgtattaagctctttaaat

SEQ ID NO: 104551 - DNA, 1115 bp, Homo sapiens
ggtggcactccattggccaggcagcaggcatgcagtatggtgcaaacagttggatgttgttgtatcaggtggaaggccgggggagccaggaggaaagtgcagagagtgctgggctgggccaggccatagagagcttgctaatgggttgggactccacttccaagtaatgcctgatcaagaagtcacaaagccaaaaatatgcttttgtataagtggttctcaactaggggtgtttgagaatgagtaggagtgttttgaattgtcccagtgacttgcatttattgagcagggccagggatgctgaatgtcctgtataggggacagtcccatgtaatggccaaacatctgtagtatcctcattgaaatgaaacctagtggtttttttatattttcattataatgatattaccagaatttattaacttctttccaaaattatttctagaaaatgcatatgcaaaactgtctatatttttgttccatttggacagaaaaatgagaaccctaaggggatagaaggaggaggaaacattggcagataatttggattaagataataattgatttcgaagattgttgcgtgaacagcattgactaccagaaacaaacatgaaaacaatctttggatttctggttttataatatttactatgtgcaaaagtcatagaaattatgatattttatttcagaaacacttctgaaatttattgggcacatttaagcataaatttaagcatatgccaaattctgtgctggatgttaaagataaaaagccagataaacttggcctttgccttcctagaacttatagtttagtcagggagcaatcaaggcatggtaataggttctacggcctgtgtaagcaatgtgccagaacaacaaagagaaggtgtactaggcagggcacggattatggtgggcagggtgggatgggaggtctgctgtcaggaaagaatgagcaagcattagggagatgaaggggaagttagggagaagttaccaagttgttttctagagctagcttgctaaaattataaactggaaataataatttcctctctttttacattaattacatctatgtgtaagacagaaacagtaataaattcctattt

SEQ ID NO: 104552 - DNA, 1245 bp, Homo sapiens
ctctcaaacagctaactctaggggttcccaaggagtacagaacagccatcagtcacctgggaggctttttaaactatacaagcttccaattctcccttctctaggtacttccattgttgcaaataactgtgatagcatgcttctgttactgtgtaatggtaacctcacaagtttttctgaaggcagaaaaaaagatggtggtctaattggcaaacattctttagagacttgcctcctagtttattatcttcctcttaccaatttccagctgccttaaatatgtagctgtgctcagatctctttcatactccccaaaaaaagttatcagggttggtgtctgctttgtttgcgtggcttggctagtggtttactaaggtaccatctttccttctttccctgttgctggtgatccactaatgatatccagatagagtaccgttttttgtttgtttgttttttcctttctaggtatccctgctggagtaccgaaaacggaaacaagaagctaaggaaaattctgctggtgggggaggtgactctgcacagagcaaaagcaagtctgcaggagctgggcaaggcagcagtaactccgtttccgacactggtgcccatggtgtgcagggatcctcagcccgaactccatcttcccctcacaaaaaattctccccatctcattcctctatgtcccatttggaggcggtaagcccatcagattccagaggcacttcttcatctcactgcagacctcaagagaatatcagcagtaggtggtaagtttatatttgatgttttatagttaaattgggggtgggggggagtatatatctaagatcattcccagttttacctaaaatctatgggaacacttgatgggaacatctgagacagccagccaacagtaccatctgtcctgttcagctgatttaataatgtcagctgcaaccccccagctttgcagaattaagaattaccaacatgcctgtggagcagtgctttggatgacatgtagttatggatgcagatgagctctttcatttggtgggcactaacactgcctttcctatttctcatttcacatgaaaggtgagtcaagaatccagccaagttccacatgaattaacaacagatgtctctcttccacacagctagcatatacagagcaaaaagacattctgaaaggatttgtctggtttaggggagaccacaaatttaaaaatgaataatactggtggcaaatactgagga

SEQ ID NO: 104553 - DNA, 2754 bp, Homo sapiens
ttatcgaactactgcactgagacctggaaaccccccctctcacggttcttcagaatcatccctctcttccacgtcctattccagccccgcccaccctgtgtccacagactcgttggccccatttacggggacaccagggtattttagcagccagccacattctggaaacagcactggcagcaatcttccaaggaggagctgcccttctagtgctgctagccctaccctgcagggaccctcagactcgccaacctcagattcagtttctcagtccagcacaggaactctgagttccacctcctttcctcagaactctaggtcgtcattgccatcagacttacggactatcagtctgcccagtgctgggcagtcagctgtctaccaggcctccagggtatctgcggtttccaattcacagcactacccacaccgtgggagtgggggtgtgcaccagtaccgactccagccactgcaagggtcaggagtcaagactcagacgggactttcctagggcttctggatttgggcaaacagaactgaatgagcccatagctgcttccttccagctgcctctggaacctaggccgagcatattgctgaggaacggggggtacaaggtgccagaggattgggtctggtggacaagaaacaagacttgtggtcacaattggcctctggccttggagaaagctgtaaatcttgtctgaagcagagactataaagaagtttctccctgctgtcaagggtacattgttgacaagcaaatggtgtttcggttagtaacggttctaagtgcaatgagttgtgttgaagcctccgtctcccatccttgcctgtagcccgtagtcacttgtgcagtgaggacatctttttaaatttaaaaaaaaaaaaaaaaaaagttttcaaaggaaaaaaagttaaaagagccaatctcaaagccccaagccatctgagtactgttagggttttatgcacttaagaaaaaaggtaggtatgtaaatgttcatcctaagacaaccattccaaaagcaggtatctggccaatgtgtgtccaccaagaatactgtttatctttgtcttaagatcaccaagaaataggcaaggatagtaaagcttggaacctgcaccaactggagggtgcctggctctttgaagaaaagctcatggtcagctcttgattattcgggagcagattatttgagtagattgtctgagcctccaactgttaccatcctactcccccttcccaagctatttcacagctcagtaacccatgaagtaagtagacaagaaaaggaggaatgagacatgatataggccaattgcattgctacttaccagcttttggcaataaatttcattaggaaggataccgagtggtttgggaatgcttcgaattttattttttctactcccaattaatcaggagttgatgatcccatgagcaggaccgcctccatgattggggagcatgcacttgtgactgcagggtaagagtgggaagataggtttgtggagtggcaccgacaggactgtgattgtgtgtgggcctgccccacatttctctgggggatgcttatgtgagagtgggcccagtgaaagagttaccaagccacccacacccctaacactgttctggatgagagatgagagcagaccggcttctccccatcagtgcattgtgcctgttgtacacccctggaggagccctggagccagcccaggtggggtacacaatctttttaaattccatatggttgccagcttatttctttcacttgtttactgtaatatctggcgtgtttttatttatctaattttgtattcagttataaccatggtaggggtagtgaatatatgacaggtgtaatccctggtgctgcagtggaccttcttttcttttggacaagataatactgtgagtttccctccttccttccctctaatttgttttccttttttccccagcctcttgcatccccttcttttctaccctgtcctacaactatcatatgcacagtcttctctctttgtgtgtgactgttacaaaatttcacttttcaaaatcgaaatcaggtgtttgctcaaatgaggggagattttttttttttttttttttttaaatgctgagacctcagcagagtacttttctttttgttgtttcccccacaaacccatcagtctgggagagcattgggagtggaaatcatgttgcctgggatgctggtttctttgtatattatataaaacgtatgtaaatgtctctccatttgggctggggtttgcattctccccttggctatttaaccaaggggagaggccagcgggcaggcggccctcaccctgcctggcacgtgcagagaccccagccactctgtgtgggcagggtgctgtcaagaccagacctcttgggggggtaggggcgggggggtggggggaactcttggaagggaagaagtatcacttctttctcaagtggagtgtttacaccttgctgtaacatttgaactttcacaagagatgtaataattttgataataaaattcttaaccataataatcataaagttgagaacttctttgtccaattttgtggccctgccttgcctggttttcctaatgccatttttatctgaggagaatgtgcccttggtggagttgttttgcccatgataatggggccaggaatactgtctgatcttccttcgctttttatgattgcagtcaggacagtgtgaaggcaaacctgcagcag

SEQ ID NO: 104554 - DNA, 1022 bp, Homo sapiens
caaggacgcctgccaccaggtgtccttgccacaccttgttccccaaggacacccaccaaacctgtgccctggtgcgggggatagaactgacctttcagaggctggaggcccggggcacaggcagccaaggccgcatccttttgggaagaactggagtgaaggaagccacttcagaggacgtagtgggtccagctgacttaggagtgggtcagcgccgggtggagaggagggaggctagttccctggtggggtagcctggcaacattcccattccaccgcacctggccagctgccatcttggcagagccagggggagatgcaccagggagtttggagtcaggaaggcagagttgtgtgggctgaagtctgcgggaaccccagggtgacacaggcaaggggtagaagtcagagtggggaccaaaccatagactggggccctgggttctgcagaggtgtggatggggcaggtggcaggtgctccagtgggggccccaggtgaggccctgatggccctcctggggcaataaagacatcatgggaagggggctttgtggtttgcctctgctctcgtcgggcgatctggctttagccttcaggaggaggtaagcagaggagatcagtgcctgtttctgaccccaggagggccttgttgggctccaacctagagccttccggcttcaggtcccaagagaagtccccccctaactgtgacccccctaactgtgatcaggggtctgccattgcccgcttttctctgcctgatctggggactcaggagaggccacggcagccacagcctaggggtggttcagtccctggcccacagtctggtcagttgagtccttctgggaaccggggctatgaaaactttcgtctttggggaccggtacccatgaaggaaaactttcctgagggggtgaggaccaaagaatcaagatccttttcaggcctgatagccaagatgatgagaacttttagataaggctgtggggagagtccctggccttttgagcatcctgctt

SEQ ID NO: 104555 - DNA, 1049 bp, Homo sapiens
cttattgtgtgccaggcaccaccctggtacctggaccgcagcagagaatagaatgtgtagaatggaatggaagctggtggaccctggaggtgggaggaggcaggtagaggggtttgggggatctagaagtgagtacctttcagccttccagttgtgtgttctttttttctttttcttttttttttttttcagaccgagtctccctctgtcacctaggctggagtgcagtggtgcgatctcagctcactgcaatctctgtctcccgggttcaagcgattcttctgtctcagcctactgagtagctgggattacaggcacgtgccaccacacctggctaattttttgtatttttagtagagacagggtttcaccatgttggccaggctggtctcgaactgctgacctcaagtgatccgctggcctcggcctcccaaagtactgggattacaggtgtgagccactgcacctggcccagatgtgtgttcttaattatcagggtctctgggctaggaacctcaaccaggaactcccatcactatggcatagaatattcatctacatttctctccatttctttctttcttttcttttatttgaaactgagtctggctctgttgtccaggctggagtgcagtggtgcgatcatggcttactgtaaccctgggctcccgggcttaagaaatcctcccacctcagctccctcagtagctagaactacaggcacacaccaccatgccttgttaattattttattttattttattttatcttatttatttatttattttgagatggagtctcactctgttgcccaggctggagtgcaatggcatgatcttggctcactgcaacctccacctcctgggttcaaacaatttctagctaatttttgtattttttagtagagatggggtttcaccatgttggccaggctggtcttgaactcctgacctcaggtgatctgctcaccttggcctttattctattttttgtagagacagggtctcactatgtttcccagactgttcaactcttggccttaagtgatc

SEQ ID NO: 104556 - DNA, 1073 bp, Homo sapiens
ataagacatcatccctgtctccaaggatcttaggtctataaaatgcaattcctgctctcagggagcatactgtctagttacgtcactatattagtcagcagtttttcagtggcaaatgacagaaacccaactcgagctggcttaaataaattagaaaaaaataaagaggctagggtttatcggctcacttaatttgaaagtcaggagtatttggcttcgggcatggacagatccagatgttcaaatcacgccatgaagaatctgtctctctccatttcttggttcctctgtgctcgctcattttaaatccacttctgtcttcaaggtgacaaataaggctactagtagatctaatttacattgtttcagcttagcagtgcttgtggaaaaagaataattccagcaaacgttccagggctgagccagattggcccagcttggtcaagtgtccacctcttaattaatcatggtgactctgtctaaggcccgagccacatgcctatccctggaaccacacatggactgatagtggagaaaggccaattccctcaaagataaatcaagtgtgagcactggaagaggggtagcatgggcaagacaagcgccaacagaagttttcccctgggcagtctgagcactaatatgtgcgggctggaaatgccatggaaacccggagcagcagagggggctgccagcttagttgggaagcgaggcttgagctgggcagggtgttaccaggtgggaggtatgagagagcatcctgaatggagaggaagatcatgggcaaagacacagcggtgagaaagacacatctggcttgagtgtggcatccacataggggagcagcatgaggagaggagaggaaggaattatgggggccacagtatgctgggtcaaagaatttcgactttaatcagcagcagttggatactgctatgactgttatcattattacagaaaaatagctaacattttacatgcattatataatttgatactcacaacaatcttgtggagtaggtaccattattcatattgtataggtgagatcaagctgagcttcaaagaggaaa

SEQ ID NO: 104557 - DNA, 1046 bp, Homo sapiens
ctgcctcccgggttcaagcagttctcctgcctcagcctcctgagtagctgggattacaggcacgcgccaccacgccaggctaatttttttgtatttttagtagagatggggtttcaccatgttggccaggctggttttgaactcccaacctcaagtgatctgcccaccttggcctcccaaagtgctaggattacaggtgtgagccaccacgcctggcccctagatatattttaactaagaattcgcagtattttaaagactgtgtttttattaaccctaacagcatccagatacatttaaagaggtaccacaagtatgtgggagtcactgatttcttccttctgggataatatttgggtgcatgtgtacaagaggagctgtacgcagattcctagaaggattaggatgtggaagcaattaaattccctctaggagttggtctgaaagctcaacacttttaaggaaggaacatgagtatttttccttccttctacttggttactctgtgtagctgggaaagcttcctgctctaactttcctgcctcctgtttctgttgctaccagaagctctgactggctggggtgagctttgctaaaggttggtaggtgagtttatgagagcggacccttattttagggaagcgtgatttgatatgggtatgacttgctggagctaacttctaaacctcactctcaagttctagaagctcacttaccaagcccagtgcattaactactacacgtccctgtgtcacacatggcttctcttatgcctcctttgctctgtgcgctgttggccatatggactgtgaaagcagaggcctagagccatgtggaccaagaaacgtcatctcattctgccctctaaaacagcactccccaacctttttggcaccagggactggtttcatggaaaacaatttttccacggcagggtggagaaaatggtttcagatgaaactgttccacctcagatcatgaggcattagattctctgcaaccccagtccctcacatgcggagttcacaatagggttcgagctccta

SEQ ID NO: 104558 - DNA, 1045 bp, Homo sapiens
cacccagtacagctggtactgaggcacagggcaagggctacagtccatacataggagacatgaggtctagcctggaaggcacatttggagaccagatgtgtcacagctgcatgattggtactacacataagaagagcttggtacagaacaggagtttgagtccctataaaaggaggaaatgggctggttcacactcttgctatccgctttccaaatgtttttagaaaacaatactacaggatattttagaaaagctcctttgcatggtctgtaccacatggaaagtctttaactggtgtcaagcatctctggaatgcacacaagcaccctagttaagatcagcttcccaaatcatagttcagttcatgaaagggcatcttgctatgcccaggttctgcctgttagctctgaaagcagcggctctggcttgtgctcaagaatgtttggctcttctccctagatcaggtgacctctgcccagccaggtcaccatcttcagcatacactgttcttagcaaggaaactgctggggacaacaaagcagtgtggattaaaaaataaaaaagtaatggcgactgtttatgctttctacttctgcctgtatctgcagggctgatcaaaaggcagcagtgagatagaaaaattttatctttctctttgcttcatcggcctgctaggtagagggaatttacttgctagtatttcataatcagttgataaaatagctctaaaaactttatctgtacaagtatttcagactgctacattatgagcaagtcatgtggctaaaaatgatcataaatgggggaaaaggagggggtggaaggggatcaattctaatggaaacggaaagattctatcagccaccagcctgctgcattttagaacgctgagattattttgagtcttctggcttaatgtcaagcaatgccagaaagtccttttccatttccacctgcaaatttctcttctttgaaatacatcccagagattggggtagtctcttagaaagtcaccttccctgcaacctcgctgaaatcagttgt

SEQ ID NO: 104559 - DNA, 1739 bp, Homo sapiens
gtcctcggcagggcctgccctccccggctgctgcagtcttcccctagcccacctgacgctcactgggcttggtacagtgcagctcttacctccctctcctgcttttccttgccctgtgagaatcactgctccattggcaatggtgtgtctgacacgttgagccagatgagttgagagaccccttgtgcagctactgataatgactttattagcacagcactacagcgcctgtctctgtagtcactaaaagtgggtcagaactctccaggggcgtgggagggtcaggtaaatgaggctgttttaaattcctgggaaagccactccaattacaggtgccgtgttccccctccccctgggaagtgctgttttgctggcatgcgtcaccctctctgcacagccccagaacactgctaagcaattgtatcttaagagaacagagactgccccagctagggaaaagggtgccgcaaaactgggtcaggcccttccatggagttccaggttctgagtgggctgtttcttagagggtctggactagaccttgcacttgggctagaacagaggttctcatctctttaaagcttttgcttaattttccatctcccacctcatgggcctccttttttaaaagactttccctgccagacagactccatttattattcatcaaaagatagtatgcagtaaatagcactaaaaagcaaatgaagcatgtttgaaaaggttgatgttttagtttctgtgatgtgatggcatatgaaggaatgaatctttatgtggccatttggagacattggctacagcctcagggctcttcgtttacctttactggcttcctggacagccacaccaggagcccagcacttagaggaccctaatgtgggcagggggctctgggtcaccctggcctcagcatccgtttctgttcctcactctcacattgggtcagagccccccccccgcccccgccccccgagtagggggtccacaggctgagtggtggagggagaggtggtaggagctgctggagatggaatacgaatgtcccagattatctgggattcaaaacctatggtctgtaaccaaggaccttgtgtagttgttgccccagaataactcttggcattttattttttaaatactttaaattctaaatctgagttaatgtccatttcttctcacttttctccaacagtgttgggatctggtgcaacaaacacaaaactacctgaagctgctgctttccttagttaacagtgatggtgagtctgtctcctccagagccctcgagccactgcacccttggggagttcccagttcattctgcctcaactgtatgtttgttggagttgcacaccttacttttgtgctgtgggagaggaatttggggagttcctagaatcccagaggctgggtgggatttgtccattggtggctttattccatgtcctcaaaatcctagaaaacaaaattaagaactccttaccatctatgccgtgcacagggtattttcacactgtctcagcattgcacaacagcattgtgtgtggggccaggatgggcctctcattcagaaagatgaggcatgagatgagagaatcaatccgggctgctcagtggatgcacacagcctgtagaggccctgttctccagagtcctccacccagtttggctgttttgattggatgggcctggcttgctcaatgtctctagggcagacggactctaaatccctggta

SEQ ID NO: 104560 - DNA, 1325 bp, Homo sapiens
gcagaaactagagggtggggaaggtagtactagcatgtggttagagttggccagggatagtcagtgtcctgcaattcatgcagccctgcacactgaaaaattgcccactcccgctaccccccaaaaaaatacttgtcgtgccctctgagaaactgggtagggatgtcatccctgcctaaatgacctgggcaaagtggactgtgtaggctgcactgtgtccccagaagtacactgagaactatagtcagaaggaagaaaggaagctacaaagccagacgcctgccactcacccctttctgggactaggctggagaagagccatggggaggccactggggaagacagaagctggtggggcctggctccctccaccaggccaagctggtggtacttcctgctcatcggcccatgtctggttctctcctgggcatcctctcctgcggttcctgagtagatgacagcgggctgctggtacactgtatctcaggctgggatcggacccccctcttcatctccctcctgcgcctttccttgtgggctgtgagtatgaatcggcccctaccaagctctgctctttgggtgtgttaggattgtctccagacagagggtggagcaggggatgccatcgctcagagcagatgtgtttaaccctgtccttccgggtgttcttcagcctgcgttgtcactgggtctggttatggttcagctcctggggatgagaagagggctctgtcacatctcctgtggtctcttccaggatgggctcatccacacgtccctgaagcccactgagatcctctacctcactgtggcctatgactggttcctcttcgggtaagcctttgcaggagttgggttttggggccttagtaacagtttctatatgtgagttgtgtggtggctcccttgacaggggctggaggtaaggataattccacccctcgagaaggaccgaagctgctgatcaggccccacctgccacgctggtgccagtgacacagtctgtgtctggtgaccctgtcctcttggccttgtcatcttggtgctgctgactttgcctctctaccctccttttttcaggcacatgttggtagatcggctcagcaaaggggaggaggtgagtataccacctacgacttgtgggcacagctcagcactgaaagaggggcagtgggtagcctgtctgagttccacgtgttaggggcagctccttgccccaggtgtgcagggatgtggccccctgtcatctcctcctgaggcagcgtggcaggacaggcaccagcacagtagctctgtgttctgggcctcgcgggcctgtgctgtgg

SEQ ID NO: 104561 - DNA, 2607 bp, Homo sapiens
gcctccctgcttgttgggctggtgctccctcctgccttcgctctgaggccagggtaggggtccctgctgaaggccactggtgaagaggctcttctgcagggaaggccatgtgggggtcaacttggagtcacactagcagacaggctttgggacagacgagtggtctctcatgaccaagaaaacaggtgtgttgctgcagggagaagccagcccaggagtaggaggactcttaactcccagtgtgcccaagctgactcttgtcctccatggcctacagcaggaagtgtggctgaacactgcagccccctacaaaagggcagaagtctgcttccggcctgggaaatgcaagagtcttggctggcaactgccttaggacccctgtaagagttggggtcttgcctgagttggtttgccttcctaatccgagctacaagcatgttgggccacacttgaacgctcagggcacaagctgatgaggaggatgcagaccttgctgccctcagaaatcttcacctgtgtgttggacagagccttgcagcgtgggtcccagaagtggccctggtgtcttataacactccctaggctaggacccgtctccacaagttgccagtgaattgagctgctttccaggacaggcaggattgggaacgggggacacaataagaccccagatagatctggaatttactgctccggcttccatttctaggaggaagagtttgccagcccgggatggaggcttcaccctggaagacatctgcatgctgagtgagtcctgggccccaacagacttcccttcctccatacatcttcccgtgtacagatcaggcaggaactgtttgtgctaagaggttttttgtttttttttttttcttcccagttatgtggtatagaaaaggtgggggaccagtagtgggagaaggtaacacgctgactgatggcactggcttcttttaggacgaaaggaccgtggcagcaccaccagccttggcagcgacttctccctggtcatggagagttccccaggagccactgggagcttcacctatgaggccgtggagctggtcccagcaggagcgccaactcaggcagcttggtaaggggccagacttggaccaaggtcactcacagctgtggcccggggccatcagcaccagggagccaggctggagccccaagaacaaagcaggcccccaagagaagagctgagaggatagctccgtgctcctgctgtctctactgggcctcagaagtcagccatctggttggtgaagggcactgcctgtggtggcccaggaacataaagggctagggctccctgtgggacagagaagcagctgggcagggtagggcaggggtctggggaggctggtattggaggagctccattttatcatttgtcggggagatagggggccattttggaaaaagaaaaccaaaaggtaggtgtaagttgatggggaattgggaacttgagggtcagctcctttgagaatctcatgaaattgagaccctgatgactttcaccctggacagatggctcaagatgttgcataacaaagtcctgagtggtggcttatatttataatcccagcactttgggaggccaaggcaggaggatcacttgagcccaggagtttgagatcagtctgggcagcataatgagaccccgtcttttagagggggaaaaaagattttgcataacatatggaggtgggcagtgactgaagagtgaggaatcattttctagcacatacttcaagaccagtaggctggtgtgatttggatgccacaggccctccataaagacccagccctgctgcccatggccctgagctggagagagtgctaatgtttgccaactcatgtgatgttttcccagtggaagtaaagcctaggcctgaaattcagtgagggtgggcagagggctttgcctgcagtggcccccggctcacagccctgctccttccactgcaggaggaagagccactcatcctctccacagagtgtcctctggaaccggccacaaccctcagaggaccgcttgccttcccagcaggggctggcggaagccaggtcttccagctcctcttcctcaaaccattctgataactttttcaggatgggtagcagtcccctggaggtccccaaacccaggtgaggagctccaaagcccttgctgttggaagtgcctagctttcccccttaataagactggagggtcgggggccagcacctgagctagggtctcaagatggggttcctaagcttgcaggcccagtatttggaggatgggttagtgtttggtaataaagcaagggctgatttgtagagtggtttgagactccttcctcgaaccctagcataatgcaggggaacccagaagtgccgtggctgttatgtgataggtggggaatagggactgcctccacttgttacctttggcagatcccagcctcctaggcgcacctcccattgtgattgaagagatagatctagattctgagtcccttctggctcccacatctaaagtctgaattggtggggcagtgagaacagtgttagggagctgagctacatgtgtgtggctgggacaaacgatggtga

SEQ ID NO: 104562 - DNA, 1150 bp, Homo sapiens
agaatgggcatgagctttggcatccatcccaggttcaagtcaagctctgccacatgtccatgtgattttcagactcagtttagtccttggtagtaataggtctgttaagaagaaaaacattctgaaacttctggaaccttcctcccatcacccctctatggtttttccctctgggcaaaaacaggcaatgaaggaagttggggaagaacatcctctgcacataggcagagcagataagcgggaggcaagtgggcgttccagactgcactgcccacaggggccccatgtgctcacccctgcgtgaactcttcagctcagaacactgcctgagtgctggagctgagcctgtgaaaccaccgccacacgccgtctggccccatgggaggtgtggtggaagtggtggggcagagatggggccagacagacaagcccatgtgccggtgccccgtcccatcctgtgtgtgcatgcctgctgccgcaccacccttgtctgtgcccagctgtcctcagggccactctgaggctgcagtggcactgtttgaccctcactgttctaggctgtggctctaggtcatggttcctgcccccttttctgcctgtccagcattgctgaacaactagggaggaaaccagaggttcctcttgtcctctgggtcctgcctcagtcttaactgcccagaatgcagtgagctcccaagctgaggcagcaccccatcacccgttaccacaccctggctctccatctcctgcctgccaaaagatcccactttccaatcctgtgatagtgtccctcagtctcacaggtgactttctgcttgcagggcgtgtctcaggctcttgtagccagtccaggatggccaccaaggccccctcttgggaggctgaggagaattggggttgtcctcctgacctcagagccctgcacatgggggcttggccaagcttgggatagctggaccaagatgggtgcaaggctttgaaaggtgtggggtgggcagctgtgaggtgtttgatctttccgctggtctgtttgggggatgcctgtctggagccagacttcttctgacttggatgcctgttggtcagaggttttgaaagtctagattactcagatttggagcattctaattatgtatttccattaccatta

SEQ ID NO: 104563 - DNA, 1106 bp, Homo sapiens
tctgatgggactcctgggttctgtgttgcccaccctgcaaatctgcatgccagcaagtatgggtgacccggctggctgctgggtcaccttcatttgggtgctagccttgctgccttcctttggtgctgttgagattgtccttgccgtgttcactcccagcgcaggcatgccctggccccaggctgtggctccgattcactcttactgccatgctttgttctcattttttgcttccacagtaagtctgcacaaaatactgtcctcacagctgagcttacctggtgatctattcttttttctcggtcactacttgtccagcttttttttttagacttttggagacagtgattgacaacagaacctagcagccagggctgcgctagtcccctagccccctccagagcctgtgtcaggcatatgactgactgcatcctctcccctctctctcctctctgccccagatcagtggaccatcccctgcccggatcctctctctccacagactatggcagctggcagatggtaacgggctgtggcagtattcaggagcgggctgtcctgcacacagactcctctctccctttcagcttcccggatgagctccctaacagttgtctgtaagtgtcttgcttgagaaggcaggatgctcccctgcccatgggaaaagctggtgagcagtcaggagtgctgggtaggaatgaggctggcgctcaggagctggcctggcctcctgccctcccctctctcagctgctggacccgaggtatgaaggaggcctgtggctggtcaggaagtgcactggtttgtgtgttcactctgcagcctctaaaacccatccactggtgtctcaggtgcacccaaagggaaagctgctggactgtaactatagaagattctatttctgtataagcctttgcctgacatgagaatcgtttgaaggcagaacagtgggatagtgaaggtaggtgtatggtggaggccagagccagagtggtgctgggttagcccgaagctttgctcctgagcagaacctagggttacttgctgtctctacccgccttgtcttctgtttttgcctctgggcaggaataagaattggatgggga

SEQ ID NO: 104564 - DNA, 1020 bp, Homo sapiens
ggggctgaggtgggaggatggcttgaggctacagtgagcgctgattgtgtcactgcattccagcctgggcaatagagtgagaccttgtctcaagaaaaaaaaaaaaaaggttagtgtcccagtaaaagctcctgctctaggtgggaacagtagcctgagggcttagaggaatggtttaagggaaaacagggccagatatttggggcctgaaccacaaggatagcatggccgtaggacagacactggccttgtacagtcagaagaagcacaaggacaggtggtatggagggagggaggatgaggatactgggtcctgtcccagggtaatgtctttgttctttctcttgacctccccataggcttgcagccctgagtgatcgagagactcggctgcaggaggtgcgctcagccttcttggctgcgtacagcagcacagtggggcttcgggcagtagcccccagtccttccggtgccatcgggggcctgctggagcaatttgcccgtggtgttggactccggagcatcagcagcaatgccttgtgaagaagccagcccatgacattttcctgctcctctctcagctgagcccttagcagagaatcaaagccatgcctggccgaaggggtacttccaggtcaggggaaatttcagtcccccatctccatcatgaacatggcagccccaaagctgagcaaggccaaagacagggttttccaacccccagcctcttgactggtgaccaccaccccttcttgtcactgtctcccacccaccccatctttgctgggattcccatcaactctcagaactgtgtggggtttccctggggccttgtggaagccatgacttcacaaagaccctacctgtcagttcttgtttctggggaggagggatcacctgcactgagaatgaggcagtttgacacagatcacaaaataaaatcaaagtctttttgaatagccactcttgtgtcatcatttggttattgtctttgtggagctactaggaaggttctcattg

SEQ ID NO: 104565 - DNA, 1028 bp, Homo sapiens
ctcccccacccagccccaccccacaccggttccactcttttcccaggtacaacgtggactccaaaaccaacatctccaaaccggtgagcaaacgtttcctcgagggttggcggagcgcacaggaggcacttagatgtgttcaacgactctcagaactcctcccaaccctcgacccagaccccatcttcttcaggcccccaacccaccctcctggtccctctcctcctgcctgagtgtcctgcctgtgccccctactcactgttcctcttccttcttggctgccactgctgggacctgcagaaggtgaggctgaatggggctgggcagaggttgggggtgggggtggtattgtggagaacaggcttggactgatgacccactacaaggcagagattgctcgcagaccccttctttcacaccccctccattaaagcccatgtagggccgtggctcttgcaccactcattcgcctgggaactgccctggtcctgtgcaggagcatcactggggctaggctgggactcagcactcaagagcttctggtcttgctgactccttgtcctgcataggatttcctgggacaagcgttcctggccctgggagaggtgattggaggccagggcagccgagtagagcgaaccctcacgtaagctgaataggaaggggtgtgggagtggggtgggggcttccaaattctccctcccaaggatgccgctgactgatagaagtggaggctggggttgcccctggtcaggagcctgccccggctcccatcaccctcgtagaaaagtccaatttccagtgctctgcccgagtcagtatcaggcctgatatgtcttttcttttcttttttttttttctctctctctctctgtttctctctctctctcctcactctttttctaagtctgattcagcctttaaggtccacttccaagcccctctccacagggaagctcccccggactaagtcaaatcctcaggaattaccattacatccactcactaaatatgcattagcatgtttt

SEQ ID NO: 104566 - DNA, 1022 bp, Homo sapiens
tctctggcaactccagttgggagaactgacagtgcattgcttcccagcaggcatcctggggcaacagtgtatctttcggggctgcccgggctagtggcaggcggggagccttgtttcacttgttacacttccacaaaggggaaacgccgccgcatccggagagtgggctgcgggcactgccggggcccagccctatccctccggcccccgccccttacttcctccagccccctgagcttcaggggcagatgcagccgccattctccttgggccctccccacgggctttctggtctaagttctcgtctccctcgcctgtgcctctgctgccgggttccaaggggagattgctgattcgctgtgctactttgggaaccattcacccgggacccagcttggaaagaggagagcttgtttgtgcttcggttggtttatgtttaaagacacagccgcaggtaggaaatagaagagttgcagttggacgtgtagcgttactgatgtgaaaatcaggagccgttgacagtggagctggagcagcccacttgcctggttaaggcacaggtggagaggccaagaggggttattttgtcagggagctcatgatagccctgcctggctgggatggtgccaagcccctagctgaatggttgaactcaactaggccgagagaaattggggcagtctctgaccaagctgggcttcctgaggcctggtgccatctgctgtctacactcacccaggaatgttggggagcggggagggagggcccctgcggaccagcatggagctgagcatgcctagattgtcgcgttcgtgtttgtacccttagggcctggcacttggtagtcactcagttgatgtgtgagtgggtgaacagctcaaatgtaatacaagctgctgtcactgactaaatgacctcagttttcactttgtttcacagtacatctcctacccagtaccagggccaggctccccataaagacctcaaaagtaaatgaattctttctgtgatccagtgatttc

SEQ ID NO: 104567 - DNA, 2473 bp, Homo sapiens
gtaaaactgaggtttagtacagcagtgatgtcctaaaagtcataaaatggcagaggcaggatttaaatctggtttgcttagaagccaaagccccatcccttcctttgtaccctgtagtttacagtgccagagtctaggccacctatagcatgccaggcaaggagcaccttctctgtgtgacaagcaccgagagcagccctcaattccaggcctgttggcatagtaagtgatacaggttggacattaagagcactgggctggaggttgaatgcctctgcctctgccactcccttgttatgtgacctatctatgttttgattaacttctcaaagcttaagttttcttatctgcaaaatgaggacaacaagaacactaactctatggctgtggtaagaataaatgtaatagttaagcacaatgcctggctcataggaaatcctcagtaaaccttagctattataattgttatctcccaaggctatccagtgaacaaacatagcacctagagtttgacggagccttgagctgatgctgacactagctgagagaagatccatggcagctctagtcgaggccctgcccaccagtgctaaaacaacttatatgtaatttgtcaatgacatccaatgaccttccttcttccccgattcttcgtaccatcatctggaccactctaaggggtactagctgccccaccttcctccttttagaggaggctggctgagcctctgcaaccccaagaagatggtgtcacatatagcagctaggacatgagctttgcagtggcagacctgggttcacatcccagctccaccactttctcacaagtgagctggggccaggtgattaaccttccaagccttaggtttccttttcagcaaaatagaaacgatgatagtacctataatatctggagttaaggtgaggatgaaatgagacaacacatctgaagggcataggcacagagtaagtgctcaatggcaaatgacccatcatctttaagggagggaaatctcaaccatgtgatgctgagttccctgtttgtaccgtaggtacatcgagaagtctgcagaggagctggacgaggaagtagagtatgacatggacgaggaggactacatctggctggatatcatgaatgagcgtcggaagacagagggtgtaagtcccatcccgcaggagatctttgagtacctaatggaccgactggagaaggagtcgtactttgagagtcataataaaggcgaccctaatgcgctagtggacgaggatgctgtttgctgtatctgcaatgatggtgagtgccagaacagcaatgtcatcctcttctgtgacatgtgcaacctggccgtgcaccaggagtgctacggtgtcccctatatccctgagggccagtggctgtgccgccgttgcctgcagtcaccctctcgtgctgtggattgtgccctgtgccccaacaagggcggtgccttcaagcagacagatgacgggcgctgggcccatgtggtgtgtgccttgtggatccctgaggtctgcttcgccaacacggtcttcctagagcctattgacagcattgagcacatcccaccagctcgctggaagctcacctgctacatttgcaaacaacggggctcaggggcctgcatccagtgccacaaggccaactgttacacagctttccatgtgacatgcgcccagcaggctggcctttacatgaagatggagcctgtgcgggagacaggcgccaacggcacctctttcagtgtccgcaagacagcctactgcgacatccacacgcctccaggttcagcacgccgactgcctgccctgtcccacagcgagggtgaggaggatgaagatgaggaggaggatgagggtaagggctggagctcagagaaagtcaagaaggccaaggccaagtcccggatcaaaatgaagaaggcacggaagatcctggcagagaagcgggcagcagcacctgtggtgtcagtgccctgcatcccaccacacaggtatgtggggagccggtggacaggcagatgagggagaaaggagcctccaggagaggagctggcagcctcctgagtggaatggcagggctgggctatcttcccaggagctgcatagaagttaaaaagaacatattttcaaaacagatagttgtctttagcaggtcacctgactttcacattaagagccagaaatgtcagcttttatctggcatagctaacaggcgttttggaactgcccttcattttgatggtgtggtttgttaagttgggatggaagaggatggaactgccactggcagcaatggaaaaaatggtctgaatatgaagaaacaaatagaatgaaaagcggggaaggggaagctcaagaagttgtgaagtggttactgctgctcatttgggctgtgatggccagggatttttttagttctcttgtgccgtttatttgatttactatatatttc

SEQ ID NO: 104568 - DNA, 1427 bp, Homo sapiens
tcaaatagtactctgggctgcagtgactagagcagtcttaggggcagaagtccctgattgctggtgtacagggttagggatctggtttagtgctgggagcttggtttcctgtctgccacggtaccactgatggcaccactctttcttccttgccttaagtccagagtcccaggccttttggacaagagatcctctcccttcatccccattcaggaactttcactggccagagacccttgctctgcttaagagaatcagggcccaacaagttttactctttgtttcctgcctcccaggcttagtaaaatcaccaaccgcctgaccatccaaaggaagagccagttcatgcagaggctgcacagctactggacactgaagcggcagtcacggaatggggtcccattgctacgtcgcctgcagacacacctgcaatctcagaggaactgtgaccaagttggggtactgtgtccagttccctgtgggctctgggaactagcgccagggggacgaaaaccaaaatttgcaactgtagtttccagtgtcagagggcttagactctttcctcctttaagctagccctcaaaccaggatcagcatggaatgttcaatgaaaagatgttgttcctatgtgtttatgtattcattcaacaaacacataccaagcatttattctgccaggccttggggacacacagattgaggcactaccaataaattactgtgctccctcttttggcttgacctgagtttcctgggctctcttctccctgttgacctttcctctggctttctaatcatcctctgatcttcgttttgcctctacagagagattctgaggataagaactgggcccttaaagaacagctcaagtcctggcagcggctccggcatgacttggagcgagctcggctgctcgtggaattgatccgcaagcgggaaaaactcaaaagggagacggtgagtgctcctgggccagccctattttataaaagaaaaaacaaaaaattagccaggcatggtggcaggcgcctgtagtcccagctactcgggaggctgaggcaggagaatggcgtgaacctgggaggaggggtttgcagtgagccaagatcgtgccactgtactccagcctgggcgacagagcgagactccgtctcaaaaaaaaaaaaaaaaaaaagacccaggagaaggaatagcgtgtgtaccccagccagatagcagcagggctgacgctggagtcaggtctcctggtgctcggtgtgcttttagttctgctggaagcagaatgtcacaggagcgtatgaacagaatcctcagttatgtgacataggtagctggtgctggtagttcaagaaagggggaagccagaattgttggtgcaagtttccctgggtggagcctcatagaaggtagacctgtatgagtacacc

SEQ ID NO: 104569 - DNA, 1741 bp, Homo sapiens
actaaagcctcatatagtctagaaagtatatttggctctactttcatcattttccaggagaggaaaagtaggcccagagaggttaagagacttgccaaagtcacacagcttgtgactggtaaagtcaggaccagaatccagctttcctttcccctgtgctatatgcctgcctctaactgtggtgggaggaggttgctggatgtgtttcaggggggcttgttaggagcagggttcggggcaataaggaggatatctccacttaaaacaaacctgccctgcccttccaggtacctgactacctagaccacatcaaaaagcccatggactttttcaccatgaagcagaacttggaggcttaccgctacctgaattttgatgattttgaggaggacttcaacctcatcgtcagcaactgcctcaagtataacgccaaggacaccatcttctaccgggcagcagtgcggcttcgtgagcagggtggtgctgtgctccgccaggcccggcgccaggcagaaaaaatgggcattgactttgagacgggcatgcatatcccccacagcctggctggagatgaggccacacaccacactgaagatggtgggtgatatatcacacacacatataagaggccaatgccggggatggacagctttccaaaagtcccctcctgggagcaggcagtgtaggcagaaagcagctaggctgagcagtggcaagctatccccaggaatgctccccaagaagccagactgggtgaatggatagcagtgcccgccattccacatcttggtgctgctattttacagctgttcctggtgagaagcccaggggggatgagtgggtttcttgctgcctgcccaggttcaaggggccctgagggctgccctgagtctgacctttcccctccaaccctacccctagcagccgaggaagagcggctggtcttgctggagaaccagaagcacctgccagtggaagaacagctaaagctgcttctggagcggctggacgaagtgaatgccagcaagcagagtgtgggccgctcacggcgtgcaaagatgatcaagaaagagatgacggcactgcggcggaagcttgcccatcagcgagagacgggacgtgatggccctgagcggcatggcccctcgagccggggtagtctgacaccccacccggcagcctgtgacaaggatgggcagacagatagtgcggcagaggagagcagcagccaggagacaagcaaaggtctgaatcccatggcaaggtggaccccaaagcaagtcagactttggctctgcagcacacactcaacccctgccattccccaggcagaggtccctcctacacagctagctgtactttctccctcattccccaatcaggggcctcttagctgcctctctggctatttgtataagagttaatcttccaaattccaagcccctaaaatgatctccccaacgttagctggagtaatggtcctatatgcccagggcatgaccctggatatctacccttctcaaatcaggcccctcaccaactctccttctttctttctctgctccaggcctgggtcccaacatgtcctcaacccccgcacatgaggtgggcaggagaacctcagttctgttctccaaaaagaacccgaagacagctggaccgcccaagaggccgggccggccccccaaaaaccgggagagccagatgacccccagccacggaggcagtcctgtggggcccc

SEQ ID NO: 104570 - DNA, 1038 bp, Homo sapiens
accccacttccaacagggaaacctacacaggcccaagagccctggaagggcatcccctgaggttggcctcgatctggagggctggtacctggtccggtctgaagcagcgctgctactgctactgctgctggactcagagtctgagctgctccggggaaggctgcagtcattacggtataccaagaaactcttcttcactggttggtttccaccgctgaagccattggctggtaagtcttggttgaagggaaggggaggagggaaggaaccggtcaggaagatgtagatcagagatgacatggaggtaagagggacttggagcttgggttccccttctgtgctggaaaattcctccaaccttggccagcagagctagctctgggcagtgtctaccacagttggccacagccctgctccaccccttgcttccctcggcagttactggctttaggacacaaatggcttaaagggcaggagatccccaaggaaggtgagaagagaaaaggtaaagtgatacaatggaggcagggggccctggatgggactttagctgggtcgtagtgtctctgggcctcagttttcccaactgtaagatgagtgagtggagttaaaggattcctaaggacccttctagctcgctcttttatgggcaaataaaggggtaactgggagtatgctgggaagaatggcagctttgctcactctcttggggggctgggtgatggtaaggctcacccattggggggtcttctgtggacttatcactgtcgctgtctgagctcgaactgggccgggggctcctaccccgcttgcgctgacgcagggaactcatgatggggagctgggggggccccacaggactgcctccgtggctgggggtcatctggctctcccggtttttggggggccggcccggcctcttgggcggtccagctgtcttcgggttctttttggagaacagaactgaggttctcctgcccacctcatgtgcgggggttgaggacatgttgggacccaggcctggagcagagaaagaaa

SEQ ID NO: 104571 - DNA, 1878 bp, Homo sapiens
cagccctgtgtggtatgggggcagactgccaggaaactccagcaacaggcagactgggctatcacaagtcagtgggggagggacttagaacagttttttgagcgaaagggttgtgtcgaccatgtgtctgagaggctgagtgggcactagtggacacagctatagctagaaaccaaaggaccatcagagacttatgacaaatatagaggtggctcccacccagactcagatggcttctagacttagttttcccacctctgcctccacagtgacaaaatgaggataaagcaggcataaacattcaggctctgaatccctgttctgtcacatttacacatgtagtctttttgttaattgtctgcagaggatattcaatgtcagtaaagtctgcctagagcctatggcacagggtagctatttctggtgaggtcagggtgcctcctttttgtacccataaataccctgtgattaccctcccgccgccaccacacagtataactgttgactgggctctttcatctctagaccatgaacagtcctttgagggcagggaccatcacagagtctggccagagtgggtgcttgggtggtgtgtttgagtgaatagaggaggaaggctggtccttgttctccctgagatgatttatttgatcttcaccttatcctataggcagtggctgcccaggaccaagctggttcctctgggtgtgaaccaggacctagacaaggagaagatgctggagggccgcaagtccaacatccgcaagtcagtacagatcgcctaccacagggctctgcagcaccgcagcaaggtgcaaggcgagcagagcagtgagaccagcgatagtgattgatactgctcaacacagcccaacctatagtgccctgtgacttctctcctcccctttgctcactgtcctggagtggcaccggcctctgcactgactcatttctggtcttggggccagtctcaggggaagctgggtgggggaggtccctcctgccctaagtgcagctggactgtacagaacactccaagggccaatggcagttcagcgcaaggagagggagggcccacaggtcagaaaaagctccagagacctcacagcattgtagggcggggtggtgggccaaagttaggacactgcgtaaaacaggccatcccaccacctctacctgctcatgccaggagaatccataactgcctagaggcctggggcccctaccggtcgtgaggtgagtgggcatctgtccagcctggaagaggggcactaggtgactccctcccctgctgttgtaaatactgtaattatcggagaatttaaattattctcatttgtaactgcgtttccgggtcgcgccagagtcatttggtactaaaaaaaaaaaaaaaaaagactgggggctgtccccatttcccttctctttcccatagattcccccacctttcaaactggtttgtatttatttcaaaggaagaaaatatattgattcttagaaaataaactgtcaatttagaattctttgttcttgccccctgccagggcaaaggggatacaaagggaggttctgtgccccagggatgatacataattgggcccaagtggttgctgactgctgtgcatgctacatttcataagacacagcaaagagagcccctgttgcccatgcatggagtgagtggcaggccctgtgttgagcacctttagacattcagctttgcgtaatccttgcaataactatagggtagtttaataatagactggttatctccacaaagatgctgaagtttcaaaaaattatcttgcctaagttcctacaactaggaaggtgcagagctagaattggaacccaggtctgtttgcaaacctggctctt

SEQ ID NO: 104572 - DNA, 1052 bp, Homo sapiens
ggggaaggacgtggctctgaagacggacagccctgaggaaccgcggggcgcccagatggaactcgttagcgccccgagtgcagacaatcccggagggggaaaggcgagcagctggcagagagcccagtgccggccaaccgcgcgagcgcctcagaacggcccgcccaccctgatttctcattggcgcctcctacctcctcctcggattggctacctctaggtgaaatgagcggtggttgagccctacttccggtggtgctgtggtctgcccctggagaacccagaagaacacagctgtgcgcgcccacaggctctgggggcgggagaagataagtcgcaaggagggggcgggacctacacctcaggaaagccggagaattggggcacgaagcggggctttgatgacccgcaaagggcgaggcatgcaggaggtggaggaattaagtgaaacagggaaggttgttaaacagcaccgtgtgggcgaggccttaagggtcgtggtccttgtctgggcggggtctttgggcgtcgacgaggcctggttctgggtaggcggggctactacggggcggtgcctgctgtggaaatgcctgcccgcgcgcttctgcccaggcgcatggggcatcgtactctagcctccactcctgccctgtgggcctccatcccgtgccctcgctctgagctgcgcctggacctggttctgccttctggacaatctttccggtgagtgactgagcctgagaagcctgtcccctcggactggctcctgccgcctcaacactgcctggcatggggtacaaaggaatttgggggatgatggaagaaacccggggtacaaaagaggaaacaagcacgggtagccaacctgttacctttaatatgtctgtacagtgataattgtaaggatccagcggtataaccgatgcagaagataatagcacttgtttttctttttttgagacagggtctcgctctgttgcccaggtaggaatgcagagaggcccattccagcctcgaccccccgggcgcagcctcccgagtagctgggacta

SEQ ID NO: 104573 - DNA, 1120 bp, Homo sapiens
ggagcagctccactgcactgtgtaccgaggagacaagagccaggctagcaggcccacaccagacgagctggaggccgtgcgcaagtacttccagctagatgttaccctggctcaactgtatcaccactggggttccgtggactcccacttccaagaggtggctcagaaattccaaggtgagtacaggacctgggctggggttagggttcttggacataagtcacttctctatgactcagttttgccacctgtaaaatggggattatatctacttcataggcttttatgaggatttaaggaactaatacatgtaaagtgcttagaataatgccaggcacatagtaagtattattaccattattattatcctgctaatcaccatagtgaagtgacaaggattttgagcccattcctggttgtgtgacctagggcaagtgatttcattcattctgtaaatatatacaaagcatctgctgtgtgaccggggatacaccagtgaacaaaacagacccaaatgccagtcctcatggagcttacattgtggcctctttatctgtggaatgggatggtaactcagccctcacaagatgctatgaggaatgagaggtctggtgttgctttctctaacggtgctgactctcattctcctgggatcctcctggagttttggtacctaggatctgacctgtgggtgggaagaggccacacccaacagcaggtacctctcctaccccctgcatttctggtctccaggtgtgcgactgctgcgacaagaccccatcgaatgccttttctcttttatctgttcctccaacaacaacatcgcccgcatcactggcatggtggagcggctgtgccaggcttttggacctcggctcatccagcttgatgatgtcacctaccatggcttccccagcctgcaggccctggctggtgagtaggtgggtcccctgcccccaggccttccatcagctttcaagatctgttcatttctcccctggttaccttctcaaggcttcctgccttcccaaacacttcccctatccagaaccgccctgcctggtctgatcaactccagttactcatcctccctatgcatccctaaaatgtcagcacctca

SEQ ID NO: 104574 - DNA, 1070 bp, Homo sapiens
ccacagcaggcctagcacactgcctggtgcgttgcagacgcttcacaaaccttagctgttcattaccatcattgagtgttaatcatttctcttctgtgttcctttttcttcacatcagtacgaaaataaaagggatttctagaatgatcaaagcaatttgggattggtatgggaaggcttcccacggtaggtgggatgggaaagataaaaggatatttctggtgtttgaagactgtcagtgtaggtcagaaaggagcaggaaagtggaacagctatttttccttccactcatttttgtggtcttctaggaaaatattatttcccctatggaggattctcctattcctgacatgtctgggaaagaatcaggggctgacggggcaagcacctcccctcgcaatcagaacaagcccttcaggtgagtggtgtcctatccacaacccacagtctggcccccgcttctgttggcttctctccatctcaacctggggaagtcctcatcagtaagaggctgggggcagttaggtgaagcctaatagcagtctcaagtgtgagtgatgacccagcgtgtctgcatgcacagactgagtgcagggttgttcagcacagaactgttcataccataaataacccaaatgtcctgctgaaggggaatggttggctaaattggcataactccatatgatgaaataacttggggctattaatcatatagctgcaagtatagagaaatatagttaaatgacatgaaaagatgtaaattatagagtgacaagtggagaaaatattagttgtagcccagtatggatggtataatactatttttacttaaaatatatttctttttttctttttctttttttttttttgagatggagtctcgctcttgtcgtttaggttggagcgcaatggcgcaatcttggctcactgcaacctccgcctcccaggttcaagcgattctcctgcctcagccaccaagtagctgtgattacaggcgcctgccaccatgtatggctcatttttgtatttttagtagagacggggtttcaccatcttggccgggctggtct

SEQ ID NO: 104575 - DNA, 1043 bp, Homo sapiens
atgtggctttgccgcaggggcgcggggccgagggatgtccgggggttgtggggacacgatgagggtgggaaaaagagacggggcgggggcccgaggtgaggaaggggcgagtgggggtactccctggtatgaagtgggccttgtggcttcacggtcagccttcgaagcaggtaggggcttttcctgagccctgtaggaacccggaagtggggtctcctaggctctttggagcatttcgagggtacgtagtcggcctcttagcctctgaggcatgaagcaagtccacctgcctatccacagtggaacttcacgacatacgccctttgtcctcttctgccttcctgaccctacagttgcttaaggcaggcggccacacttccttatcccattcttggtacctccagccctgcttccaccccattggaggatctctcgtgttgcttccattcaggcccttcctggtcagaactgaactgtgtcagccttagtgtatgttagctgtgatactgctcatccctcccttcctggaagtcctccctttttcatacatgtgggcctttttcatacatgtgggcctttttcatacgtgtgggcattcctgggagttgtgactttggatgaccatctccctcttcgtcacaccttccctggtgataccgatctagtctcctggcttcgataactttcttcattctgatgactcctaatctggcttctcagctctctttcaaggtttgcctggatatcttgaagagaccttgaaattagacctctagttcaaaactcatattctattctaaatttgttcttcctcctgggttccctatcctggcaaacttttgtgacctcatgtctctgctaaaaatctgtattttttttttctagtggggcacatgcctcttgatttttaaaagttcaagtttattgaggtattacatgagactacatctgttttattcatgaaaggacaggcgtcacggagccagtcaccctttttaggtttactttctataactgttgacaaaggccaggcgtggtggctc

SEQ ID NO: 104576 - DNA, 1103 bp, Homo sapiens
acaatcatgcattcactggtgtgtctctagatcactttctcaaccttagcactattgatatttgagtctcgataattctttgtagtgcattgtagtatgtttagtggatatctgtccactgaatgcctgcagttccccttcttgccaagtcatgacaattgaaaatgtctcagcattcctctggtctgaccccaggttaaaaaagaaagaaaggaaatgtctcgacattaccaaatgtaccctggcaggcaaaattgtctcctgttgaaaactaccactctacaccttggaaggcgtctcgaaggcctagtctgttctgttcacagtagtgtcttaagagccttgcaccctcagtgctacctggcttcatgggagctggaataggggatcggtgggtttggcgtgacagattttgatcttccctttcctctgtgttatttcctatagactgccactctccgcccctacctgagtgccgtgcgggccacattgcaggctgccctctgcctggagaacttctcctcccaggttgtggaacgacacaacaagccggaagtggaagtcaggtagggaaggacaagtcaaggtggggatgaggggtgcagcacacagagatggctgctgtctagaaggtgccatgaacttatgtcctgcagtagtcaggaaagctgcagttgacattttgtcttgctgccagctgaatggtgattcccaatttggagttaagaaaatagggtcagtgggttggcaggacagaacccaggggaaaagacaagattggttaacacaaggtatgacttctcagagcagggctgttgatgaagtctctcctgtggcattgttgaaaacactggtagtttaaggaatggtcagataattgttatctgagattccatctccatacttttcttttttttttttttttttcccatctccatacttttctaatgtaatgatcagggattttttttttacctaccagcctagacactctgaccccctaatccaaatacttcatattttgaatgattttctcttatctagtttccatttcataaatatctttttcccctttaaaatttaatctggaggcctggtgcagt

SEQ ID NO: 104577 - DNA, 1388 bp, Homo sapiens
ggtgttaagggcatgctagcaaccagcagcaataatcttcctttagaaatgttgagagttcagggccaggcacagtggctcatgcctgtaatcccagcactttgggagaccaaggcgggtggatcacttgatgtcaggagttcaagaccagcctggccaacatggtaaaaccctgtctctactaaaaatacagaaattagccaggcgtggtggcacgcgcctgtaatcccagctacttgggaggctgaggcaggagaatcgcttgaacccgggaggcagagcttacagtgagtcaaaatcgtaccactgcactccagcctgggtgacagagcgagattccatctcagaaaaaaaaaaaaaaaaaaaaaaaaagaaatgttgagcattcagaagggagaaacttcagggattgttggatgttcagtgttattaaagcagagaccacctaaggttatctctgatagcccaggtgatgctgcaaaacaccctgggaaatgtgacactagtgaaatgagaatggaaagggcagcttggagtacagctgtagactctgaaagaagcaatagaagcctgtcagaattacctctctggaatgggtcgtcattaagagatgccccaaggtagacccttgtttcagttgacagccaggtcccccacttcagtgatccttccgagtaccaaacctcactgtctcctgggagccttgaaaaaactggagtcagaagaccaggctacaaggtgtttttggccttgggtgtcagctttagagaaacatttctctcttgcactccccaggctgatgagatcgagaagattttgtgccacaagttcatgcgcttcatgatgatgcgagcagagaacttctttatccttcgaaggaagcctgtggaggtgagaccctgtgacccatgagtttgcgatacccaggaccctgttacagaatggcctgggattgtttctagaaccagctactccagctgtttggcacccactgcctgaattgagagttggccttcatcttggagtgggagcaaagaggattagaagcttaggaaaagttgggtctacctcagccatagaaaaggcaaaaaagagccgggcgtggtggctcatgcctctaatcccaacactttgggaggccgaggtgggtggatcatgaggtcaggagttcaagaccagcctggccaacatggtgaaaccccatctctattaaaaatacaaaaattagctgggcatggtggtgggcgcctgtaatcctagctactcaggaggctgaggcagagaactggttgaacctgggaggcggaggttgtagtgagccaagatcgtgccactgtactgcagcctgggcgacagagcaagactccgtctcaaaaaaaaaaaaaaaa

SEQ ID NO: 104578 - DNA, 2294 bp, Homo sapiens
ttgagtcagctattatcgccatgttagagattaataaactggggctttagaagtaaaagcacctgtccaaagtccctcagccagtaagaggaggaaccagaatgtggagctgggttttcggactcagaggtctaagaaagtaccatagcctttgtcaagggtcacaaattcaggtgcatccaaaggtcgggtagctatggagtgggctgagtatggagtgggcagggtgaggagctgctgagcgcatgcctcatgtgcaggggctggctcccacacagctccaggccattgaacccccaaatttggatttgtatatggcatcttccatgttttcaaggttggcaactaattcatattgttttaaacaccatgtgggccatgcagtgctcatctttgggctagtttcaggcatgggccattggttcacaacctttggtctctaaaatgtgcagggctgtcctaggcagcatgggggacccttgagggcagaaaacatttcaagggcctggcttggttggaggttcatccagagcttgacacaaaagtaccagaacctgggtccttttccacttggccctctgagtccccaggccccttgcatgagagcccccatgcctaaagaaagcaacctcagttcaccaggcaggacgctggcagggctttctagcagcctccatgccagggcacaagggagctgtggagaagctctcatggctcttaatttttctgccttatctagtgctaggcttagggccggtgcccataggtcacttctgaaagctggctgaattagagcatgaccacaaggtgtcctgggacccaactctgcccctcacagatatgagcacagtggcagctctcaggttcatgcacctccttagagcagtgccaccaggatgcaataataaccaccatgcactgcctcttggttctcttgacagttttaaaccatctggctggatctcgtggccttccccctcagactacccatgtctccacgaaggcgtcctggagtcactccccgagcagcgcggcggcggcagggagttgggttggggtgggcatttgatgcgggaggtgggtggtgtgcttgctagctgggcaagaaagcagcagtggacctgccccaaggccacacgtgcctggtcaggctggcttctgatgttcagtcccctgggccgggacagattttttttaacgtcttgaaacttaaactctgtgcttgtaggatactgtaacctttttgtctttttttttttttttttttttaaacctccacctccagtggctgtgactggtcccagtgattatacgttattggttgctgtgggtctgggcgggcctggagccagaaggcgacttattttttctctcctatgccaccccaggtggggagggagggaggtttcagactccagtttctcccttgcccttttattcccaagcctccttggccccagtataagtgttgggaactctctgccagcttcctgagttctgcctaaagatggccccccagcactggttggggacaagggccaaattggtgaccaccagtcatgcctaggacctggggcccaaaagccgggcaacctctggctacaggggccattgggtgccctcccagttgagaggggccgctgtttcgccttgtccgtcagtgccagtgcctgtgccagaggtggcgaggtgagtcctccagagcttcctggccgggccctcctcctgcctgttctggctcctctgctcccacgctagctgtcccttttctgattctggtggatcctccctcccctaattaaagtctctttttgcccctttggggctgcatgaggtctatgctgtgtgtgtgtgtgaaaggaggggaggtggggcttcttttccctgagaccagatggctggtaattgtgcctggagctccccactgggtgcagtctcatgattggtcctgccattattcctgccaggggtcccaacccagagactccattcattgcagtccaggcaccattaatttctgaaactgctctgtctgcctatacagagctttggtgcttttcacataaggaacttacttgggctaaaaagtaacctcagagaaacagtgctcccatttggtggataaggaaactgaggttccaaacatgagatgtaatagcttgccccaaatctagccagtgagcaagagagtagacttttgcctgtgccaaaacagtaatcaccatccacaagtggctatttaaattttaattattacaattaaataaagtttaaaatccagttccccagtccca

SEQ ID NO: 104579 - DNA, 1166 bp, Homo sapiens
ttgaacccaggagacggagcttgcagtgagccaagatcacgccactgcactccagcctgggcgacaagagtcagactccatctcaaaaaaaaaaaaaagccatttctgtatgtcaggaatggctgaatattggcagcttcatatgggtcaatctcatgagcccttgggcaagtcacttgccttcctgtgcctcagtttcctcatctgtaaaacagagataaccttagcccctaccacatagaattatggtgaatgaattgacgtggaaagtgcttagagcagggcccagcatgggctgacgctggttattaataattaccccacctcccagagttgtaggaaggagggagagaggtggggtccatgagagagcctgtgtcacaggctgtgtgcccatcagcttggagtcactgtcctgcccctgggcaagtcactgatgaccatgggccagaacaaagtgtgacattcagttgtgcagctttgtcactccttggggacacccttaggggccctgccccctcagcagctatctccataggtgggtctatgtctcagtctttggaatttgccatggtttgatgaggctaatgccaactccttctcacgctgccaccgcctgggggctgacaagcctcataggacaccttaagcagtgacaaagggaggcagaagagagtctttggcctccctaaggccaaaaggaggctgaaaggctggcttgctctctgcccacctgtgccctggaggaagagaaatcttcttgacttacacaaagatgatgtgtgggctagaggccaccttggaagcatcctctccttcctgttcacccaccctgctcagcagggcagggagaggctgccttaggccctgctacccacactggcctctgtgtttctgtctcctcctgtctccccagtcccgcatggtccagaatgagatcccctacttcatctggaccactcggcgggatgtgctcgactgtcgcttcctctccaaggatcagatgataaaccactacgcccgggctggctcctttaccacaaaggtgggctccctagaggagcaggcagggcagcttccgaccccctgcccttgggctggcagctctcctccctgctcaccttgttagtaagaggaagttctcaggacaaggggaagtatacaat

SEQ ID NO: 104580 - DNA, 1019 bp, Homo sapiens
ggcctcaagcctaggggctgagcagggtatcccctggcctgggagcagaggacttctggctgactgctgcccgcaacgttctcaagctggtggtgaagtctgagtggaagtcataccctattcaggcagtagaggaagaggcctcaggtaagtactgtggttacctccactctcccacccatttatcctccacccatccgcccttccacctatctgcccttctacctatctattcatccacgcacctactggttcatccacacatctgtgtatgattcacatctacccatctatccatccatccaccagccatccatccactcatccacccacgtattcacccactctctgatctaccgattcacccacccacccttccactcatccttccatcctcccacctgtcacccattgttaatctcgtcattcatctacctgatgtcagctccatactccccatccatctatccactccctgcctacctatccttccacagatccacctacccatctatctacctgctattccattctcccatctactacctatctgttcttcaggccatccactcatccattcttctgtcccaggtacttagacacttgtcttcccatccgtttgttagttgatccactcctcattcagccctcccatgggcctggcatgtagccgagcaccctggagagggcagactaagaagacatggtccgtccctgcctgtgaggagttcaggtctctgaggaggaggaagcagtgaaactgggctttacacatggcctgagaacagcttaggcctgaacataaggaacagcttggagtggaggggacacagaggaaccctcactatcatgcatgccaacccaaccactgcctgccctttcccttctggatttagctcgtgtctccaggctcctagtcctgtaatccagggacccatcagcgagggattcagggaagcagaggcagctctccaggaaggaggaaaatccctgcctcttccagagagactcccccattg

SEQ ID NO: 104581 - DNA, 1075 bp, Homo sapiens
accccatctctactaaaaatacaaaaaaattagctgggtgtggtggtgggtgcctgtagtcctagctactcgggaggctgaggcaggagaatggcgtgaacccagaaggcggagcttgcagtgagccgagatcgcgccactgcactccagcctgggcaacagagcgagactgtctcaaagaaaaaacaaacagccagtttttttttttttttttttttaaatcctggattttaagaactaagccagccaggttttcatcaggctgacttttcattaaaatactgttttttttttctttttgctaactataaaatcatattgtcatgtcgaatatactttttcaaattacgctcctgtgtgatattttcctgggccacatcacagattactgaaaagatacttcatgctacggaccacagaaaagtttgtcaggacataggtgtgagtactcctgggagaccttgcctagccccctgcatctggctgtccctgttcctggcactgccccagtggctgctgcctcctccttaaaaaagagaaagttctccatgactggagacactcaagatgctaagatgtcacagagttagcttcccctgaacaggaggctcccgtcctattcagtcagaaggaaagaaatgcgagagtctggatgaggcagccatctggggtattttgtgacttggtttagttcaggacattttctgtcttgtagagaacagggtccctctttgtccatgaaaccctgtccgtgcagcccagttgctgaggcaagctcctaccaaagtacttgctgagccaaccgttcattcattgagcaaacttccagggagtacctgctgagtgccaggtgtggtgcttggggatggggattatagcagagaacaactacagaaaatgttcctgctcttacggagtttacattgtagttaggggattcagacaataaccaaataagcacatgtgttaggtgggggtagatgatgggaagaaaacaagcaagaagaggtgtgatatagaagtgcttgaaaggaattaggctaacattgtttcagccaatattaggcacagatta

SEQ ID NO: 104582 - DNA, 1075 bp, Homo sapiens; identical to SEQ ID NO: 104581

SEQ ID NO: 104583 - DNA, 1075 bp, Homo sapiens; identical to SEQ ID NO: 104581

SEQ ID NO: 104584 - DNA, 1075 bp, Homo sapiens; identical to SEQ ID NO: 104581

SEQ ID NO: 104585 - DNA, 1025 bp, Homo sapiens
agccacccaagtagctggggtcacaggaacccaccacacctggctaatttttgtatttttagtagagacgggatttcaccatgttgcccaggctggtcttgaactcctgacatcaagtgatccacccacctcggcctcccaaagtgctgggattaaaggtgtgaggctgtgtgaatgatgtgtgctccagggaaagtcatagaatatatcagtttccccctctgtaaagtgtggacagaagtatcctaactgatattacagcttaagaaagtaaaagtgttcaagcggcctctgggcgccagcaaaagaggctggggattaatttcctgcgcgctccacaagaggcggggctgggcggggcgggggcgagagggaacgagggcgcctgcgcggagaggagtgaccatagagtcggtcctccagagacagaggggccggaagttctcttcacggagccgcgcggctgcgggggcgcaaatagggtcagtgggccgcttggcggtgtcgttgcggtaccaggtccgcgtgaggggttcgggggttctgggcaggcacaatggcgtctcgagcaggcccgcgagcggccggcaccgacggcagcgactttcagcaccgggagcgcgtcgccatgcactaccagatgaggtatgaagtgaggcgaggagcacggaggctttctcccccgctggagcctgcggggcttggggagcgacgccggcccggcctcagggtcttgctccccagccagcccccgctcacctgccaagtcccctcctcccgtgacggcttcgggcctgtcccccatcctggaaagccccgtggcccccgcgagctccaccccttgttccgcccggtgccttgaggggatccagccccgcgtgggctcccgccctgcgtgggctcccgagtcacgtcgatgctggccccgctgtatcaccttcgaaaccgaatttctaatttgagcctcagcttcctcatctgtagagggagagaataatctgccttttaggttttggtgaaagatt

SEQ ID NO: 104586 - DNA, 1972 bp, Homo sapiens
gcctttttattagtagtattgttgttgttttttttttttatggagatggggtctcattttgttgccaggctggtctcgaactcctgggctcaagcagtcctcctgcttcagcctaccaaagtgcttggattagagttgtgagcccagcctcttctacttttaactctcatagtctttgtgattcatatcccactacccctctccccctaacaatatgttcctgccacacataaccacttgctttcctggaacacaaatacttgggcctttttgtctgcatgctcctgcatgggatgcccatcttcactcattcctgagcctagttcagatatcacctgcctctagatagccatctctgacattccatgccaggcagagttgattcctccttcctgtgatcccatatatctgggaacatatatttactagaactttttcacttcattttctaattactttttcctcctctgttctttgtgtccggcttctaggctgttttattcaaatttgtatcccagtgtccagtacagttgtctggcatatagttggtggtaagaaaaatttgaaagatacttctccctctgctctgccccacagtgtgactctcaagtatgaaatcaagaagctgatctacgtacatctggtcatatggctgctgctggttgctaagatgagcgtgggacacctgaggctcttgtcacatgatcaggtggccatgccctatcagtgggaatacccgtatttgctgagcattttgccctctctcttgggccttctctcctttccccgcaacaacattagctacctggtgctctccatgatcagcatgggactcttttccatcgctccactcatttatggcagcatggagatgttccctgctgcacagcagctctaccgccatggcaaggcctaccgtttcctctttggtttttctgccgtttccatcatgtacctggtgttggtgttggcagtgcaagtgcatgcctggcagttgtactacagcaagaagctcctagactcttggttcaccagcacacaggagaagaagcataaatgaagcctctttggggtgaagcctggacatcccatcgaatgaaaggacactagtacagcggttccaaaatcccttctggtgattttagcagctgtgatgttggtacctggtgcagaccaggccaaagttctggaaagctccttttgccatctgctgaggtggcaaaactataatttattcctggttggctagaactgggtgaccaacagctatgaaacaaatttcagctgtttgaagttgaactttgaggtttttctttaagaatgagcttcgtccttgcctctactcggtcattctccccatttccatccattaccccttagccattgagactaaaggaaatagggaataaatcaaattacttcatctctaggtcacgggtcaggaaacatttgggcagctgctcccttggcaggctgtggtctcctctgcaaagcattttaattaaaaacctcaataaagatggccctgcccacactgtgccttgtgtttggggcttgatagagtgtgaaaggtgtgttgcttgaaaggtgtggccttagacactaggagatgatgggtagaagctccttgagaaacctagcagtggccatagagaagtagactgggtatggggaacctaagtcatagttgtaacctacagctgattggtaagaactatgggccagacatttaatctctccatctatgaaatagtccattctcatttatctaccttaggttatgggctcttcttttagttggatattcacatttatctttcagtgttaactgggtatcagttatgagtctactactgtataatggcatccaaaagaattttaaagtacctcggtttatagggatttacaattcagtagaaacttgttattcatgtgaaacagtgaacataatatctaatgatgtggagcaagt

SEQ ID NO: 104587 - DNA, 1060 bp, Homo sapiens
ctttggctctctgggtatgtcaggtgccaccaaattctgggcttggaacagcttcagctcccacccgctcctccacacacagacagtgacatactctgcctgcctggggacatcgtgcctgctccgggccccgtgctggcgcctacgcacctgcagacagagctggtgctgaggtgccagaaggagaccgactgtgacctctgtctgcgtgtggctgtccacttggccgtgcatggtgagcaagtcatcctgtgacagtgcatgtgtacacgtgagtgtgtctggggtgggcatgagggccaggggatctctcaagcagtgctaggcatcctcagtgttctcctggaggacaccagcagaaggacccccaggccagtgtggtctccccagcccctgcttcccagcactgggctttccagaaggaagccaacgccaaagccagccagcccagagcagggggcctcacccagggccttgctcttgggtccttctagggcactgggaagagcctgaagatgaggaaaagtttggaggagcagctgactcaggggtggaggagcctaggaatggtgaggagaacctggctggcccaactgccccatgccaaggcctggcctgccgctcctgggcctgactgacccctgccctgttgcccacagcctctctccaggcccaagtcgtgctctccttccaggcctaccctactgcccgctgcgtcctgctggaggtgcaagtgcctgctgcccttgtgcagtttggtcagtctgtggtatgcaaaataataataatcaccttctaaacctaaaatctataaaactttttcacatgcattatctctttgaggattacaaaagaattaaatttattgaaacccttcagtaccaggcattacagccagtgttttacaggtatcaacttatttaattctcacaacagccatgtgaggtgggactattcttttgattctgatcagcgctgtgggcaagtcccttcagcctgttatgcctcagcttttatgtctgtaaaatggggatgagaatagttctacttcatatgcttg

SEQ ID NO: 104588 - DNA, 1022 bp, Homo sapiens
aaccccggtggcacaaaaacctggtgaggcctcccccttcccaagtccattcccactgtaggccgatgcctgtgcaaaggacgcagtgccatatcagagaggatccttgaagaggactcaccccaagcaagggaaaattggtgggggaacttctgccttcctggtttccttgactttggcctcctcctcttcctccttatcttctccaacctccttcctttatttgttccacagactggaccgcagatcattaccttgaaccacacagacctggttccctgcctctgtattcaggtaggagcagagtctagctgggtgccagaagaggagtgggaagatgatgatgggggtgatccctgccttcctggtctcaccattcttcaaacccttcattgaggtggagactgtggctccctggggtggctggccctcccttgacccttgctgtcctatgccttctgtctattacattccctgaatgctctccctgatcctccacagaactcctgcttattcttcatggccccattcaaatgtcaccttctccttgaaacctttccctactcctccagttctgtctttgtgttcccctggcgggcagagcatgtgctacgaacttggactggtttgaatcttggctcttgccatttgctagctgtgtaaccttgggcaagtcacttcacctctgtgagcctgtttctcatctgtaaaatgggaataataatagtaacagcctcatggggctgttataagaatgtgtgccacacccaggcttaaatatgctggctctttcctcttcctctgtacatttatttatttttttagacaaggtctcactctgttgcccaggctggagtgcagtggcacaatcatggcacactgcagcctcagccccatgggctcaagtgatcctgctgtctcagcctcccaagtagctggaactactggtgagcactaccatactcagctagtttttttttgttttgtgtagagacggggtcttgctatgttacccaggctgt

SEQ ID NO: 104589 - DNA, 1048 bp, Homo sapiens
cacgcttgtaatcccaacactttgggaggctgagacgggtggatcacttgaggtcaggagttcgagaccagcctgatcaatgtggtgaaaccccatctctactaaaaatacaaaaattaaccagttagccggccgttgtggcatgttcctgtaatcgcagctcctcaggagactgagatgggagaatcgcttgaacctgggaggtggaggttgtagtgagccaagattgcaccactgcactccagcctgggcgacagagcgagactctatctcaaaaaaaaaaaaaagtttgttaatgaagatgttgccagtgcccagcattatgtttgctggaagaatagatgtgagcacctccaggttttgtaaaaggcaggaagacccagcaagtgtttgtgaaatacctgctgaatgagtgcatccccactgtccagcagagggccaggcacatgcccatggaggggacctgagcagacccccatttcctttccaggtgtggcctctggaacctgactccgttaggacgaacatctgccccttcagggagggtgagccgaccggcctggggctggggttggggtgttgcgagcgatgggtacctggcctgcggtgactgtgccctttccttgcagacccccgcgcacaccagaacctctggcaagccgcccgactgcaactgctgaccctgcagagctggctgctggacgcaccgtgctcgctgcccgcagaagcggcactgtgctggcgggctccgggtggggacccctgccagccactggtcccaccgctttcctgggagaacgtcactgtggacgtaagtgaagcagagggcacctcccgtggtgaggggagagtggggaaccgggggtccccttttgtgatcccacccattcctctctttccacagaaggttctcgagttcccattgctgaaaggccaccctaacctctgtgttcaggtcagaaaggggtgcatagtgctgggctggaggctggacctgggcagaccccccagccaagggggtcttagttcttgggccgctaaagcatag

SEQ ID NO: 104590 - DNA, 1722 bp, Homo sapiens
ctgtcctaggccgggggtgtggtgagatgcagggtaatcacaacgatgatggcagggaccatttccccagcaattactgtgtcagatgctgttctaggtgcattccccatcttaactgatttaacccctgaaacaacccgacgctggaagttgggttctcatccccactctacatatgtaaaaatgaagatgcagagagatgaagctactttcccagggctatatggcaagcaagtcgcaaagctgggatcccaatccagacagtctgaccgtggaacgagactcatacacgtaataaatgctctgcccccaacttgtccaccacatggccttggcaagtccaacccctttacctctctgagcctcactttcccatttagtgagacagggatggtaactgccccttgcagggtggttttgagcagtaaatgtagtgtgcctggcttgctgggcaggcctggtggccatgatgatcaggtgtgtgggagttctggggagactccaagaactaccaggaacagggatacgagtgccaggctgcatctcttgctcctctgcagagtcagcaggcttcttctcagagatgacagaagacgagttggtggtgctgcagcagatgttctttggcatcatcatctgtgcactggccacgctggctgctaagggcgacttggtgttcaccgccatcttcattggggctgtggcggccatgactggctactggttgtcagagcgcagtgaccgtgtgctggagggcttcatcaagggcagataatcgcggccaccacctgtaggacctcctcccacccacgctgcccccagagcttgggctgccctcctgctggacactcaggacagcttggtttatttttgagagtggggtaagcacccctacctgccttacagagcagcccaggtacccaggcccgggcagacaaggcccctggggtaaaaagtagccctgaaggtggataccatgagctcttcacctggcggggactggcaggcttcacaatgtgtgaatttcaaaagtttttccttaatggtggctgctagagctttggcccctgcttaggattaggtggtcctcacaggggtggggccatcacagctccctcctgccagctgcatgctgccagttcctgttctgtgttcaccacatccccacaccccattgccacttatttattcatctcaggaaataaagaaaggtcttggaaagttaaaaggcatcagtcttactacctgtcccaccacccccaccttagggaaatgtcctagaatcctgggaaattgagggcttctttgatggtgagtggagaaaagatagaggagaaggttgcccctgaagtgctgttaggagaaggaggatagaggaatcagccttaggagggttccatgccagctgtcatttggcaaaggaccctggacagatgacttttgcctctgaacttcactcttctctttcctcaaatgggcttcataatgctttccactcaggcttaacatgagaattaaatgaggtgacaaatgtgaagacctggacagtacacaacagatattcaataaaagtgtggtcgccattatgaccagagcctccaagcctcaagcaacctttcctcggagtcctgctctccgtccaatacacaggacttagaatgactgggaggcagggcctccagtctctccttcctcctatgagtacaggatcctggcatggcc

SEQ ID NO: 104591 - DNA, 1050 bp, Homo sapiens
ggatgaacaaaatgaatctccctgttcattttgagcctacatagacatagagaccaaatatgtcaaaaccttattcaaataaactctcttcagagtgaatacccagggtcaggacagactcagcaaaccttctatatcacttaattctgcccagtgaaaatcagtgaccctgaggcactgccagattctaaagtgcctttgggatcatcagagactgtctataaataatgcaaaatcttgatctggatgtcagtgtatcaaatcttatcaaatccattgacaaatcagtggtgctatactggaaatggctactcctttggatgaaggacctcatttcccagttgcttggaacaaaagagaatttacatattgctgtaagaagggagagacggcagttgttggtagacacacagataagggtgcccaagaataattctgtctggattaaaggtcccagggaagtgacggtgccatttctgtaccaagaggtgaatataatttgcatgttgagtgcagtaattaagaacaaacgactcgactccacaaattaaaccgtcctgttttctcttctttgcctgtgaaagtgttgcctctgtaagtcactaacaaccttctgccagcagttgactgtctatcttggatcagtgcggggagtctaagacgaaagagatgtgaaccttgccctcaactcacaagagagagacacctaagagctttttaaaattttttattatttttttagagacgataccttgctatgttgcccagactggtcttgaacttgtgagctcaagccatcctcctgcctcaccctcccaaagtgctgggattacaggcatgagccactgtgcctggccaaaagagacctttttttgaggtcaccgaatctgagaatctggaatctctgaccctggcctccagagtaacatatgtggacatagatacagacatgtccctctaaaacttattcataatgacccgcagacccaagttaagaaaccctgacctttaacgatagttaaaatggctgcttataccagatagaaaagg

SEQ ID NO: 104592 - DNA, 1031 bp, Homo sapiens
catttatgtcaaagcattgtggaccatgcaccatttaaaccagatggcaagtcccttgattaaagagctgagaatctgcactaatttgtctgttgtacatctctcaagagtactgtggggcacaaaggtgcttagtgagtgtgagctgatagacgggttaagcgctggggactttgcagtcagaccacaatttaaatctcagctccattagttcctagtgccagtggccttgaacaaattatttgacctcttagtcttagtctccttatctataaattgaggggtggcaggaagagggggaggagaggattggggtagcagcatttcccttgtaggattgaatgagcttatacatgcagatagctcactccagcttttggcccagagtaagtggtcactaaaggttagccacagctgtcagtaacaattccctctcttcctgcctgggtgttctcttccattacagacagagtgggaagctttggagctgacggatcaccagtgggcactagatgatgtcgaagaagagctcatggccaaagacctccacttcgaaggcatgttcaaaaaggaattacagacctctattttttgaagaccgagcagggattagctgtgtcaggaacttggagttgcacttaaccttgtaactttgtttggagctggcacctcttgaaataaaaaggaggatgcacgagctggcaggcatgcagcaaggcttgttcttgtctgggctgggttcccctttatgtttgaaactagaggaaataggagtatgctgggcaacttgttatttttaaaatgttgtaaatgttccttctggtgactctagtaatgaaagtcagagaaagggggaaacctcaggctactgataatatataaaatcttggccaggcgcagtggctcacgcctgtaatcccaggattttgggaggctgaggcgggtgggtcacgagatcaggagttcaagatcagcctggccaagatggtgaaaccccatctctactaaaaatacaaaaaaaaattagccgg

SEQ ID NO: 104593 - DNA, 1018 bp, Homo sapiens
tgagctgagatcatgccactgcactccagcctgggcgatagagtgagactccatctcaaaaaaaaaaaaaaaaaaaaacgctgggtgcggtggctcccgcctgtaatcccagcactttgggaggccgaagcaggcggatcacgagttcaggagatcaagaccatcctggctgacacggtgaaaccccgtctctactaaaaatacaaaaaattagccaggcgtggtggcaggcacctgtagtcccatctactcgggaggctgaggcaggagaatggtgtgaacctgggaggcggagcttgcagtgagctgagatcgcaccactgcactccagcctgggcgacagagcgggactccgtctcaaaaaaaaacagtttacagaaaatcaggagaaagtccctggcaacagaggtaaaacttagtggtttcttgtttgtgcttttgtcttagatcctactatgttgacagacatgatgaaagggaatgtaacaaatgtcctccctatgattcttattggtggatggatcaacatgacattctcaggctttgtcacaagtaagttacagacccagccgacttcatgttacccagagaaattcaagtgctagtgagacactaatatcacaggtcctgtgttttcttttgtaaactgataatagtccttgaacaaaaaatttaatatgtgatgacttttacggcttttgcccaaaaatgatcctaagttcatgacgtggatgctttttagccagattagattcaagcaagtgacttgctagcttacttccaaaactaatacggtattctcgttgagcaggataaagggaagcgtatttctattttgacttcatttgctagatgttagggtgagttttctgtttgtttgtaagttgattcgcttttaatcaatttggtttcttattaacataattctatgcttatatattccacttagagtttgacagtttgctgcaagttttttccaaatttcaggtcacagctcagtttgagtccctgcttcctc

SEQ ID NO: 104594 - DNA, 1030 bp, Homo sapiens
gctaatttttgtattttagtagagacagggtgtgagccattgcacccagccaagaacgcttccttaagaaggaatgtaacagccggacacagtagcacatgcttgtaatcccagcacttagggaggctgaggtgggcagatctcttaaagtcaggggttcaagaccagcctggccaacatggtgaaaccccatctctgctaaaaatacaaaaattaaccagacacggtggcatgtgcctgtaatcccagctactagggagcctgaggcaggagaatcacatgaacctaaggagtagaggttacagagagccgagatggctgcactgcacttcagcctgggccacagaaggaggctctgtctcaaaaaaaaaaaaaaaattccacagattaccattacgccccctacagggcagtaacacccccatgaagaaccaaccactgctctagagaaaatgtctctgctcataattgctgcatcccttaagtgaggtagttggattataccagctctgacatggagtggctcagtctcatcaggtcatcatttgacttgagcaaaatgctgtacatgctgaaccagcctaagtccaagaaaaaggtgtgttttagttgtaaaactttttttttctttttttttttttaagtgacaagtcttgctgtgtcacccaggctggagagcactggcacagtcaaggcttactgcagcctcaacatctcaggctcaaggatcctcccacctcagcctctcgagtagctgggattataagcgtgtgccaccacgctcagctaatctttaaattttttgcaaagatggggtctcctccgttgcccaggccggtctcaaactcctgagctcaagtgatccttccatctcggccttccacaatattgggattataggcatgagccactgggtataggcatacccagcgatataaaacattttaataaatatactataaatgtccattagcagcagggcacggtggctcacacctgtaattctagcacttttgggaggctgaggcag

SEQ ID NO: 104595 - DNA, 1050 bp, Homo sapiens
agaacctgtacttttatagcacttacataactgtagttcagtacattaaggctatttgttaccatactgtaaattccctgaggacagggatcatgtctgtctagttcacagttgtaaccccagcacctagcacagtccctaacatatagtattgaaatcatgaattaaaggacaggtacgttggggatagataatggagggtcttgaatctcagatggagagtgatgggttttatccttcagcaacagcgaagtagtctgcctaaagaggtaactaagacttgaaaggaaggtagtattggctagatgtaagagttgaaatttgcttagcacctaggtttaggtagcattaatatggagatgtgagcccctctgattttggatagagcagttttctttgaacaatagctttaacttctcagaatttatcttctagagggtaacttctgtttcccgattttgctctaggaagtaatttaagtgcacaagacattggtcaaaatggtttccaaaagaagactgtcaaaatctgaggataaagagagcctgacagaagatgcctccagtaagtatctagtcatttgttgctttatttcctgtagcaatgtgtgaggcatgtgagagatataaagttcctgcttttcaagtgctgagaatcttcaaagtgtaatgaatggagtgcacagaattaagggagaaatatcagatttgggactgagtttttgcctcgaattctgcgtataactttgagtatgaccacagcctctggacctcagtctccacatccataagaggaattagtgttacagactttttctgctatacatcatttaggtgttgagacacaaagacataacatagtctgtacccttaaaaaactttatggtctttcttcctctcttggaaaaaaaatattatgatctagacacatgctatgttagtgatgtgaaaggaaaaatacatcaaagcaagcaaaccagaggcaaagaaacagtgcagactctgcccatatgagaaatagttgacaaagatcccaagagttccagatata

SEQ ID NO: 104596 - DNA, 1034 bp, Homo sapiens
gccattatcaaaaccttatttgagaagttgccagaatatttttttgaaaagtaagtggcgttattatggaatgttcaaagtaccctgatgtacttaagttctctctgaaaaggttactctgaaaactattggtttctctgaaagtcatatttatcattatatttcttaagtgactactaaaattttactggagtgtctttgaagtttcatctattaatatgactttgtaaaaatagataggattactgttaaaagtaactattggcctggtgcagtggctcacacctgtaatcccaacagtttgggaagctgagggaggaggattgcttgagttcaggaattcaagaccagcctgggcaatgtagtgagaccttgtctgtatttcaaaacagaattttttttttttttttaagtatctgttgcttatgctcagggataatccctagtagaaggatacacaatatactggtaatggtagttgtctccaaagagggtagccagttggttggaatcaggtattttctgaatacttttctttaccttttaaattttgtagtgtatgttcagacagggtctcactctgttgcccaggctggagtgccgtagtacgatcatggctcactgaggcctccacctcccaggcttaagtgatcctcacacctcagcatcatgagtgcctgggactacaggtgtgcgccacccggtccagctaattttcgtggtttttttttttttggtagaggtggggtttcgccatgttgcccaggctagtctcaaaacttccaggctcaagtggtccacctgccttagcctctcaaactactgggatgtggccctacctgtttttttttaattactatgttaagaaatgaacagcctaatagaaaagtagacaaaggtcatgaacagacagtttacaaagaagaaatacaagaacatcaaatatttaaaaagttcaattttgttagcaatcaaaggcacaaatttaaaacactgtatcaaaatagtaaataataactattacacagtaaaat

SEQ ID NO: 104597 - DNA, 2109 bp, Homo sapiens
attaacaactaaaagattctaatttggggaaaaatctaaaattttgtttttccctaaattataagtgggaagatggagtaagagaagtgatttttttctaattttatctaacagttcagtacaaagttgaggtagtgacatgaaaacctattaagtttctgtgcttttaatttttaggttcgccagttggtgatggataagttgtcgtctattagattggaggatttacctgtgataataaagttcattcttcattccgtaacagccatggatacacttgaggtatgctcttatatcccatcacacctagataaagcaacttaagtgccaattgctcttctctgtccccagactaactgagaatactgactaatccggatagcattcagaggagagaatggagctattcaacagattcattgatctatataagctgctataagttacatttactcttcctgtgtagtacctcacagaattctgaaattttgggtatgatgttctatgacattgcattggctattctcataactctatttttcaaaatgtccaacatttaaatttttttcttcctcagtctttcaggagattgtcatggtagagagactggactgtgcctacccactatgaatgagcagaaaaccatagctaatatttactttctgcaggtaatttctgagcttcgggagaagttggatctgcagcattgtgttttgccatcacggttacaggcttcccaagtaaagttgaaaagtaaaggacgagcaaggtaaagagctcatcctcacacaggatgtcacaattttctgacatcccactgtcagagttagagcttaatactactacaaataatgatactattatgacatttacatctagtattatattgtttttcaaattacatatatgtatgtgagtatgtatgtgtttatatattttcttagccattcagatcaatcccagacagacgacagtgcaagtttattagccatcttatacatgaggttgtcatttgctccagggtacatggcaggaactccgatcttgtaagttcttttctggtacgtagaagagtaatttttttcctctctgctacttgtagttcctcaggaaatcaagaaagcagcggtcagagctgtattattctcctctttgatgtaataaagtcagctattagatatgagaaaaccatttcagaagcctggattaaggtgagatctttggaactttgattatcaaggaggaaatgagtggcaattagtgacagatgtataactgaggtagactgaaataaaaatctcaaaactcattcaagtggaaatgatagctgatggttgccagatggacacattggctcttagatgagataacagggcatgctgaataaggtgtaacgtgtttcgctgatgtgtcataatatttttgtgactctctcctgttttttcaggcaattgaaaacactgcctcagtatctgaacacaaggtaatgttcatgtactatgcattttcagtattgcagacttaaaagtaatgacattggctagcttgccttcccactgtctttctttctcccccctccagtcactcttctctctcttccctagttgctctaataaacattagctgtctggggaagataatctgaggtggcgactggccagatagcctgcccctactcactctggctataaaataagcctacagtatccacaaggggaaatactaacagtgtaaacaagcacatcaaggtgcagtcaaagaagccaggtccccactgatgagatgaagaaaataaccacctaagtctcaggtccctgtatctgcctaattgcccttccttccactcagcaccactgtcaagataatggcattccatgttttactttactttgctcatgtagacctgactagagtaaatcaatctgtccactgtcaaggcagtggtactggatcttatgtctctattaattctagaaataccttccatcaaaaagccagatgattggccgggcgcggtagctcacgcctataatcccagcactttgggaggctgaggcaggcggatcatctgaggtcaggagtttgagaccagcctggccaatgtagcga

SEQ ID NO: 104598 - DNA, 1023 bp, Homo sapiens
ggaagggatgatatggcaaggaatagggtaaagacataacttttggtagaatattgttttcactgaaaaaaaagggaaaggtggaggtaaagaataccgagaactgggaggtgcattagaatgactaagcagtagatgattaaagcccaggattgtggttcagagtgaagaggataaagaaaactttatgtttcctgatagttagttcctagtctctgataataagagatttagaaagttgtaagaattttcccagtttatatccagtctatcaaacctttgggctctgagcatagcttttagaacttgagctttgagcttttaagggagctaaaaagttttagatacctggctatctatgtgtgtctcttttacagggattttaattttttgaattttaagggaaaaatgttagctgctagcctcattgttggcatcattttttccacagggcattttagattatctggataacatatcccctcagcaaatacgaaaactcttctatgttctcagcacactggcatttagcaaacagaatgaagccagcagccacatccaggtaagaggcaatatgttgggaaagatttttttttttttgagacagagtctagctctgtctcctagactggagtgcagttggcacgatctcagctcattgcaacctctgcctcctgggttcaagcgattctcctgcctcagcctcccaagtggctgggactacaggcacgtgccaccatacccagctaatttttgtattctccatcaaaaagtgggcgaaggacatgaacagacacttctcaaaagaagacatttatgcagccaaaaaacacatgaaaaagtgctcatcatcactggccatcagagaaatgcaaatcaaaaccacaatgagataccatctcacaccagttagaatggcaatcattaaaaagtcaggaaacaacaggtgctggagaggatgtggagaaataggaacacttttacactgttggtgggactgtaaactagttcaaccattgtgga

SEQ ID NO: 104599 - DNA, 1006 bp, Homo sapiens
atatatatatatatatatattttttttttttttttttttttttttttgagatggagtctcgcactgtcacccaggctggagtgcagtggcgcaatctcggctccctgcaaactccgcctcccaggttcccgccattctcctgcttcagcctcccaagtagctgggactacaggcgcccgccaccacgcccggctaattttttgtatttttagtagagttggggtttcaccgtgttagccaggatggtcttgatctcctgacctcatgatccgccagcctcggcctcccaaagtgctgggattacaggcctgagccaccgcacccggccacaaccatcatattttttatctttttttccccccctttcttggatccccagtcagcacattttttttaattaaaaaaaaaacttttggactaggtaatatacatgtgtcatacaaaattcaaaacatatagaagagtattcagtgaaaaataactctcacttctcagttctgtaggcacctggtttgtctcccacaggggcaatcactttataagcttctgagatgttctgagaatttacaaatttgtgtttacctgtagtttcctttcccttcttgttctacatcttagcttttgcatttagcagtttattttggagattgcttcaaatcagcaatataaaactacttcactattttattttatttttgaattttgataaaatatacataatataaaatagaccgtttaagctgtttttaagggtacaatttagtagcattaagtatattcacaatgttatacaaccattgccactatccatttctagaacttcctgatcatcccaaacaaactttgtacccattaggcaataatttgccatcttcctctccccaccccctaataatcactaatcacattctgtctatggatttgttcattctagatgcctcatataaatggaatcatacgatatgtatccttttgcgtctcgcttatttcacttagcataatattt

SEQ ID NO: 104600 - DNA, 1422 bp, Homo sapiens
aagtgtcttccaatccatgaagacagtagctctttccatttccttatgtctttaatgtttttcagcaatgtttattttattattttattttattttgagacaatgtctggctctgtcacccaggctagagtacagtgatgtgatcctggctcactgtgttcttgacttcccaggctcaggtgatcctcccaccccagccttccgagtagccaggaccacaggcatgcaccaccacagctggctaatttttgtattttctatagagatgaggttttgccatgttacccaggctggtcttgaactcctgggttcaagcagtccagcagcctcagcctcccaaagtgttaggatgacaggtatgagctacttcgcccagccttgcctccatgtttaaatctttacctgagtattttattctagttcattattttggctgagcagtgatcaacattatgataattttcatatccttatagaaataataacaataaaagatattattattgaatgtctatcatgtgctaggcactgttctagaagttttttataatgtatcgctaatccttaaaacaaccttctccatttcgggccaggcacgtaatcacccctgtaatcccagcactttgggaggccaagacaggcggatcacgaggtcaggagatcgagaccatcctggctaacatggtgaaaccccgtctctactaaaaatacaaaaaattatccgggcgtggttggtggcgggcacctgtagtcccagctacttgggaggctgaggcaggagaatggcatgaagccgggaggtggagctagcagtgagccaagatggcgccactgcactctagcctgggtgacagagcgagactccttctcaaagaaaaaaaaaaaaagtccccatttcacagatgtaaaaattaaaacttggagagatgaattgacttgctaaagacacacagggctgggtatggtggttcacacctgtaatcccagcattttggaaggccaaggctggtggatcacctgaggtcaggagttcaccagcctagccaacatggtgaaaccccatctctactaaaaatacaaaataagccgggcatggtggcgggtgcctgtaatcccagttacccaggaggctgaggcaggagaatcgtttgaacctgggaggcagaggttgcagtgagccgagattgcccctttgcactctagcctaggcaacaagaacgaaagtccgtctcaaaaaaaaaaaaaaacagttagtaaacggtaaacgcctttatagtctagctatatggctcgatatccataccttcttttgctgtgccattccagcattttcatctttcttcatcatctcattgcaggatgacatgcacttggtgataagaaagcagctctctagcaccgtattcaagtacaagctcattg

SEQ ID NO: 104601 - DNA, 1031 bp, Homo sapiens
ttctctgagggctccttcacttaataacaatcacgatagtaaagaagagattgactttgttaatgatgatggctattatctgtctgagagccctattctgtgctgggccttgtgctaagtgctttttatgcactctctcttttctacttcacaatagtgagatatttattattactttctttttagaaatgagggaactgagacttagaaaggttaagagtaatttatctagggctgtacagcaagtacactctgcactgccctttttgtttgtttgcttcctgaaggaatgggttgggcataccatctgtaatgatttccaggatgccttcgtagtggactcctgtgttgttccggaagggtaggtattgtttacctgctggcttggttgcactggtgaagttacatcaattctgtcagtagctgatacaaacttcagaatacccttcacctcagccacagctgcccagtcccacagcttctttcctcccaaccccagcacccctgcacccttagctccaaaattcctaaaaggttcactgtttgttcttctaatttctccccatgatgttgtgtttgaaattggtttgctctagtggttttccctgtagccttgcgtattcctgagctgcaacatcagattctggtttttctccgcagtgactttccatttcctgtgaaagcactgtacggactggaagaatacgacactcaggatgggattgccataaacctcctgccgctgctgttttctcaggactttgcaaaagatgggggtccggtgacctcacaggaatcaggccaaaagtcagtatagtttttcttttctaaacctgttagtgttttgaatgttcatggggaattccacagctcttggtggggaagttgagtcaaaaaagtttctctcgagacaaatggtatttggagaggttagggagaatggggcagattccttgttttttcttggatccttggcttgagatttatattgccttgtgtgagccaacagatattctgagattactttctgg

SEQ ID NO: 104602 - DNA, 2547 bp, Homo sapiens
cctgggttcaagcaattctcctgccacagcctcccaagtagctgggattacaggcgtctgccagcacacctggctcatttttgtatttttggtagagatagggtttcaccatgttggccaggctggtctcaaactcctgacctcaggtgatccgcgcgccttgacctcccaaagtgcttggggttacaggcgcgagccaccctgcctggccaccatttagattttaaatgtttgttttagtttttttctgtttgttagttatatatcattatttaaagtggttttatgataattgatcatacttaatatgatatttctgtgttatctctggccattttgctatgccaaaacaatgtcagatgacttgaatatgtcttataagcattcagccatgcttggtaattttggaaactagtttttagccaatggagtgactgaatttcaagtctaatggtggtgtgtaattggtacacattgagcttcagcctgctgtttgtttcagtcaccccagactatgtccctcctcttggaaactttgatgtggaaactttagatataacacctcatactgttactgctatttcagcaaaaatcagaaagaaaggaaaaataggtaagtatgttcttttcctcttgtcttgtgtctctaaataagcttcattgaattaacctaaaagttatgtgtatcatggcatcagtaattggaacaattgtataactgaactcttcctttattagatttataaatatactgtaatttagggttataaaattacctcttctacctctaggcagtttccaacaggttgttttctgagggcaatgatatttggcaaacatgattattaattacttgagtcacttttctctttttaatataaaagaaaggaaacaaaaaacagatggcagcaagacatcctcctctgacacactttcagaagagaaaaattcagaatgtgaccctacgccatctcatagaggccagctaaacaaggtattggaatgatgggtatccgtgaaggtttgtgacatcccagtgagattaacagaaacccagctttattctcggcattttacaaagaaaaaaaaattaggaaacagcgagccaaaactctcttaggcgttggagtaatctccttagtagcaaagttcagattagacttcaggtccttattcctgccacacactgttgactgttttttctaattattttcttgactgttttactcccttttttgtaccccagcagtacattgaattctctcttgaggtacttgattatcagtagttcccttttactttacatttgtactgttcgtagaatgagtttcatgtgtttgaaattgcctgggccacatggatcccaattatttctgttgatcagccaccatttattgtatatttattaggtatagtttctgtaagagcccaagtttcatattaataccacatttaataaaggaggaaactaagatccagggagggcaagtgacttgcccaaagtcacacagttaataaatgctggagctggggtttgaagccagatcattctggcccctaagctcacagttttttgttttttgttttttgtttttgagatggagtctcactctgtcacccaggctggagtgcagtggcacgatcttggctcactgcaacctccacctcccgggttcaagcgattctcctgcctcagcctcccaagtagctgggattacaggtatgcaccaccatagccagctaatttttgtatttttagtagagacggggtttcaccatcttggccaggcaggtctcaaactcctgacctcgtgatccacccacgtcagcctcccaaagtcctgggattacaggcatgaaccaccacacctggccagctcacagttttctgtactagacctaaatgccttgatttgcctaatagatcatccctaaatagatgacctgttaagggtcttgatgtgtgacttgtatccccatcttaaattaggtgctctgtcttgggaatatttagggacttgggctagaggaagttgttattataatgaaaatgtaattttttgcattaaataaatgcatatttgtactttgaagtttttattaaaattcgattaatatagaagatttatatattctctttgttgctgtgacttccccataggagttcacagggaaggaagaaaagacatcattgttactacataattcccatgcttttttccgagagctggacattgaggtcttctctattctacattgtggacttgtgacgaagttcatcttagatactgaaatgcacactgaagtaagtgacaggctaggatctcagaatttaatcttctttcagaaagttcctcaggtctattcttatttcacaaagaacactgtgacactgaggagagaagttagactgacttttaaagcctttatatgtgaaagcaatgatgaataatcatcctcatactggtgtttgtaagtcataaggtttgtaataatgtgtcagacattataaaatatcatgccaatgatgtaatccttacatttagg

SEQ ID NO: 104603 - DNA, 1049 bp, Homo sapiens
tcaggaggctgaggtgagaggatcacttgagcccaggaattcaaggctgcagtgagctgtgatcgtgccactgcactccagcctgggtgacagagcagaaccttgcctcaaaaaaaaaattataagaaggagtctattgccctacatttgtcaacctaaatgatttctacttttatgtgacctttatctgattagttatgatagggctatatgtctcaatcaaacactgttcctactctacaaaagccaatctctcagtcattggaagatggagcaagatttttatccctctgtcagaatacagtcttaggttaacaactcatttctcccatctgctcctacctggtgacacaggtttgacttgactccattgcgaacccttagtttctgagacgctatccagcagtttcttcactcataactctgcatttattatagaacaaaggaagccggaatattggattctcacatctccaacagagatctgcccaagaaattgttcattgtgtttttcaactgctgaccccaatgtgtaaccacctggagaacattcacaactattttcaggtcagaagcctagacttagaagctgctaagcaaatatgaggtttcatttttggctgagaaaaaggaaaatgaggacaattactgaagcaactgtcctaaaatcatttttatttttagtgtttagctgctgagaatcacggtgtagttgatggaccaggagtgaaagttcaggagtaccacataatgtcttcctgctatcagaggctgctgcagatttttcatgggctttttgcttggtaagtatgtgggaagtgtggagagaactgagtatatacttgcttttatttgacagtcaccaaggcactgaaatgtagaaaagaaagaaaaggttcaaaaatcttatgtgaatatggttcattaattttgtgggagtgtttttgtctgtattatttcatttgatcttgtaccctctgagtcctttggagccactatgttaacccatttgacagattaggtgacttgctgatgagctgataacagat

SEQ ID NO: 104604 - DNA, 1054 bp, Homo sapiens
gttctcattatacaagatttctggtcaatcctacccaagcttaaatttagccaaaatttattttctgagctataggcatttatatccaactgcctacgcaacacctccttagatgtggcattgacacctcacactccacatccaaaatggaatatgtcatccctagcatgctccttcagctttgcctggcttagtaaatggtaccaccagttgcctgaaccagaaaccaggagttattctttgtccctccctctgctctccaccgtctttttcccacatctgattgccaaatcctgttgattttattttctgttataaataacatctagatagccatctgtccctgtttctccactgcttccagactcccattatctctcaacctggactgggctaggttcacacttggcctctctcagtccattcttcacatggcagtaagagtgatcttcctaacataaacccagtttgatcctatcccaattttgatttctgattgctcttagatttttcttgagttaaaactctcttacctagcctctaggtcttcttctgactcctgctattccacttattatgttatactctgcctccagcctcactgaattaatttgagcaccctatatagcttttacgtgggaggctttgcacatgttcattctcctgccaggacccccactcttcttgatccccagctttttctgactcatcacatctcttgagatctgaacttaagcatccatcctgcctctctaacccccagttctcttctaacactctggtatccgttcgtgataaaacttaatctcattttattataattacttgttcatcagtctttcctgctagactctgagctccatgaaggcagatgtctgtcatttttatatcctcattacttaaaagcagtgcctgacaaaaactttgaacaatttatcaaagagacttatagatggcaaataaacatgtgaaaggggcctgacatcgtggcttatgcctgtaatcccaacactttgggaggccaaggtgggtggatcacttgagctcaggagtt

SEQ ID NO: 104605 - DNA, 1454 bp, Homo sapiens
aactatatcttagtgggaatacagtaagggaagtatttggctgtgactcagaggtgcccatatatttggctgccccagattcatgaagagaaactcctctactggaacatggctgttcgagacttcagtatcctcatcaacttgataaaggtgagtatggagactgcttgacacatctcaccaaataactgcagaaaccaagtgtcctggcttccaaaatggactttccttgctcctcttcccactcttccttggggcctgctctccctgagtcgtcttcttcctttgtccccctacccatcctggataaccccttttctcactaggcatttttttttttgtcttttccttccttcctcctacttatgccacaatactatttaatgactccttccatctgtaattccctcactttttcaccttgccttggatcctctatgatctgagcgcacattccctcttctaaccctgaatgccctcgttctcctttaaacacactgtgctctcacccactccatcgtggttttgctcagcttgttcccccagcctagaatgtccttgtctctccacctctttcatgtcttttttttttttttttttttttttttgaggcagggtctcactctgttgtccaggctggaatgcagtagggtgatcacagctcactgcagcctcaacctcctagactcaagaatcttcccactgaagcctctggagtagctgggactacaggaacatgccaccacacccagctaatttttctattttttgtggaaacagggtctcattctgttccccaggctggcctcgaactcctgggctcaagtgatccaccagcctcagcctcccaaaatgctgggatatcaggcatgagccagcatgcccagcctcatccagtctttcttaagtcttcagatcaaggttttggacctctaataatgccatcttctcaacactcccagttggaatcagtttatttctctttgctcgtctcttccttttcttgaacttcagttgtgataattactttattctgctttgtaatattaatttaaatgttgacattcctccattttagaattctctgcagcacccaaagctgtgctttgcgcagcgggaaagaggctggagtgctcaaaggagcagatctcagccttggtttcttgtctttcacctctccaggtatttgatagtcatcctgttctgcatgtatgtttgaaggtgagagatttactgggccctgtttcatatttattcttcctgtggatcactctagagaggacctcagctgagataaattgctcaatttcttgcccacaagccagagtttccagaatctatgccagtttagggaaggcaatggatgcattttcccaccctagttggatgattggagaagccagttttcctatgaatttgaaaacttttggtaagaatcttagtactaggaggaa

SEQ ID NO: 104606 - DNA, 1029 bp, Homo sapiens
gattgggaaatttagaaattggtcatatgctttctcagctttacccagtttttccctcttgggagtaagttatcctcagatagagctcccctctactctatgctctcactcctaagctgagcaagttccctgtccatcgactgtatctgtggtaggtaagtctgcctaattctggggcttagttaacaggcctatttgatttttgtattaagttacattctccaaataaaccttttggacccttcccaatttgttttttatatatataaataagaaaataaaacccttgggctggatgagactattctgcctcaggggcctttcagtgagatacctcagctagaggtaacagtgtgtctctcttcttcagtatgggcgtctctttgtggaagcatttctgaagcaatgtatgccgctcctagacttcagttttagaaaacaccgggtaagagctaagagcagagaacaaagatatgcactgaagagttgctcagaagatatgtccttggtgactcctgggtggggctgggagtgttctacctgggctcctctggtccacttcagctgtagccagagatccccaaattggactgaatattccaaagtaggctgaactcctcaggcccactctggatcaaacccacctttctatttcttctccagatctgacagtggtcttccttttagcttgattttattgtgctactgcactctcaggtcctcatgtatcagtgtgtcatttgcttattcctttatgcttctgtaggtatactctcagaaatgattttaaaaaaaaaaaagctcatttgtgtcataaaaccctttgctgtggtaatgaacagtcttgacagttttttagccaatggcatccagggctagagtgatgaattaaggatagaatcacattatttcctatacatatttagcaagttgaacaaaatactcaccatatttggttggtccctcacagccctgaaagagaaagggaaggtggtattttatcctaatgttgcagatgggaaaactgag

SEQ ID NO: 104607 - DNA, 1063 bp, Homo sapiens
gtcctgaacagtgatttttttttttttttttttttgagacggagtctcgctttgtagcccaggccggagtgcagtggcacaatctctgctcactgcaagttccgcctcccggctggacagtgaatgtttaaggaattctcttagctaaacagggctactctattgtttaatatcagtaaaatatatattcaagaatattttaggtaaattcattgaagatcggccagtaagaggttatgaagaggaactagaggtgttggtggtatgtcttctaggctttgaattctttagctgccattctctttggattactctgccaaactattcctgtttgatggaacataccgttggcccatactggcagggcttgtgttcttattcaacattcaaaggtttctataagaaatgtgaaggcatgatgataaactcacaaaagatggatgttatttatttccattcagattcaccaggacacgagactcacccaacatgtgcctctgctcaaaaagaccctggaacttttagtttgcagagtcaaagctatgctcactctcaacaattgtagagaggctttctggctgggcaatctaaaaaaccgggacttgcaggtaagccttggatcctgctagtgataatcccctactcttattctttgtgacagcatcagatggcatgtaaggaaggtcacctaagccctcgtctctcagtaaggctacttttctcttaagtctgtgactgtttaactcttaaagttatggtacattactcatgggccctggtcacaggctgcacccctcatcttaggcagcaaggcaccaaaacatgccattgatataaacaatgcctcagacataaaggagtcagaccagtacaaacctctctccacagctagaggagctcctttaagccccactgagggtagattcataataacatttttgtatagggacaaacatttcttttgttattttttttcccctaagccaatctgtcttattccagaaattacaaattaatctcttattgggggacctgccccgataatcacgtaggttcttttcta

SEQ ID NO: 104608 - DNA, 1096 bp, Homo sapiens
cattctatatcgaatgccctctttgttcctatgtcatatacatgcagtagagctggaggaccatagcttatttaaaattatgcaaattgggccgggcgcaatggctcacgcctgtaatcctagcactttgggaggctgaggcaggcagatcacctgaggccaggagtttgagaccagccttgccaatgtggagaaaccccgtctctaccaaaatacaaaaattagccgggcgtggtggcacatgcctgtaatcccagctacttgggaggctgaggcaggggaatcgcttgaacccgggaggcagaggttgcagtgagctgagatcatgccactgcattccagcctggtgacagagcaagactcctttaaaaaaaaaaaaaagttttaacagtgataatagtacagttgtgtatcctctaggagctgtattccagaggtcacccagagcagtaacctaaaatgcttatttatttattctttgccccttaggatggtgaagaagacgaagtaagtgctggagaaaaggagcaagatagtgatgagagttatgatgactctgattagaccccagataaattgttgcctgcttctgtgtctctgccagcctgtgatcattttgtgttagagtttgaaatccgctgtttgcctttcttactggtaggatccttttttgttcctctttttttttttttttttttttttttaaagacggggactcgctgtgtttcccaggctggagtgcagtgctgcaatcttggctcactgcaacctccatctcctaggttcaagcgattctcctgcctcagcctcctgagtagctgggacgacaggcacatgccaccatgcccagctaatttttgtatttttagtagatacggggttttaccatgtcggccagatggtctcaatctcctgaactcatgatccacctgcctcagcctcccaaagtgctgggattacaggcatgagccaccgctcccagccatattttgttcttaaagtggggtctttattaacttgtggacatcatggattgtctaacaccatcacagtccctggctcaggattctaatgtagcattatttattggtttgga

SEQ ID NO: 104609 - DNA, 1129 bp, Homo sapiens
aatccttgacctatatatatagatttttgacatcccctggtacatagaaatccatacatctttctcctctacaccccttttccccccaattcattgtggttgtaggtgtttatgtgagttcacactaggctcattggtttatatcatttgtttaacggttatcacatggacatgtcaatgctagtttgactctaaatggttcaaccttacaatgggaatgttcttccttgttctctatcattggtccttttttggaggggaagggatgaaaggggctcctgaatcatcactgcttgaaacaaaagcaagatggctgggacaatgtcacagtttcatttacatggacaggtttctgtaagctttaggtacataccaaagggcatggtgtgagtaaatggggatcaaatgaggaccctttacttggagtgctgcaaggcaaaggtgcactttttgtaagttgcatacagcaagaggatagagcgcagcatctgtttgcacatagtgactgtcatctgaatctgaggctccttcagtccaatgggccactggtgctccctgctaatgattttgcaaaaggctgacttgtctgaaactctgaaagtcccggtccactttggtggctgagctgtgataaccctgccaaagacagaatctactccactgaggcggatgggctggggcttcctgaccagtcctttgttgttcatcgtgcgcaactctgatgtgtggcagggtaacttgggactcactccagattccaggaatgggctgtctaggactagagtgacctcttgaaagcacagctgcacttcaaggtcggacggtgtgtgtgggaagcagggggaggccttgaatgggtgcttggaggaaggtgtaggtgtcgtgtgccgcagccattggaaactctcatccagtggggtccatggtgaccagagctggtatcctgccattgacagtcctaaaggagggaaatcagagcatggaatttccctgacatgcttttcatgagagcatggcctttcaaattcccatctctgtctcactatagacataaacttgttctatagttcccatgaatagattccaacaggtgttaggatattagtaattattttattttattttattt

SEQ ID NO: 104610 - DNA, 1086 bp, Homo sapiens
aaaccttgtctcaaaaaacaacacaaaaacacaaatttccttctgaaagggactgttccagtttgcagtgtgcccagctatttatgaccatattattttttagactccgtctaaaaaaaaaaaagacttgtatttaatgtgatttaatcgactgtgcccatctcactgcggacactgagtgcgcaacctgagcctggagcagttgagggagacggcaagaccccacgcgccgtgtaacgaccataacgcgcgtgcactacaacctcgccgccggcgtccaggcttctgtgttctatagcgtgggagtagagagcaaacgccggcgaggacgtgacgttgcacaggcctatcatagtgcccgagaattcgtgggtgctcaagaggatgggtgtggcctggcagcgcaggcgcactagaggcctgtagggtcggggcgcctgcgcagtcgctcttcctcaggcggcggccatggcgggacaggaggatccggtgcagcgggagattcaccaggactgggctaaccgggagtacattgagataatcaccagcagcatcaagaaaatcgcagactttctcaactcgttcggtcagcgggccagcaaggggaggcggggaggagggaggccgctgaggtggttgggctggggcgccggggagatgctttgagaggactcccgcagccttcggctgttgcgggttttcacttcctccttcaggtcccaccttctccctcccgccctgaccctcaggctcccgtagacagtctctgtagggttatcctgccctacgctgagctcatggcttcctgccatccctctggatccattctacaagtccttctcctagacgcgtcaggcagccccatcctcgctccgtggttcttctcctaagtggtctccctgcctcctttgtactctgcatccattccggtccccactttgcactcaaagtgagcatccgggaccgtgtcactcctctgtttcaagactgttgaccgttccccatcttcaggatctggtcgataccctctagcgtcgtgccttttagttggacccgttgtcaaccactcccgtcttgtccattcct

SEQ ID NO: 104611 - DNA, 2047 bp, Homo sapiens
gacagagttttgctgtttgacccaggctggagtgaagtggcgagatcttggctcactgcaacctttgccccccccggttcaagtgattttcctgcctcagcctcttaagtagctgggattacaggcatgtgccatcatgcctggctaatttttgtatttttagtaagagacagggtttcatgatgttggccaggctggtcccgaactcttgacctcaggtgatccacccgcctagtcctcccaaagtgctaggattacaggcatgagccaccgtgccctgcaggaaaggacgtttttgtggggccgttattctctacttgcaacacttgataggaagttcagcagatccactctaagcaactgtgctatgagtggatcttagcactgtatccatttccatttgtattctgtgtattattcctctttttcattgtaggtgttgtgtgtgtctgtgtctgtgtttggagtgacattaatcctgaacaccagtctctttttctcagatatgtcttgtcgttcaagacttgcaacactaaacgagaaattgacagcccttgaacggagaatagagtacattgaagctcgggtgagtttgatgggcaagggcattccagagagaatgcacatttccacttattgctgaaaaaaacctgaaagcagaaacagtcttaggaaacttaagcactggccggacatggtggctcacgcctgtaatcccagcactttgggaggccaagacaggtggatcacttgaggtcaggagttcgagtccagcctggccaacatggtgaaaccccatctctactaaaaatacaaaaattagccaggcatggtggctcacacctgttgtcccagctactcgggaggctgaggcaggagaattacttgaacctgggaggtggaggttgcagtgagccgagatcacaccactgcactccagcctgggtggcagagtgagactccatctcaaaaaaacaaaagaagagaaaagttaagcatgttgcctggatttgaaccatgtttctgtgacttcacagctatcttcttttctgctatttctcactgcctaggatctaaagatttttttttagacccctctaatcttttttaatttatctaaatgtcagttttcctttcctttcacaggtgacaaaaggtgagacactcacctagaacagtgccgtgctgctgctgggaagttgctttacacaacacaggccacatgggaaaggccccagcagccttcagctccttcctttctccttaaagagcaacagggcttattcttgtttttcttttttcaaaagtgtggcctttgggctctgccatctggggtgtggtgtggtatgtgggaagaagttcagaggaaccgttggaaacgacgttaggcattttaccttttcagtaacattttatacatctacttgtcaatgtatttgagacattcacagccaaaagcctgggactctttgtgaaggtcctcctcacctctatctttctttctctctctctcaaactttccttaaagttctcattgcctttgcactgcttctgtgaacagtctttgtctcctccccacctttggtgggaagtgcggggcagtcctggtcaagacactcatgccctggcaatgtggctgccagagaatgttgttgctaacccaccagtttcttgttgatttggagaggtcaaggccaggcccccacttggcttgaagggacattttcagacttttctttctgtcacttggagtgtctatgcctctcatatttccctaataaactcctcaactttttatctgactgctgtgattatggtggggagaggagctagagatgggttcacttattgcacagaaatgtaatacatggcgttattattctaacataaaactttcagatgtagctgtttgattcaaagcctaggtggcttaccagcccaagtccccatgtttggactttcagctgactagctcatcttgggaatcatttggtcattcagcacatttaccaagtatttactatgtaggcatgttaaactccaataa

SEQ ID NO: 104612 - DNA, 1039 bp, Homo sapiens
tgtaaatggatctgttgtgaggactgactgagataatgttactagaagggctttgtataatatttaagcagagtgagaggtaagctttttgtgtaggtcaggggaaatggagaaaataggtgccctgactcagaccagtctggctctttttttttttttttttggagacggagtcttgctctgtcacccaggctggagtgcagtggcgcgatctcggctcacggcaagctccacctcctgggttcacaccattctcctgcctcagcctcccgagtagctgggactacaggcgctcgccaccacacctggctaatttttttgtatttttagtagagacgaggtttcaccacgttagccaggacggtcttgatctcctgacctcatgatccgcctgcctcggcctcccaaagtgctgggattacaggtgtgggccaccgtgcccagccaccggtgtggctctttaacaacctttgcttgtcccgataggtcacctttggctcttcagagatgcagggacacacgatgggcttctggttaaccaaactgaattatttgtgccatctctcaatgttgacggacagcctatttttgccaatatcacactgccaggtactgacgttttactttttaaaaagataaggttgttgtggtaagtacaggatagaccacttgaaaaattaagcccagttctcaatttttgcctgatgtcaggcacgttatccaatctttttgtatcctattctctaccataaataaaatggaagtgatgtatttgtacgttatgtgttaaaggtgttatggtgtctcaaaagcactttgggctcttaagagacaagcgaaattaaagtatcatatcataggttagttttgtagaattgtagaattacgaatgccttttgtttccctggccaaattgtgccctggagttccaggagaacaatgtgtagagcatgagatattttggcttatttgttgctgacttctaattttttttatttttttgagacagaatctcgctgtgttagctaggctggagtgc

SEQ ID NO: 104613 - DNA, 1141 bp, Homo sapiens
tctccacttaaaatacaaaaattgccggccgcggcggctcatgcctgtaatcccagcactttgggaggcctaggcgggtggatcacgaggtcaggaaatcgagaccatcctggctaacacgggtgaaaccccgtctctattaaaaaatagaaaaaattaggcgggcgtggtggtgagcgcctgtagtcccagctactcgagagcctgaggcaggagaatggcatgaacctggaaggcggagcttgcagtgagctgagatggtgccactgcactctaacctgggcgacagagtgagacaccgtctcaaaaaaaaaaacaaaaaacaaaaattatccaggtgtggcggtgggcgcctgtgaggcaggcgaatctcttgaacccgggaggcggaggttgcagtgagccaagatcacaccattgcactccagcctgggcaacaagagtgaaattccatctcaaaaagaaaccaaaaaaacaaaaaaaaaacatgccgtttgagtactgtgtttttggtgttgtccaaggaaaattaaaaacctgtagcatgaataatgtttgtttttcatttcgaatcttgtgaatgtattaaatatatcgctcttaagagacggtgaagttcctatttcaagtttttttttttttttttttttttaaagctgttttttaatacattaaatggtgctgagtaaaggaaataggcagggtgtgttgtgtggtgttttaactaggcgcttctctctcagagagttttgaaacctgtttacataaaggcccaggatgggaaggagatccaaacataagccaccagcctcattccaagtctcttctatttccaaccctggattttttttttttatttaacattgtttcttttagctttatttttcttataaaagaaatgtatcactataaaaaattacacactacagaaaaatattaagaagaaaaacattcacatcggaaacaaagttttttcccatgaaaacagaacccaaaagggtaagtggttagtatttcaccagcaattatgttgagaataaggccaggcgaggtggctcacgcctgtaatctcagcactttgggaggccagggcaggcagatcatctgaggtcaggagtttgagaccagcctggccaacatg

SEQ ID NO: 104614 - DNA, 1072 bp, Homo sapiens
gagaggtaggaggaaagtcaggagggaatggtgactgagaaccagcagaagaggatttcaggaaagaaccccagtcctagagtcaggcaggtgtgggatctggtcctggctttactgctttctagtttgtgaccttgggcaagtcccttaacctctcagtctccgtttctggagatggggcagttgagatgtcatgtgttgcagagcagtaaagcaggatgaggaccaccatactcgttgaaggcagacagttttcatctttccaccctggggccaggcccttaggggtcagagtatgtggtacctgggaggttattggtggcgttggaggaggagagggcagaagaggggtgggacatgaggaagtagatcattctttccgtctgactcctcacacctgcactgacgcccgattccagatgctgccaccccaatgtcttacctgtgctgggcttctgtgctgcaagacagtttcacagcttcatctacccctacatggcaaatggttccctacaggacagactgcagggtcaggtaagggactgggtcatggtcagagaatgggaccaggctgcacccagccatggggtcaagggttaaggacttacagaagttcagaggggagaggggccatctaggtgagaccagggagacttcaaggagagaagtggggccaggatacataagatctggttaagtgctcactttggcagcacatataccaaaattggaacgatacagagaagatcagcatggcctctgaatgaggatgacaaaatatgaaaaagaaaaagaaaagctcaaaaagatctgattaaacatcttcaggaaaaatctataaaaaattatttgacgagaagcatttcattcaaatcaagagcaggacaaaggtatctcatagaactaacttcgttcgtcatggttctggaggtgttagccaatgcagtaggacaagaaaaagaattaagaggtaaagagtatggaaaagtggaggtgaatttttattataaaatgttcttctaatatatacctatttgcttgtgtgtttatggaatgtctctggaaagataca

SEQ ID NO: 104615 - DNA, 2071 bp, Homo sapiens
gctttttcccattttggagtatgttctcagtgtttgctcctgggggttagatgactagatcaaatgattttttttgagacagtgtaccactctgttgcccaggctggagtgcacctctgcttccgggttcaagcaattctcctgcctcagcctcctgagtagctgggactacaggcgcacaccaccacggctggttaatttttgtatttttagtagagatggagtttcggcatgctggccaggctggtcttgaactcctgacctcaggtgatctgcccatctcggcctcccaaagtgctgggattacaggcgtgagccactgtgcccggccaagagggaatttttttttctttctttttttacatgatctgggcaggtttagtcacaaaggatgctggccacttagacctgagtcagccaggccagagctgggggttggaacagttgtggaagagactgagtctgcacagcctgtaggcgtggcaagctgaggctgatcagggttggcatctgtggggatcagggaggctgcactttggccacattcctggggcagcaagactaagtctgaactccatctccatttgctggagggagtgtgctcctgatgccctctcttccccagtcagggctggctcagaagctccatgctgagggtctttagagacctcaacttgcaggaggtgaggttgctatattgtctccccaaagggtctccatggcaacttgttgttatccagctcaaaatgagaaggttccctctcctttcatttccacagctctaatgtcttgctggaccaaaatctcacccccaaacttgctcacccaatggctcatctgtgtcctgtcaacaaaaggtcaaaatacaccatgatgaagactcacctgctccggacgtcagccgcgtatctgccagaggatttcatccgggtggggcagctgacaaagcgagtggacatcttcagctgtggaatagtaagagtgtcctgctctgcgtagagtggggcccaccttgatttgtccttcccacggctcctttgtaatcacaggatacggtagaggcacacagacaggttccatcaaagtacaacaggggctgacaaactgtggcccacaggccactttggcctgtggcgtattttgtatggtctgtgagctaagggtagttttacatttataaaggattatatttttaaacacaaagaatatgtgatagagactgaacatgctccccaaaagctcacatatttactgtgtggcgtgttacagaagaaatttgccagcccttgaaggaaaaccactcatgagtgtccaggttctagtaggctccagatatcctctcctgacttccgtaattcccatccagccatccacttgtccatccagttgtctatttgtccttatttgttcatcgctgtccgatcatccatctaccctttagctgcccatccattcagcgaccactgacccacccagcatcccaccctaccaccaccaccatccttgtctgccattatgtcgtgccaggcactaggaatatgaatgtaacaaaaacacagtccctcccctcaggagctcatggtctgcatgtagcagtctccaaagtatatttctgtagaactccagttccttcggacctctaggattgatgtgttaaaagggtttgtgccctgacaggcttggaaatattgcattaggcaaagtcaagcaggtttctttaccacaagattaattcaagctggttgaatggtagtgagcctttaatctggtacttgtgaattcaccagagaggggtatgcagtgtttcccaagctcatttgactatggaaccttgtgttctcagaatatctgtccttgtcagtgttccatggaacccagtctgggaaatgctggctgagaagagtaacagtcaggttggcttcagccaagtgcatacagctgccccttgggcctcaccctcttttcttctctagccttgaactctgtacttcctctctctgaccacagtctcctgtctgtctacctctgctaccagaaccgtggccctgagtcacctctgccctcagccaga

SEQ ID NO: 104616 - DNA, 1066 bp, Homo sapiens
atggagcttttattctgagaatatgtgtttgtctgtttgtttgttttttgagacagagtctcactttgtcacccaggctggagtgcagtggcacgatctcagctcactgcaagctctgcctctcaggttcaagtgattctcctgcctcagcctcctgagtagatgggactgtaggcacctgccactatgcctggctaatttttgtgtttttagtagagacagggtttcaccatattggccaggctggtctcgaactactgacctcgtgatctgcccgccttggcctatcaaagtgttgggattacaggcttgagccaccgcacccggccgagaatatgtgttgttatttatgactggattatgaagaatcaggagaatgcatttcatgtctgattctgctgctaattaagtcaatcatttaatttttgggacctcagtttctttgtaagtaaaataacacctgcttgttcttcatccctgggctgttgggaggaacagatgagacagtggctatagaagcacttggaaaatgcacttgtcctgttttgtaaaataaaaaggtattaaatgtgtatttctgccatgtacctaatgattattcagtgcgtatatatctgaaaagtcatgttgcaaatctttctgtgaaacagatgctattttaaattcactgggagaaatatcctatttaaagtaatctatagtaatttctttttatataataaaaatatatttgtaaagtcgacagacaacttgtaattagttttgtgtctggaagaatttgtttagagaaggcactctgtatccttgagatggggtagcaaagagctaggatcctggctcttactgttgactgttaatagctgcatgatcttgggcccagttagggagttactctgaggctctgtttcctcatctgtacaatgggaaaaagaaaacgtacgcatcttgtagggttgttgttggatgggtcctgcctggtgaaacatttggcagctccccagtaaggacagctttggcttgatgtgtgatgtagctgagctgggtcccagtccaggtggacagtgat

SEQ ID NO: 104617 - DNA, 2424 bp, Homo sapiens
cttatgtcttgccgtcctcctgggcccggggtggcgggaatctgaggtggggtcgccaggaagggtggtgttggaatccaggccccctgtaccttgcaggtgcccatggcgtccgagcggggcaaggtcaagcacaactggagcagcacgtcggaagggtgtccccgcaagcgcagctgcctccgggagccctgtgatgtggccccctccagccggccagctcagaggtctgcgtcgcgttctggagggcccagcagccccaagcgcctgaaagcccagaaggaggacgatgtggcttgctcgcggaggttatcctggggctcatcccgccgcagaaataactcctcctcctccttctccccacatttcttgggccctggtgtgggcggggccgcctccaaaggctgcctgattcggaacactcgggggttcctgtcttcagggggatcccctctgcgtcctgccaacgcctctttggaagaaatggcttctctagaggaggaagcctgcagccttaaggtaggtggctgccacgctttgcaatcggtgaagccccttccacatggcttgagaggttggggatgggaattttggtggaaggagactacaaaacattacatccttgaaggtctggaaggtctttctagaagtccactccccccaaactcgaagacctagcagtcttccaggcgcgtggcctgaagttaagtagagaggtaattttcaaactcggcagcactttggaactacttggaaagctttaaaatacttgggcctgcctcctactccagagaaactgatttattgggctgaggtgtggtctgggcttccagatttttcagtgctccccaggttattgtaaacgtgcagccccgttggagaatcactgcagtagaaggtggattatgtgctcaagagaagaatgtatttattttagttgtcagtttaaagaattgtgtgcccttgtactttgaaccactctgaatcacagaaccaagaattgcggttcttggtgtagcttttctccaaagtcatagtttccagcatgttggggttttgcttggtggtgctagttttttttttttttcttttttttttggaggttaaattgttaattccctaatggaaacatgcaagagggtttcataagtactttgagcagaccaaggagtgcttcacagagaagatacatttcgctcatctactcaatcaaggctttgaacaaatatgtgttgagggtttagtttgtgccaggcaatgttctaggtgtttgggattctttactaacaaaacagatcactttccccttagagtttgcatcctagattttgaaggtctgagtcttaagaagtgagaagttctgcctgtggaggagtggagaaacagtcttatttgggatcagatgggctgcctctagagaaaattactttacaaaagcaattaaaacaggccctaaggaatatgtgtttgtttttaagcctagccttggtggtttcttttgtgtagctgagaaaggaggctgtatttgactgtttgtcttggggactcataggctaagtgcccctggttttttcaatgtggacctcactgtctgaactcttgtgtgggcacgtggattttttctttttaaattcacaaataacagtgagttgaaaagccctgtctctagcgtaggaatgctgaatttgtctcaaatcaggtaagtatgggactttgctcatacaagttaatcttgccattaatccttgatacaatttcagtagacttgggtacagcataaaataataccagttgattcaatttagcttcactgacaatttgtagatagagtgaaacctgttactgggagaggcaggaaatttactttacatagtctttcaggtgtgctgaatccctggctgtcctaaagacctggaactcaggtttgagggtgtggtctctaatctgggtgggtctaattgtaggtggacccacctttctctcattaaggctaaaggggccttgttttgcaagaacccaatttaatggtttcagtagaagcacttgagggttattgtgggccacgcactgttgggtctgggagtgatgagcttctagggagcagtctggtgggagggctggaggagtggtcgcatgactgcccacaatgtggtatgatggagtagtgagcccagaatggaggctggagagcgaggtagggggtggattgcagcaaggttttagtagccaagggaatttggattttatcctaaggacaatggattttattctaagggacaattcccttagaattgtattctctttttttgagacagattcttactgtgtcacccaaggtagactgcagtggcatgatctctgctcactgcagcctccacctcctgggttcaaacaattctcctgcctcagcctcccaagtagcta

SEQ ID NO: 104618 - DNA, 1118 bp, Homo sapiens
tccctttgactggtagaaccaccactgatttataatttgccaaatgcttcatgtacgaaagtgcccttggaacagccctttcaattctgttttttttttcccaggttgattccaaagatagttctcataactccacaaactctgaatttgcagctgaagctgagggtcagaatgatacaattgaggaacccaacaaggtccagaaaaggaagagggatagacttcgagaccagggctccacaatgatctacctgaaggctatccagggcatcctggggaaatcgatgccaaaaaggaagggagaggctgccactcgggcaaaaccaagcgcagcagagcatcccagccatggagaaggaccagccaggagtgaaggaccagccaagactgcagaaggagcagccaggagtgtcacagtcactgctgctcagaaggagaaagacgcaaccccagaggtcagcatggaggaggataagacagtgccagagaggagcagcttctatgacaggagagtagttatagaccctcaagagaaacccagtgaggagccccttggggaccgaaggactgtcattgacaaatgctctccacccctagagttcttggatgactctgactctcatttagaaatccaaaaggtgagtaaagcttgtaccaggcatctgactttttagttctgttgatgaaatgtgttccatctttctagtttgatcctaagtgttactaattaaaaatagtactttacttaaccaggcctccagggaacaaactgatggttttcttctaacatacttttcagattttcagagttattaataaacctaaactaagtgcttttttttttttttgaaggatttatatgttaggatatgggtttagctgctgtgtaaaaggccaaaatcacagtggcttaaacagaatataagtttggcttaagaaggatggctccatcatgtcagagatactggtaccttttgtcttgattctctatcacccctcaacacagtgtccatctcttggtgtgaaatggatactctgataggactcagggtttgttatctgggcattctggccagtgggaaggggagaagaggagagtgcattccttccctgttaag

SEQ ID NO: 104619 - DNA, 1070 bp, Homo sapiens
caccgactatgtcatgtaccctcctcatttgtacagtagtccttggtgtgactacgccagctattggaccagcagccccaagccttctagctacccctccacaggcagcagcagcaacgatgcagcccaggttgggaagagcagccggagccgcatgagtgattattcccccaactctacagggagtgtccaaaacacctccagagacatggaggcctcagaggaaggctggtcccagaattctcgttcatttcgcttctccagaagctcagaagaaagagaggtgaaggagaaaagaacattccaagaggagatgcctccgcgtccttgtggaggacacgcatccagctccctgccaaagagccacctggagccaagcctagaggagggcttcattgacactcattgtcacctggacatgctctattccaagctatctttccaagggacctttacaaagttcagaaaaatttacagcagctccttccctaaggaatttcagggctgcatctctgacttctgtgatccccgcaccctgacagattgcctatgggaggagctgttgaaagaggatctggtctggggggcctttggctgtcaccctcattttgcacgttactacagtgagagtcaagaaagaaatcttttgcaagccttaaggcaccctaaggctgtggcatttggagaaatgggcttggattactcttacaagtgcaccacgcctgtcccagaacagcacaaggtaacaaggctctctttagtctgcttatagttttaatttttcttttagttgttgaagcctgacaataagggtttatctaattttagaagtaaataattgagaatccctgaaaacgcagtgtgcttgctctcatccagaccatctagatgccatttgtcaaatgctttacaagctatttcttactgttcagctttattatggaagatgagggagaagtactttgtgacttcttatggatgatatcaatgtcaaaacatttgttttctttctttcttgggaagcaataaactttaggttttcttaattgattttttgagagggagtcttg

SEQ ID NO: 104620 - DNA, 1168 bp, Homo sapiens
caaatatttgagtaccttctgagagccaggcaccttgctggagatgcacacaaacaccacgccctgccgtccccaacagctctgcataggagaggtctggaagttggtatctcttgagagcggaggtggggacagtgaggtgagggacattaactttgcgctttatgttcttgatccctgccctgcccctgccaccccaggtcggcatcatatagtggttactgtgtggaatgccagggttcaagtttggatcctggtgctatagctgctggctgcaagttaacttgccctcactgcatgctgcgcagacagcagcacctgcctcagggtggttgtgaggactgcaggttatgatagacgtgcagtgctttgggcactacctggctctattgtaagtgaccaataatcattagctattattacattatatagttaaaaaaagagagacacagggggtgcctgctggactgggcgttccagaggtgatggacttctgaagtgctgctaaccaacaggggttgtcgctgtgtcctctcctaggtatttgagagacagctgcagctggctgtgtctctaaagaagcccttggtgatccactgccgagaagctgatgaagatctgctagaaatcatgaaaaagtttgtgccccctgactacaagatccataggttagaagactggaacttcagcgggcaaatgaaagaaacacttcctctgtcaagttgatgaggacagcaatgatcgtattctgtcattatacactatctattcttttttttttttttcgagacggaatctcaccctgtcgcccaggctggagtgtagtagtgcaatttcagctcactgcaacctctgcctcccgggttcaaacaattctcctgcctcagcctcctgagtagctgggattaccggcacatgccaccacgcccagctagtttttgtattttaagtagagacggggttttgccatgttggccaggctggtcccgaactcctgacctcgtgatctgcctgcctcggcctcccaaagtgctgggattataggcgtgagccaccgtgcccggcctatacactatcttttctaaagaattaactattaggttaaaccacttgaaatttctcatatttgacctttttttttttttttgctcacaaaatagtaacttcg

SEQ ID NO: 104621 - DNA, 3392 bp, Homo sapiens
ccaacgaggtggtattgcaggaggaggccctaaatttacagattggtaactatatatatggcaccaagaacatgaacaggtatcagattaagaaaatccacctgtagttcgactccccagtattttgttagatttcctttcagttcatttgactacttgggcatagtttttatatgctgtcgttgtcatcataggggccacagttgttgattttgctcctcttcagtgttagaagcatttcctatcccagtgtgttctctgtggtggtcatctcaggggactgcagagcactctgtggtgtgcgtggtatctctgagtgatctctgatcactcaccaagtgccatctcggggcttcctgtgttggagccagcccttgtctgtgtttactgtggagtccttccctaggatgcagtctttccatttctgggaatcattgaaaaggggtgatgggtgtggggggagctgggggctgctgcagaggggactgtgagcagccctgatgtggagttctgtctccaggcattgcttcaccggcagctacccggtcattgagcccctgctgaagtactttcccaacatgtctgtgggcttcacggcagtgctgacatactcctctgcctgggaggcccgggaagccttgaggcagatcccactggagagaatcatcgtggaaacggatgctccctatttcctccctcgccaggtaagggggtcttcaggctgagtggaggcaccggagggagagggtggggaggtgggtggtcacccttacaaggttggcagggccagagccccagtgacttccaggtcccatcctgggctgtgtagatgcctccttgctgttactctgcagaaccaaaagtctagggggctgagaagctgaagggtaaccactctcttccaggcagtgcaaagccctaccctgtagagggtagtccaaggaagcgtgggaccctgctcacccagagcccccatgactaggactctccctgcacctgcaggtaaaggggtctctacagggcagccccaaagaggtccttgctggggaagggacagggagggagttctagattatgactgtgcacacatggcacaatgatgttatgaccacttgatgtcttccaggttcccaaaagcctttgccagtatgcccacccgggcctggccttgcatacggtccgagagattgccagagtcaaagatcagccactctccctcaccttggctgccttgcgtgagaacaccagtcgcctctacagtctttaagcagagaaggtacagtcctcgggagtctcctagaaaaggtcgtaaaactcacattctgtattttttaaaaaccaggacaagtcttttgttgcattttgttaatgtaaagaatataaacatagtatgagcattaagcctgatttgttttgagtgacatggtttggaaccttcttctttttctcttccaccctccagggcgaccagcagcctgacagaacacaggctggcttgaagtctgtgtctcaggtcgaggatgtgtttagagagctgattggaacacagaaaaccaggacaggatgttttcctccaagcgggtcataaggcttcagcttctgggtggtgggtggggtggggtgggcatggaatgaggggtatggggactgcctgtaatagcactgggattttgcctcccagccaaaatgctccagggtaggcagcaaagaagaaagagtgcgatatgagggtacagtgagtttggcagtccaaattctgttctctgcagcctgtttttgagtagttggtgaataaagtcacccgcctacttgtctaagcacatgtgggtgtgtaactcagttcctggttctcggttctaaaaacagacttccaactgggaaactttttgggggaaattaactggacacctatctcggaggtttattttcttgcaaccagtgaagtcgtcctcctcccttccctggataactcttcagtttgactgtcactgttctggtgtcaactccagcgtcggcacaggcagaaggacttcagctgctggtctcattggttccactgccattgatatgggggggtgcagaggagcactcattgtccatgatggagatccaggacagactgggggactccgggaagaggctttcttggggaagaggaccccaaaggaggtacttcctcctcactgatgccctcagggctgctgtgtgggtgtgttaagctgataaggttcagtttgcggcggaaactacctgctagtcttgtgtcaggggctgccagcctccttttgtttcacttttgcccccttcttgggaacatttgaccaaaaataatcctcatttcatcttgtgtacagtcctttgtgtaccccgcccaggttgagaggtgaatcagcgtaattctccgaagctctgctgggcagctcagccatgttacattgtctatgcagaataagcaggcctggtgtctgcaaatgtaccagtccttctcccgcatctcctgggtgcccccttggctttgcctctcctgtgtcctgtctttctgcgttttagaagtgagagcctctccttcaccttttgagcaactgagtcatctcaagtcctgagctctgctctgccgcctgctggtgccttgtaaaggtatactcgttacaggccctagaggttctaatggtccagggttaagtgagaggagactgtactttgtttcaaaggatccttcaccctgatctgcagtgaggtggatagatcacctggagtccctcgtctgtggtcttggaggcttaaattgtaaaatacatcccttatggaatcctaaattcctctaggtgtttttggaaggcgcatttgagccttgtgagctaaaatggaatggatttaatatttcctatctggcatttccatcttgcccctggtacacaagtcactggcctggaactcagccttgattcactgtccgtcttcacggattagctgtgctgttatgttgtctgtgctgcagattggcccatgtgggaagtcgggggggacctgatttcctgcttggaagacttgggggactgccgagcatatcaaagtgtttatagtcaccaagtgaactgcagcacaaccatctcctctccagcaagccctgaagtcagtagtgcctgcaggtgaaaccaaccagccctgtgttagaggaggaaaagcggagatgacatggaagtctccaagcctgtgccatccacctgccaaggaaaagcacaaggtgctatctacttttctctctaggatttagattatcatttatgtgctgttgcacagtgaaacctcacctgtgtgggcgtgaaagctgattggcattgtttttgattcagctttttggatggctaattgttttcactgtgctgtgggaa

SEQ ID NO: 104622 - DNA, 1893 bp, Homo sapiens
attaggttttctaaacatgcacattggccttgctacttgtccttttattcccttcccacagaccataaaccaagaattatttttatttgtattattttgatttttttaaagtaaaatattaacttttcctctttgaaataaattcccatttggaacatcagcatacagtttgaacatttattcgcctcctgagcttgtacaacagtcgtgggagttgctgcagaagcaagcgaaaagccagatgagcgcttctaaacttagagagaggtgagtaaggcttgtgggcgatcacttgtcggctggggcctctggaaagcaagaggttgagtaagaatgctgggtgcaccgtcctgctagtgcttttcttccacggtggtgagattggaggtgggatgtaatggtgggggttgtggggaagcactggccttggagtcagagggcggcactcaagtgtggactgttgtgccctgggcaagtcacctcaaagctctgagtcttggtttcctcgtttgcacagcggggtgaatgctacccctgctgttccccaggggtgacgggtcaccgccttggtgaggacagtgctttgcagatgtgcaggtgtttctgccacctcaatcagttgggcggtttcttttttttcttttacaaggtgaggggattcaaagcaaaccctttgcttaactcaggaagctctaatatttgaaggaactgcttaacaggctgcagaacctgttctgagtgctattttggcaccaattcctttttgtttgtggagtaaagttacgcagtgaagacggtgtaacaccaaataattgtagactctcacaataggtaaaatagctccattttacagttaaggaagctgaggttcaactgaggccccaaagctagttaatgtactagttcttagaacattctttgaacacaaagactatgatgaactcccttctgagccactcacaaatactagccaaccactatcctgcagatctttgggaaagggaaattagaagttcttttggagaggcagaggttggggaaaactcatcacccacagagtgaactcccatgtggggctgcaaggaaaccgagcaaacccagtccaggcaggactcacctttggcctcttcccagaggatgtcctgaagaaacttccccagggcctggctgtgctgctggtactgaacccctgacagcttgattccaacatcaaagggggcgttgaactaggaggcagggcagggaggacccaggagatgtcagaggtcatgcccatccccatctcaaagggggctctgggctctctgcctctcttcaggagtggagagggagaatggcctttgggccccagcagggactgctgagtgacacctcagccaggttctcttcctttctcaggaccacagctcaccttcccactcaccatctttcagacacttaccttgcactctcatgcctctcagccttagcctctaatgggattgctgataaaagctgtggtgccccctagtgtgagattttttttctcccttgcagttttgaagacaaaaggttgagtcaccaatggcagcatttcaggccctggcagggggtctgcccagcattctcagcactggcctgctggccttctattccttccctgctcccagctctttctcctttctctcttgtctgtttcttctcctttttctccttccctaggtattttttctctcatatgcatagacctttctttgatgcctggaaaatcaaaaggaagttgatgttttcctagaaagaggctctgagccaagtcctttctgtgcttccatttcttcccctctacagggagagcgcctcatctcttccattttccaggtattcctgagatgatttattggagctcaaagcttt
